United States Patent Application Publication US 2007/0214517 A1 - sequence listing, part 68

SEQ ID NO: 88525 - protein, 882 aa, Arabidopsis thaliana
  peptide (1)..(882): Ceres Seq. ID no. 12710258
  misc_feature (342)..(433): Pfam Name: IPT/TIG domain Pfam Description: IPT/TIG domain
  misc_feature (271)..(881): Homolog of NCBI NO: 15228914 NR Description: calmodulin-binding protein; protein id:
  misc_feature (1)..(150): Homolog of NCBI NO: 15228914 NR Description: calmodulin-binding protein; protein id:
  misc_feature (166)..(229): Homolog of NCBI NO: 15228914 NR Description: calmodulin-binding protein; protein id:
  misc_feature (271)..(868): Homolog of NCBI NO: 7670023 NR Description: transcription factor-like protein [Arabidopsis
  misc_feature (1)..(150): Homolog of NCBI NO: 7670023 NR Description: transcription factor-like protein [Arabidopsis
  misc_feature (166)..(229): Homolog of NCBI NO: 7670023 NR Description: transcription factor-like protein [Arabidopsis
  misc_feature (1)..(868): Homolog of NCBI NO: 33146995 NR Description: putative calmodulin-binding protein [Oryza sativa
  misc_feature (270)..(880): Homolog of NCBI NO: 37533660 NR Description: putative calmodulin binding protein similar to
  misc_feature (1)..(113): Homolog of NCBI NO: 37533660 NR Description: putative calmodulin binding protein similar to
  misc_feature (281)..(857): Homolog of NCBI NO: 30681670 NR Description: ethylene-induced calmodulin-binding protein,
MLDEAYSRWLRPNEIHALLCNHKFFTINVKPCGTIVLFDRKMLRNFRKDGHNWKKKKDGKTIKEAHEHLKVGNEERIHVYYAHGEDTPTFVRRCYWLLDKSQEHIVLVHYRETHEVHAAPATPGNSYSSSITDHLSPKIVAEDTSSGVHNTCNTGFEVRSNSLGSRNHEIRLHEINTLDWDELLVPADISNQSHPTEEDMLYFTEQLQTAPRGSVKQGNHLAGYNGSVDIPSFPGLEDPVYQNNNSCGAGEFSSQHSHCGVDPNLQRRDFSATVTDQPGDALLNNGYGSQDSFGRWVNNFISDSPGSVDDPSLEAVYTPGQDSSTPPTVFHSHSDIPEQVFNITDVSPAWGVFDRENKGLMHLLWLSVSTEYFQHLGRSNLICICGELRVPAEFLQMGVYRCFLPPQSPGVVNLYLSVDGNKPISQLFSFEHRSVQFIEKAIPQDDQLYKWEEFEFQVRLAHLLFTSSNKISVLTSKISPENLLEAKKLASRTSHLLNSWAYLMKSIQANEVPFDQARDHLFELTLKNRLKEWLLEKVIENRNTKEYDSKGLGVIHLCAVLGYTWSILLFSWANISLDFRDKQGWTALHWAAYYGRPNLVTDPTKEFLGGCTAADLAQQKGYDGLAAFLAEKCLVAQFKDMQTAGNISGNLETIKAEKSSNPGNANEEEQSLKDTLAAYRTAAEAAARIQGAFREHELKVRSSAVRFASKEEEAKNIIAAMKIQHAFRNFEVRRKIAAAARIQYRFQTWKMRREFLNMRKKAIRIQAAFRGFQVRRQYQKITWSVGVLEKAILRWRLKRKGFRGLQVSQPDEKEGSEAVEDFYKTSQKQAEERLERSVVKVQAMFRSKKAQQDYRRMKLAHEEAQLEYDGMQELDQMATEES

SEQ ID NO: 88526 - protein, 841 aa, Arabidopsis thaliana
  peptide (1)..(841): Ceres Seq. ID no. 12710259
  misc_feature (301)..(392): Pfam Name: IPT/TIG domain Pfam Description: IPT/TIG domain
  misc_feature (230)..(840): Homolog of NCBI NO: 15228914 NR Description: calmodulin-binding protein; protein id:
  misc_feature (1)..(109): Homolog of NCBI NO: 15228914 NR Description: calmodulin-binding protein; protein id:
  misc_feature (125)..(188): Homolog of NCBI NO: 15228914 NR Description: calmodulin-binding protein; protein id:
  misc_feature (230)..(827): Homolog of NCBI NO: 7670023 NR Description: transcription factor-like protein [Arabidopsis
  misc_feature (1)..(109): Homolog of NCBI NO: 7670023 NR Description: transcription factor-like protein [Arabidopsis
  misc_feature (125)..(188): Homolog of NCBI NO: 7670023 NR Description: transcription factor-like protein [Arabidopsis
  misc_feature (1)..(827): Homolog of NCBI NO: 33146995 NR Description: putative calmodulin-binding protein [Oryza sativa
  misc_feature (229)..(839): Homolog of NCBI NO: 37533660 NR Description: putative calmodulin binding protein similar to
  misc_feature (1)..(72): Homolog of NCBI NO: 37533660 NR Description: putative calmodulin binding protein similar to
  misc_feature (240)..(816): Homolog of NCBI NO: 30681670 NR Description: ethylene-induced calmodulin-binding protein,
MLRNFRKDGHNWKKKKDGKTIKEAHEHLKVGNEERIHVYYAHGEDTPTFVRRCYWLLDKSQEHIVLVHYRETHEVHAAPATPGNSYSSSITDHLSPKIVAEDTSSGVHNTCNTGFEVRSNSLGSRNHEIRLHEINTLDWDELLVPADISNQSHPTEEDMLYFTEQLQTAPRGSVKQGNHLAGYNGSVDIPSFPGLEDPVYQNNNSCGAGEFSSQHSHCGVDPNLQRRDFSATVTDQPGDALLNNGYGSQDSFGRWVNNFISDSPGSVDDPSLEAVYTPGQDSSTPPTVFHSHSDIPEQVFNITDVSPAWGVFDRENKGLMHLLWLSVSTEYFQHLGRSNLICICGELRVPAEFLQMGVYRCFLPPQSPGVVNLYLSVDGNKPISQLFSFEHRSVQFIEKAIPQDDQLYKWEEFEFQVRLAHLLFTSSNKISVLTSKISPENLLEAKKLASRTSHLLNSWAYLMKSIQANEVPFDQARDHLFELTLKNRLKEWLLEKVIENRNTKEYDSKGLGVIHLCAVLGYTWSILLFSWANISLDFRDKQGWTALHWAAYYGRPNLVTDPTKEFLGGCTAADLAQQKGYDGLAAFLAEKCLVAQFKDMQTAGNISGNLETIKAEKSSNPGNANEEEQSLKDTLAAYRTAAEAAARIQGAFREHELKVRSSAVRFASKEEEAKNIIAAMKIQHAFRNFEVRRKIAAAARIQYRFQTWKMRREFLNMRKKAIRIQAAFRGFQVRRQYQKITWSVGVLEKAILRWRLKRKGFRGLQVSQPDEKEGSEAVEDFYKTSQKQAEERLERSVVKVQAMFRSKKAQQDYRRMKLAHEEAQLEYDGMQELDQMATEES

SEQ ID NO: 88527 - DNA, 1083 bp, Arabidopsis thaliana
  misc_feature (1)..(1083): Ceres Seq. ID no. 12710287
  misc_feature: MA Experiment ID: 20000179 Result: Up-regulated in Transcription
  misc_feature: MA Experiment 20000179 PARAMETER Experiment Name: At_Germinating_Seeds_P Parameter: Age (hr) Value: 6 vs. 0
  misc_feature: MA Experiment 20000179 PARAMETER Experiment Name: At_Germinating_Seeds_P Parameter: Tissue Value: Germinating Seeds
  misc_feature: MA Experiment ID: 20000180 Result: Up-regulated in Transcription
  misc_feature: MA Experiment 20000180 PARAMETER Experiment Name: At_Germinating_Seeds_P Parameter: Age (hr) Value: 24 vs. 0
  misc_feature: MA Experiment 20000180 PARAMETER Experiment Name: At_Germinating_Seeds_P Parameter: Tissue Value: Germinating Seeds
  misc_feature: MA Experiment ID: 20000451 Result: Up-regulated in Transcription
  misc_feature: MA Experiment 20000451 PARAMETER Experiment Name: At_CS6879_Shoots-Roots_P Parameter: Age (day) Value: 14
  misc_feature: MA Experiment 20000451 PARAMETER Experiment Name: At_CS6879_Shoots-Roots_P Parameter: Organism Value: A. thaliana
  misc_feature: MA Experiment 20000451 PARAMETER Experiment Name: At_CS6879_Shoots-Roots_P Parameter: Plant Line Value: CS6879 vs. WS
  misc_feature: MA Experiment 20000451 PARAMETER Experiment Name: At_CS6879_Shoots-Roots_P Parameter: Tissue Value: Roots
atgtcgttgcttgtatttctttgccaaattatagtattatcggtcttgttcttctccgaggtgtgccttgccggtaaaaaaattccagcaaattttgtgttcggagattcattggtggatgccggaaacaacaactacttagccacattgtcaaaggctaattatgttcctaatgggatcgattttggatcacctactggtcgattcactaacggaagaacaatcgtcgatatcgtatatcaagcattaggttccgacgagttaactccaccatacttagcaccaacaacaagcggatctctcattctcaatggcgttaattatgcttcgggcggaagtggaattctcaattccaccggaaaattatttggcgaacgtataaatgtggatgcacaactagacaactttgcaacgacaagacaagacatcatttcttggatcggtgaatccgaagccgctaaattattccggtcagcaattttctcggttacgacaggttctaatgatctaatcaacaattatttcactccggtcatatcaacccttcaacggaaagtagtagctccagaagtctttgttgatacaatgatctcaaaatttcgattacaactcaccagattgtaccaattgggtgcgaggaaaatcgtggtgattaatattggtcccatcggttgtataccattcgagagagagtctgatccagccgctggaaataactgtttggccgaacctaatgagctgaaaacactcgtagaagagttaaacaagaatctacaaggttcaagattcgtctacggtgacgtttttcgcattgttgatgatattatacaaaattattcatcttacggttttgagagtgagaagattccttgttgttcgttagttgggaaagtaggtgggctgattccatgtggtccaccttcaaaagtatgtatggaccgttccaaatatgtattttgggatccttaccatcctaccgaagctgctaacatcatcattgctcggcgtctactctccggcgacacctccgatatttatccgatcaatattcggcaactcgctaacctcaagataaatgcatga

SEQ ID NO: 88528 - protein, 360 aa, Arabidopsis thaliana
  peptide (1)..(360): Ceres Seq. ID no. 12710288
  misc_feature (32)..(123): Pfam Name: GDSL-like Lipase/Acylhydrolase Pfam Description: GDSL-like Lipase/Acylhydrolase
  misc_feature (194)..(360): Homolog of NCBI NO: 15234857 NR Description: proline-rich, APG like protein; protein id:
  misc_feature (1)..(123): Homolog of NCBI NO: 15234857 NR Description: proline-rich, APG like protein; protein id:
  misc_feature (1)..(356): Homolog of NCBI NO: 34899288 NR Description: similar to GDSL-motif lipase/hydrolase [Oryza
  misc_feature (25)..(356): Homolog of NCBI NO: 15227849 NR Description: putative GDSL-motif lipase/hydrolase; protein id:
  misc_feature (18)..(356): Homolog of NCBI NO: 15229742 NR Description: putative protein; protein id: At3g50400.1 thaliana] >gi|7630026|emb|CAB88323.1| putative protein thaliana] >gi|26450386|dbj|BAC42308.1| unknown protein
  misc_feature (203)..(290): Homolog of NCBI NO: 15234857 NR Description: proline-rich, APG like protein; protein id:
  misc_feature (14)..(353): Homolog of NCBI NO: 38345537 NR Description: OSJNBa0020J04.12 [Oryza sativa (japonica
  misc_feature (2)..(356): Homolog of NCBI NO: 15220514 NR Description: lipase/hydrolase, putative; protein id: supported by cDNA: 23556., supported by cDNA: gi_18086454
  misc_feature (2)..(356): Homolog of NCBI NO: 21592417 NR Description: lipase/hydrolase, putative [Arabidopsis thaliana]
  misc_feature (31)..(356): Homolog of NCBI NO: 15238210 NR Description: GDSL-motif lipase/hydrolase-like protein; protein
MSLLVFLCQIIVLSVLFFSEVCLAGKKIPANFVFGDSLVDAGNNNYLATLSKANYVPNGIDFGSPTGRFTNGRTIVDIVYQALGSDELTPPYLAPTTSGSLILNGVNYASGGSGILNSTGKLFGERINVDAQLDNFATTRQDIISWIGESEAAKLFRSAIFSVTTGSNDLINNYFTPVISTLQRKVVAPEVFVDTMISKFRLQLTRLYQLGARKIVVINIGPIGCIPFERESDPAAGNNCLAEPNELKTLVEELNKNLQGSRFVYGDVFRIVDDIIQNYSSYGFESEKIPCCSLVGKVGGLIPCGPPSKVCMDRSKYVFWDPYHPTEAANIIIARRLLSGDTSDIYPINIRQLANLKINA

SEQ ID NO: 88529 - DNA, 1250 bp, Arabidopsis thaliana
  misc_feature (1)..(1250): Ceres Seq. ID no. 12710302
  misc_feature: MA Experiment ID: 108434 Result: Down-regulated in Transcription
  misc_feature: MA Experiment 108434 PARAMETER Experiment Name: At_Root_Tips_cDNA_P Parameter: Tissue Value: Root Tips
  misc_feature: MA Experiment ID: 108469 Result: Up-regulated in Transcription
  misc_feature: MA Experiment ID: 108577 Result: Down-regulated in Transcription
  misc_feature: MA Experiment 108577 PARAMETER Experiment Name: At_42deg_Heat_cDNA_P Parameter: Temperature (deg C) Value: 42 vs. 22
  misc_feature: MA Experiment 108577 PARAMETER Experiment Name: At_42deg_Heat_cDNA_P Parameter: Timepoint (hr) Value: 6
  misc_feature: MA Experiment 108577 PARAMETER Experiment Name: At_42deg_Heat_cDNA_P Parameter: Tissue Value: Aerial
  misc_feature: MA Experiment ID: 108585 Result: Up-regulated in Transcription
  misc_feature: MA Experiment 108585 PARAMETER Experiment Name: At_5mM_NaNP_cDNA_P Parameter: Timepoint (hr) Value: 6
  misc_feature: MA Experiment 108585 PARAMETER Experiment Name: At_5mM_NaNP_cDNA_P Parameter: Tissue Value: Aerial
  misc_feature: MA Experiment 108585 PARAMETER Experiment Name: At_5mM_NaNP_cDNA_P Parameter: Treatment Value: null
  misc_feature: MA Experiment ID: 108594 Result: Up-regulated in Transcription
  misc_feature: MA Experiment 108594 PARAMETER Experiment Name: At_Ler-rhl_Root_cDNA_P Parameter: Plant Line Value: null
  misc_feature: MA Experiment ID: 108595 Result: Up-regulated in Transcription
  misc_feature: MA Experiment 108595 PARAMETER Experiment Name: At_Ler-pi_Ovule_cDNA_P Parameter: Plant Line Value: null
  misc_feature: MA Experiment ID: 108667 Result: Up-regulated in Transcription
  misc_feature: MA Experiment 108667 PARAMETER Experiment Name: At_2mM_SA_cDNA_P Parameter: Plant Line Value: WS
  misc_feature: MA Experiment 108667 PARAMETER Experiment Name: At_2mM_SA_cDNA_P Parameter: Timepoint (hr) Value: 1
  misc_feature: MA Experiment 108667 PARAMETER Experiment Name: At_2mM_SA_cDNA_P Parameter: Treatment Value: 2mM SA vs. No Treatment
  misc_feature: MA Experiment ID: 108668 Result: Up-regulated in Transcription
  misc_feature: MA Experiment 108668 PARAMETER Experiment Name: At_2mM_SA_cDNA_P Parameter: Plant Line Value: WS
  misc_feature: MA Experiment 108668 PARAMETER Experiment Name: At_2mM_SA_cDNA_P Parameter: Timepoint (hr) Value: 6
  misc_feature: MA Experiment 108668 PARAMETER Experiment Name: At_2mM_SA_cDNA_P Parameter: Treatment Value: 2mM SA vs. No Treatment
  misc_feature: MA Experiment ID: 20000111 Result: Down-regulated in Transcription
  misc_feature: MA Experiment 20000111 PARAMETER Experiment Name: At_42deg_Heat_cDNA_P Parameter: Temperature (deg C) Value: 42 vs. 22
  misc_feature: MA Experiment 20000111 PARAMETER Experiment Name: At_42deg_Heat_cDNA_P Parameter: Timepoint (hr) Value: 6
  misc_feature: MA Experiment 20000111 PARAMETER Experiment Name: At_42deg_Heat_cDNA_P Parameter: Tissue Value: Aerial
  misc_feature: MA Experiment ID: 20000113 Result: Down-regulated in Transcription
  misc_feature: MA Experiment 20000113 PARAMETER Experiment Name: At_42deg_Heat_cDNA_P Parameter: Temperature (deg C) Value: 42 vs. 22
  misc_feature: MA Experiment 20000113 PARAMETER Experiment Name: At_42deg_Heat_cDNA_P Parameter: Timepoint (hr) Value: 8
  misc_feature: MA Experiment 20000113 PARAMETER Experiment Name: At_42deg_Heat_cDNA_P Parameter: Tissue Value: Aerial
  misc_feature: MA Experiment ID: 20000173 Result: Down-regulated in Transcription
  misc_feature: MA Experiment 20000173 PARAMETER Experiment Name: At_42deg_Heat_P Parameter: Age (day) Value: 14
  misc_feature: MA Experiment 20000173 PARAMETER Experiment Name: At_42deg_Heat_P Parameter: Organism Value: A. thaliana
  misc_feature: MA Experiment 20000173 PARAMETER Experiment Name: At_42deg_Heat_P Parameter: Plant Line Value: WS
  misc_feature: MA Experiment 20000173 PARAMETER Experiment Name: At_42deg_Heat_P Parameter: Temperature (deg C) Value: 42 vs. 22
  misc_feature: MA Experiment 20000173 PARAMETER Experiment Name: At_42deg_Heat_P Parameter: Timepoint (hr) Value: 6
  misc_feature: MA Experiment 20000173 PARAMETER Experiment Name: At_42deg_Heat_P Parameter: Tissue Value: Aerial
  misc_feature: MA Experiment ID: 20000182 Result: Up-regulated in Transcription
  misc_feature: MA Experiment 20000182 PARAMETER Experiment Name: At_2mM_SA_P Parameter: Age (day) Value: 14
  misc_feature: MA Experiment 20000182 PARAMETER Experiment Name: At_2mM_SA_P Parameter: Organism Value: A. thaliana
  misc_feature: MA Experiment 20000182 PARAMETER Experiment Name: At_2mM_SA_P Parameter: Plant Line Value: WS
  misc_feature: MA Experiment 20000182 PARAMETER Experiment Name: At_2mM_SA_P Parameter: Timepoint (hr) Value: 6
  misc_feature: MA Experiment 20000182 PARAMETER Experiment Name: At_2mM_SA_P Parameter: Tissue Value: Aerial
  misc_feature: MA Experiment 20000182 PARAMETER Experiment Name: At_2mM_SA_P Parameter: Treatment Value: 2mM SA vs. No Treatment
  misc_feature: MA Experiment ID: 20000184 Result: Down-regulated in Transcription
  misc_feature: MA Experiment 20000184 PARAMETER Experiment Name: At_Shoots__P Parameter: Age (day) Value: 7
  misc_feature: MA Experiment 20000184 PARAMETER Experiment Name: At_Shoots__P Parameter: Tissue Value: Shoots vs. Whole Plant
  misc_feature: MA Experiment ID: 20000185 Result: Down-regulated in Transcription
  misc_feature: MA Experiment 20000185 PARAMETER Experiment Name: At_Roots__P Parameter: Age (day) Value: 7 vs. 21
  misc_feature: MA Experiment 20000185 PARAMETER Experiment Name: At_Roots__P Parameter: Organism Value: A. thaliana
  misc_feature: MA Experiment 20000185 PARAMETER Experiment Name: At_Roots__P Parameter: Tissue Value: Roots vs. Whole Plant
  misc_feature: MA Experiment ID: 20000213 Result: Up-regulated in Transcription
  misc_feature: MA Experiment 20000213 PARAMETER Experiment Name: At_4deg_Cold_P Parameter: Timepoint (hr) Value: 2
  misc_feature: MA Experiment ID: 20000234 Result: Down-regulated in Transcription
  misc_feature: MA Experiment 20000234 PARAMETER Experiment Name: At_Siliques_P Parameter: Age (day) Value: 21
  misc_feature: MA Experiment 20000234 PARAMETER Experiment Name: At_Siliques_P Parameter: Organism Value: A. thaliana
  misc_feature: MA Experiment 20000234 PARAMETER Experiment Name: At_Siliques_P Parameter: Plant Line Value: WS
  misc_feature: MA Experiment 20000234 PARAMETER Experiment Name: At_Siliques_P Parameter: Tissue Value: Less Than 5mm Siliques vs. Whole Plant
  misc_feature: MA Experiment ID: 20000235 Result: Down-regulated in Transcription
  misc_feature: MA Experiment 20000235 PARAMETER Experiment Name: At_Siliques_P Parameter: Age (day) Value: 21
  misc_feature: MA Experiment 20000235 PARAMETER Experiment Name: At_Siliques_P Parameter: Organism Value: A. thaliana
  misc_feature: MA Experiment 20000235 PARAMETER Experiment Name: At_Siliques_P Parameter: Plant Line Value: WS
  misc_feature: MA Experiment 20000235 PARAMETER Experiment Name: At_Siliques_P Parameter: Tissue Value: 5-10mm Siliques vs. Whole Plant
  misc_feature: MA Experiment ID: 20000264 Result: Down-regulated in Transcription
  misc_feature: MA Experiment 20000264 PARAMETER Experiment Name: At_Open_Flower_P Parameter: Age (day) Value: 21
  misc_feature: MA Experiment 20000264 PARAMETER Experiment Name: At_Open_Flower_P Parameter: Plant Line Value: WS
  misc_feature: MA Experiment 20000264 PARAMETER Experiment Name: At_Open_Flower_P Parameter: Tissue Value: Open Flower vs. Whole Plant
  misc_feature: MA Experiment ID: 20000265 Result: Down-regulated in Transcription
  misc_feature: MA Experiment 20000265 PARAMETER Experiment Name: At_Open_Flower_P Parameter: Age (day) Value: 21
  misc_feature: MA Experiment 20000265 PARAMETER Experiment Name: At_Open_Flower_P Parameter: Plant Line Value: WS
  misc_feature: MA Experiment 20000265 PARAMETER Experiment Name: At_Open_Flower_P Parameter: Tissue Value: Closed Flower vs. Whole Plant
  misc_feature: MA Experiment ID: 20000268 Result: Down-regulated in Transcription
  misc_feature: MA Experiment 20000268 PARAMETER Experiment Name: At_100mM_NaCl__P Parameter: Age (day) Value: 14
  misc_feature: MA Experiment 20000268 PARAMETER Experiment Name: At_100mM_NaCl__P Parameter: Organism Value: A. thaliana
  misc_feature: MA Experiment 20000268 PARAMETER Experiment Name: At_100mM_NaCl__P Parameter: Plant Line Value: WS
  misc_feature: MA Experiment 20000268 PARAMETER Experiment Name: At_100mM_NaCl__P Parameter: Timepoint (hr) Value: 6
  misc_feature: MA Experiment 20000268 PARAMETER Experiment Name: At_100mM_NaCl__P Parameter: Tissue Value: Whole Plant
  misc_feature: MA Experiment 20000268 PARAMETER Experiment Name: At_100mM_NaCl__P Parameter: Treatment Value: 100mM NaCl vs. No Treatment
  misc_feature: MA Experiment ID: 20000286 Result: Down-regulated in Transcription
  misc_feature: MA Experiment 20000286 PARAMETER Experiment Name: At_Open_Flower_P Parameter: Age (day) Value: 21
  misc_feature: MA Experiment 20000286 PARAMETER Experiment Name: At_Open_Flower_P Parameter: Plant Line Value: WS
  misc_feature: MA Experiment 20000286 PARAMETER Experiment Name: At_Open_Flower_P Parameter: Tissue Value: Half Open vs. Whole Plant
  misc_feature: MA Experiment ID: 20000438 Result: Down-regulated in Transcription
  misc_feature: MA Experiment 20000438 PARAMETER Experiment Name: At_Shoots__P Parameter: Age (day) Value: 14
  misc_feature: MA Experiment 20000438 PARAMETER Experiment Name: At_Shoots__P Parameter: Tissue Value: Shoots vs. Whole Plant
  misc_feature: MA Experiment ID: 20000439 Result: Down-regulated in Transcription
  misc_feature: MA Experiment 20000439 PARAMETER Experiment Name: At_Roots__P Parameter: Age (day) Value: 14 vs. 21
  misc_feature: MA Experiment 20000439 PARAMETER Experiment Name: At_Roots__P Parameter: Organism Value: A. thaliana
  misc_feature: MA Experiment 20000439 PARAMETER Experiment Name: At_Roots__P Parameter: Tissue Value: Roots vs. Whole Plant
  misc_feature: MA Experiment ID: 20000441 Result: Up-regulated in Transcription
  misc_feature: MA Experiment 20000441 PARAMETER Experiment Name: At_1uM_BR-BRZ__P Parameter: Tissue Value: Shoot Apices
  misc_feature: MA Experiment 20000441 PARAMETER Experiment Name: At_1uM_BR-BRZ__P Parameter: Treatment Value: 1uM BR vs. No Treatment
  misc_feature: MA Experiment ID: 20000460 Result: Up-regulated in Transcription
  misc_feature: MA Experiment 20000460 PARAMETER Experiment Name: At_10percent_PEG_P Parameter: Age (day) Value: 12
  misc_feature: MA Experiment 20000460 PARAMETER Experiment Name: At_10percent_PEG_P Parameter: Organism Value: A. thaliana
  misc_feature: MA Experiment 20000460 PARAMETER Experiment Name: At_10percent_PEG_P Parameter: Plant Line Value: WS
  misc_feature: MA Experiment 20000460 PARAMETER Experiment Name: At_10percent_PEG_P Parameter: Timepoint (day) Value: 12
  misc_feature: MA Experiment 20000460 PARAMETER Experiment Name: At_10percent_PEG_P Parameter: Tissue Value: Whole Plant
  misc_feature: MA Experiment 20000460 PARAMETER Experiment Name: At_10percent_PEG_P Parameter: Treatment Value: 10percent PEG vs. No Treatment
  misc_feature: MA Experiment ID: 20000573 Result: Down-regulated in Transcription
  misc_feature: MA Experiment 20000573 PARAMETER Experiment Name: At_100uM_ABA_Mutants__P Parameter: Organism Value: A. thaliana
  misc_feature: MA Experiment 20000573 PARAMETER Experiment Name: At_100uM_ABA_Mutants__P Parameter: Plant Line Value: CS22 vs. Ler wt
  misc_feature: MA Experiment 20000573 PARAMETER Experiment Name: At_100uM_ABA_Mutants__P Parameter: Timepoint (hr) Value: N/A
  misc_feature: MA Experiment 20000573 PARAMETER Experiment Name: At_100uM_ABA_Mutants__P Parameter: Tissue Value: Whole Plant
  misc_feature: MA Experiment 20000573 PARAMETER Experiment Name: At_100uM_ABA_Mutants__P Parameter: Treatment Value: None
  misc_feature: MA Experiment ID: 20000794 Result: Down-regulated in Transcription
  misc_feature: MA Experiment 20000794 PARAMETER Experiment Name: At_Petals_P Parameter: Age (day) Value: 23-25 days
  misc_feature: MA Experiment 20000794 PARAMETER Experiment Name: At_Petals_P Parameter: Plant Line Value: WS
  misc_feature: MA Experiment 20000794 PARAMETER Experiment Name: At_Petals_P Parameter: Tissue Value: Petals vs. Whole plant
  misc_feature: MA Experiment ID: 20001247 Result: Up-regulated in Transcription
  misc_feature: MA Experiment 20001247 PARAMETER Experiment Name: At_Far-red-induction_P Parameter: Age (day) Value: 7
  misc_feature: MA Experiment 20001247 PARAMETER Experiment Name: At_Far-red-induction_P Parameter: Light Value: Far-red vs. White
  misc_feature: MA Experiment 20001247 PARAMETER Experiment Name: At_Far-red-induction_P Parameter: Organism Value: A. thaliana
  misc_feature: MA Experiment 20001247 PARAMETER Experiment Name: At_Far-red-induction_P Parameter: Plant Line Value: Columbia
  misc_feature: MA Experiment 20001247 PARAMETER Experiment Name: At_Far-red-induction_P Parameter: Timepoint (hr) Value: 1
  misc_feature: MA Experiment 20001247 PARAMETER Experiment Name: At_Far-red-induction_P Parameter: Tissue Value: Whole Plant
  misc_feature: MA Experiment ID: 20001451 Result: Down-regulated in Transcription
  misc_feature: MA Experiment 20001451 PARAMETER Experiment Name: At_Far-red-induction_P Parameter: Age (day) Value: 7
  misc_feature: MA Experiment 20001451 PARAMETER Experiment Name: At_Far-red-induction_P Parameter: Light Value: Far-red vs. White
  misc_feature: MA Experiment 20001451 PARAMETER Experiment Name: At_Far-red-induction_P Parameter: Organism Value: A. thaliana
  misc_feature: MA Experiment 20001451 PARAMETER Experiment Name: At_Far-red-induction_P Parameter: Plant Line Value: Columbia
  misc_feature: MA Experiment 20001451 PARAMETER Experiment Name: At_Far-red-induction_P Parameter: Timepoint (hr) Value: 24
  misc_feature: MA Experiment 20001451 PARAMETER Experiment Name: At_Far-red-induction_P Parameter: Tissue Value: Whole Plant
  misc_feature: MA Experiment ID: 20001555 Result: Down-regulated in Transcription
  misc_feature: MA Experiment 20001555 PARAMETER Experiment Name: At_Drought_Soil_Dry_P Parameter: Age (day) Value: 24
  misc_feature: MA Experiment 20001555 PARAMETER Experiment Name: At_Drought_Soil_Dry_P Parameter: Organism Value: A. thaliana
  misc_feature: MA Experiment 20001555 PARAMETER Experiment Name: At_Drought_Soil_Dry_P Parameter: Plant Line Value: WS
  misc_feature: MA Experiment 20001555 PARAMETER Experiment Name: At_Drought_Soil_Dry_P Parameter: Post Timepoint (hr) Value: None
  misc_feature: MA Experiment 20001555 PARAMETER Experiment Name: At_Drought_Soil_Dry_P Parameter: Post-Treatment Value: None
  misc_feature: MA Experiment 20001555 PARAMETER Experiment Name: At_Drought_Soil_Dry_P Parameter: Timepoint (day) Value: 10
  misc_feature: MA Experiment 20001555 PARAMETER Experiment Name: At_Drought_Soil_Dry_P Parameter: Treatment Value: Drought vs. No Drought
  misc_feature: MA Experiment ID: 20001556 Result: Down-regulated in Transcription
  misc_feature: MA Experiment 20001556 PARAMETER Experiment Name: At_Drought_Soil_Dry_P Parameter: Age (day) Value: 26
  misc_feature: MA Experiment 20001556 PARAMETER Experiment Name: At_Drought_Soil_Dry_P Parameter: Organism Value: A. thaliana
  misc_feature: MA Experiment 20001556 PARAMETER Experiment Name: At_Drought_Soil_Dry_P Parameter: Plant Line Value: WS
  misc_feature: MA Experiment 20001556 PARAMETER Experiment Name: At_Drought_Soil_Dry_P Parameter: Post Timepoint (hr) Value: None
  misc_feature: MA Experiment 20001556 PARAMETER Experiment Name: At_Drought_Soil_Dry_P Parameter: Post-Treatment Value: None
  misc_feature: MA Experiment 20001556 PARAMETER Experiment Name: At_Drought_Soil_Dry_P Parameter: Timepoint (day) Value: 12
  misc_feature: MA Experiment 20001556 PARAMETER Experiment Name: At_Drought_Soil_Dry_P Parameter: Treatment Value: Drought vs. No Drought
  misc_feature: MA Experiment ID: 20001904 Result: Down-regulated in Transcription
  misc_feature: MA Experiment 20001904 PARAMETER Experiment Name: At_Drought_Reproduction_P Parameter: Age (day) Value: 37
  misc_feature: MA Experiment 20001904 PARAMETER Experiment Name: At_Drought_Reproduction_P Parameter: Organism Value: A. thaliana
  misc_feature: MA Experiment 20001904 PARAMETER Experiment Name: At_Drought_Reproduction_P Parameter: Plant Line Value: WS
  misc_feature: MA Experiment 20001904 PARAMETER Experiment Name: At_Drought_Reproduction_P Parameter: Timepoint (day) Value: 7
  misc_feature: MA Experiment 20001904 PARAMETER Experiment Name: At_Drought_Reproduction_P Parameter: Tissue Value: Rosettes
  misc_feature: MA Experiment 20001904 PARAMETER Experiment Name: At_Drought_Reproduction_P Parameter: Treatment Value: Drought vs. No Drought
  misc_feature: MA Experiment ID: 20001910 Result: Down-regulated in Transcription
  misc_feature: MA Experiment 20001910 PARAMETER Experiment Name: At_Drought_Reproduction_P Parameter: Age (day) Value: 37
  misc_feature: MA Experiment 20001910 PARAMETER Experiment Name: At_Drought_Reproduction_P Parameter: Organism Value: A. thaliana
  misc_feature: MA Experiment 20001910 PARAMETER Experiment Name: At_Drought_Reproduction_P Parameter: Plant Line Value: WS
  misc_feature: MA Experiment 20001910 PARAMETER Experiment Name: At_Drought_Reproduction_P Parameter: Timepoint (day) Value: 7
  misc_feature: MA Experiment 20001910 PARAMETER Experiment Name: At_Drought_Reproduction_P Parameter: Tissue Value: Flowers
  misc_feature: MA Experiment 20001910 PARAMETER Experiment Name: At_Drought_Reproduction_P Parameter: Treatment Value: Drought vs. No Drought
tgaaagttcttaagtggttccacgatgtttccattttgttctgacttccgaggccaacgagatgagtccaataaacaaagggcacggaaacattctttttaaattagtcttcttgagatcgaaggataacttcaattcaattctctccaaggtacacacagctgatttttgtgataagaagattgattgagatgggtactagagctcagcagattcctttacttgaaggtgagactgataattacgatggtgttactgtaaccatggtggaacctatggattctgaggtttttactgaaagtcttagggcttctctttcgcattggagagaagaggggaagaagggaatttggataaagctgcctcttggattggctaatcttgtggaggctgcagttagtgaaggatttagatatcaccacgcggagcctgagtacttgatgcttgtatcttggatctctgaaactcctgatacaatcccagccaatgcttctcatgttgtaggtgctggtgctttggtcatcaacaaaaatactaaagaggtcctcgttgtccaggagaggagtgggtttttcaaagataaaaatgtgtggaagctgcctactggtgttatcaacgagggcgaggatatatggactggagtagctagggaagtggaagaagaaactggaattattgcagattttgtcgaagtactggctttcaggcaaagccacaaagccatcttaaaaaagaaaacagatatgtttttcctgtgtgtcttaagtccgcgctcttacgatattactgaacaaaaatctgagatcttgcaagctaagtggatgccgatccaagagtatgtagaccaaccatggaacaagaagaacgagatgttcaagttcatggctaacatttgccaaaagaagtgtgaggaagaatacttgggattcgccattgtgccaactaccacatcatctggtaaagagagctttatctactgcaatgcggatcatgccaagcgccttaaagtatcgcgtgaccaagcctctgcttctctctgaaaacattctcatctgattctgtttgatctcggcatgtgtgtgtccagtgtgtacaaaacaggaaactttcttctatattattccgattctacaaaattgcgtctaaatatttaagtttataccatctctatgagccactgtaaaacttgccatcgacttctagtctatttccagtgatggtttgattctcccaacgcttacgtgcttttt

SEQ ID NO: 88530 - protein, 282 aa, Arabidopsis thaliana; identical to SEQ ID NO: 42540
  peptide (1)..(282): Ceres Seq. ID no. 12710303
  misc_feature (102)..(237): Pfam Name: NUDIX domain Pfam Description: NUDIX domain
  misc_feature (1)..(282): Homolog of NCBI NO: 15235458 NR Description: growth factor like protein; protein id: supported by cDNA: 148575., supported by cDNA: gi_13272466, by cDNA: gi_13877892, supported by cDNA: gi_15810610 [Arabidopsis
  misc_feature (1)..(282): Homolog of NCBI NO: 21553511 NR Description: growth factor like protein [Arabidopsis thaliana]
  misc_feature (1)..(281): Homolog of NCBI NO: 15228147 NR Description: putative mutT domain protein; protein id: [Arabidopsis thaliana] >gi|25387471|pir||G84457 probable mutT
  misc_feature (1)..(282): Homolog of NCBI NO: 38564302 NR Description: At2g04430 [Arabidopsis thaliana]
  misc_feature (1)..(282): Homolog of NCBI NO: 15228145 NR Description: putative mutT domain protein; protein id: [Arabidopsis thaliana] >gi|25387501|pir||E84457 probable mutT
  misc_feature (3)..(269): Homolog of NCBI NO: 9758793 NR Description: MutT domain protein-like [Arabidopsis thaliana]
  misc_feature (3)..(269): Homolog of NCBI NO: 18422823 NR Description: MutT domain protein-like; protein id: supported by cDNA: gi_14596036, supported by cDNA: gi_17978726
  misc_feature (16)..(264): Homolog of NCBI NO: 38564312 NR Description: At4g25434 [Arabidopsis thaliana]
  misc_feature (16)..(161): Homolog of NCBI NO: 30686884 NR Description: MutT/nudix family protein [Arabidopsis thaliana]
  misc_feature (161)..(264): Homolog of NCBI NO: 30686884 NR Description: MutT/nudix family protein [Arabidopsis thaliana]

SEQ ID NO: 88531 - protein, 258 aa, Arabidopsis thaliana; identical to SEQ ID NO: 21781
  peptide (1)..(258): Ceres Seq. ID no. 12710304
  misc_feature (78)..(213): Pfam Name: NUDIX domain Pfam Description: NUDIX domain
  misc_feature (1)..(258): Homolog of NCBI NO: 15235458 NR Description: growth factor like protein; protein id: supported by cDNA: 148575., supported by cDNA: gi_13272466, by cDNA: gi_13877892, supported by cDNA: gi_15810610 [Arabidopsis
  misc_feature (1)..(258): Homolog of NCBI NO: 21553511 NR Description: growth factor like protein [Arabidopsis thaliana]
  misc_feature (1)..(257): Homolog of NCBI NO: 15228147 NR Description: putative mutT domain protein; protein id: [Arabidopsis thaliana] >gi|25387471|pir||G84457 probable mutT
  misc_feature (1)..(258): Homolog of NCBI NO: 38564302 NR Description: At2g04430 [Arabidopsis thaliana]
  misc_feature (1)..(258): Homolog of NCBI NO: 15228145 NR Description: putative mutT domain protein; protein id: [Arabidopsis thaliana] >gi|25387501|pir||E84457 probable mutT
  misc_feature (1)..(245): Homolog of NCBI NO: 9758793 NR Description: MutT domain protein-like [Arabidopsis thaliana]
  misc_feature (1)..(245): Homolog of NCBI NO: 18422823 NR Description: MutT domain protein-like; protein id: supported by cDNA: gi_14596036, supported by cDNA: gi_17978726
  misc_feature (1)..(240): Homolog of NCBI NO: 38564312 NR Description: At4g25434 [Arabidopsis thaliana]
  misc_feature (1)..(137): Homolog of NCBI NO: 30686884 NR Description: MutT/nudix family protein [Arabidopsis thaliana]
  misc_feature (137)..(240): Homolog of NCBI NO: 30686884 NR Description: MutT/nudix family protein [Arabidopsis thaliana]

SEQ ID NO: 88532 - protein, 254 aa, Arabidopsis thaliana; identical to SEQ ID NO: 21782
  peptide (1)..(254): Ceres Seq. ID no. 12710305
  misc_feature (74)..(209): Pfam Name: NUDIX domain Pfam Description: NUDIX domain
  misc_feature (1)..(254): Homolog of NCBI NO: 15235458 NR Description: growth factor like protein; protein id: supported by cDNA: 148575., supported by cDNA: gi_13272466, by cDNA: gi_13877892, supported by cDNA: gi_15810610 [Arabidopsis
  misc_feature (1)..(254): Homolog of NCBI NO: 21553511 NR Description: growth factor like protein [Arabidopsis thaliana]
  misc_feature (1)..(253): Homolog of NCBI NO: 15228147 NR Description: putative mutT domain protein; protein id: [Arabidopsis thaliana] >gi|25387471|pir||G84457 probable mutT
  misc_feature (1)..(254): Homolog of NCBI NO: 38564302 NR Description: At2g04430 [Arabidopsis thaliana]
  misc_feature (1)..(254): Homolog of NCBI NO: 15228145 NR Description: putative mutT domain protein; protein id: [Arabidopsis thaliana] >gi|25387501|pir||E84457 probable mutT
  misc_feature (1)..(241): Homolog of NCBI NO: 9758793 NR Description: MutT domain protein-like [Arabidopsis thaliana]
  misc_feature (1)..(241): Homolog of NCBI NO: 18422823 NR Description: MutT domain protein-like; protein id: supported by cDNA: gi_14596036, supported by cDNA: gi_17978726
  misc_feature (1)..(236): Homolog of NCBI NO: 38564312 NR Description: At4g25434 [Arabidopsis thaliana]
  misc_feature (1)..(133): Homolog of NCBI NO: 30686884 NR Description: MutT/nudix family protein [Arabidopsis thaliana]
  misc_feature (133)..(236): Homolog of NCBI NO: 30686884 NR Description: MutT/nudix family protein [Arabidopsis thaliana]

SEQ ID NO: 88533 - DNA, 1152 bp, Arabidopsis thaliana
  misc_feature (1)..(1152): Ceres Seq. ID no. 12710436
  misc_feature: MA Experiment ID: 20000171 Result: Up-regulated in Transcription
  misc_feature: MA Experiment 20000171 PARAMETER Experiment Name: At_42deg_Heat_P Parameter: Age (day) Value: 14
  misc_feature: MA Experiment 20000171 PARAMETER Experiment Name: At_42deg_Heat_P Parameter: Organism Value: A. thaliana
  misc_feature: MA Experiment 20000171 PARAMETER Experiment Name: At_42deg_Heat_P Parameter: Plant Line Value: WS
  misc_feature: MA Experiment 20000171 PARAMETER Experiment Name: At_42deg_Heat_P Parameter: Temperature (deg C) Value: 42 vs. 22
  misc_feature: MA Experiment 20000171 PARAMETER Experiment Name: At_42deg_Heat_P Parameter: Timepoint (hr) Value: 1
  misc_feature: MA Experiment 20000171 PARAMETER Experiment Name: At_42deg_Heat_P Parameter: Tissue Value: Aerial
  misc_feature: MA Experiment ID: 20000184 Result: Down-regulated in Transcription
  misc_feature: MA Experiment 20000184 PARAMETER Experiment Name: At_Shoots__P Parameter: Age (day) Value: 7
  misc_feature: MA Experiment 20000184 PARAMETER Experiment Name: At_Shoots__P Parameter: Tissue Value: Shoots vs. Whole Plant
  misc_feature: MA Experiment ID: 20000451 Result: Down-regulated in Transcription
  misc_feature: MA Experiment 20000451 PARAMETER Experiment Name: At_CS6879_Shoots-Roots_P Parameter: Age (day) Value: 14
  misc_feature: MA Experiment 20000451 PARAMETER Experiment Name: At_CS6879_Shoots-Roots_P Parameter: Organism Value: A. thaliana
  misc_feature: MA Experiment 20000451 PARAMETER Experiment Name: At_CS6879_Shoots-Roots_P Parameter: Plant Line Value: CS6879 vs. WS
  misc_feature: MA Experiment 20000451 PARAMETER Experiment Name: At_CS6879_Shoots-Roots_P Parameter: Tissue Value: Roots
atgtctctctcgtcggactccaccgttcctactgtttccacggtcaccatatcctactcagagctcaaggtcagattgagccaagtccttcttcttatttgtcttctctgtgttctgtttcgtcttctaaactcttccttattacaggagagcaacatagatttgtctgcaaggattgaagaaggatttggacctaatggacttggaatcctctctgttaaagatgttcctggatattctgctttaagacagaatctacttcagcttgcacctaggttagctggtcttcctgaagaggtgaagagggagcttgaagatcctcatagtaggtataattttggttggagtcatggcaaggagaaacttgaatccgggaagcttgacatgctgaagggttcttactatgctaatcctctacaagatgtacctacgagtaattcatatgaaatacagcggtatccatcgtattgtggatcaaatatatggccaaggaattctttaccggaacttgaaggagctttcaaagctcttggtaaactgatgttcgaagttgggctaatggtagcttaccactgtgatcaatatgtgtcaaagggtataaaacaacatgaaaagcaaaatcttgaaaagatactacttggctctcggtgtcacaaaggacggctgctttattatttccctgcacaagagagctctacgcatgacaacgattccatctcatcttggtgtggatggcatacagaccatggttcactcacaggtcttactcgagcaatattttctagagattcagttgaagtaccttgcccagatcctgcttctggcttatacatacaaacacgatcaggtcagatcgttaaggttgtgtatggggaagatgaaatagcataccaaataggcgagacaacatcaattctgtctagtggttatctttgtgctacacctcattgtgttcgggcgccacaaggagaagaggcgcgtggtctagagcgatcgacattcgcgttgttcatgcaacctgactgggaccagaagcttacattcccaaaagaagttacaatacatgaagagttatgtctctctgatgaagtcttgacgtttggagaatatacagagaaactgctcaacaaatactatgatacaaaaccttag

SEQ ID NO: 88534 - protein, 383 aa, Arabidopsis thaliana
  peptide (1)..(383): Ceres Seq. ID no. 12710437
  misc_feature (43)..(195): Homolog of NCBI NO: 15235700 NR Description: putative protein; protein id: At4g13400.1
  misc_feature (249)..(383): Homolog of NCBI NO: 15235700 NR Description: putative protein; protein id: At4g13400.1
  misc_feature (1)..(23): Homolog of NCBI NO: 15235700 NR Description: putative protein; protein id: At4g13400.1
  misc_feature (181)..(383): Homolog of NCBI NO: 22531058 NR Description: putative protein [Arabidopsis thaliana]
  misc_feature (54)..(379): Homolog of NCBI NO: 28829713 NR Description: similar to Arabidopsis thaliana (Mouse-ear
  misc_feature (207)..(379): Homolog of NCBI NO: 2982272 NR Description: hypothetical protein [Picea mariana]
  misc_feature (59)..(274): Homolog of NCBI NO: 40747370 NR Description: hypothetical protein AN0427.2 [Aspergillus
  misc_feature (228)..(346): Homolog of NCBI NO: 40747370 NR Description: hypothetical protein AN0427.2 [Aspergillus
MSLSSDSTVPTVSTVTISYSELKVRLSQVLLLICLLCVLFRLLNSSLLQESNIDLSARIEEGFGPNGLGILSVKDVPGYSALRQNLLQLAPRLAGLPEEVKRELEDPHSRYNFGWSHGKEKLESGKLDMLKGSYYANPLQDVPTSNSYEIQRYPSYCGSNIWPRNSLPELEGAFKALGKLMFEVGLMVAYHCDQYVSKGIKQHEKQNLEKILLGSRCHKGRLLYYFPAQESSTHDNDSISSWCGWHTDHGSLTGLTRAIFSRDSVEVPCPDPASGLYIQTRSGQIVKVVYGEDEIAYQIGETTSILSSGYLCATPHCVRAPQGEEARGLERSTFALFMQPDWDQKLTFPKEVTIHEELCLSDEVLTFGEYTEKLLNKYYDTKP

SEQ ID NO: 88535 - protein, 255 aa, Arabidopsis thaliana
  peptide (1)..(255): Ceres Seq. ID no. 12710438
  misc_feature (1)..(67): Homolog of NCBI NO: 15235700 NR Description: putative protein; protein id: At4g13400.1
  misc_feature (121)..(255): Homolog of NCBI NO: 15235700 NR Description: putative protein; protein id: At4g13400.1
  misc_feature (53)..(255): Homolog of NCBI NO: 22531058 NR Description: putative protein [Arabidopsis thaliana]
  misc_feature (1)..(251): Homolog of NCBI NO: 28829713 NR Description: similar to Arabidopsis thaliana (Mouse-ear
  misc_feature (79)..(251): Homolog of NCBI NO: 2982272 NR Description: hypothetical protein [Picea mariana]
  misc_feature (1)..(146): Homolog of NCBI NO: 40747370 NR Description: hypothetical protein AN0427.2 [Aspergillus
  misc_feature (100)..(218): Homolog of NCBI NO: 40747370 NR Description: hypothetical protein AN0427.2 [Aspergillus
MLKGSYYANPLQDVPTSNSYEIQRYPSYCGSNIWPRNSLPELEGAFKALGKLMFEVGLMVAYHCDQYVSKGIKQHEKQNLEKILLGSRCHKGRLLYYFPAQESSTHDNDSISSWCGWHTDHGSLTGLTRAIFSRDSVEVPCPDPASGLYIQTRSGQIVKVVYGEDEIAYQIGETTSILSSGYLCATPHCVRAPQGEEARGLERSTFALFMQPDWDQKLTFPKEVTIHEELCLSDEVLTFGEYTEKLLNKYYDTKP

SEQ ID NO: 88536 - protein, 203 aa, Arabidopsis thaliana; identical to SEQ ID NO: 84471
  peptide (1)..(203): Ceres Seq. ID no. 12710439
  misc_feature (1)..(15): Homolog of NCBI NO: 15235700 NR Description: putative protein; protein id: At4g13400.1
  misc_feature (69)..(203): Homolog of NCBI NO: 15235700 NR Description: putative protein; protein id: At4g13400.1
  misc_feature (1)..(203): Homolog of NCBI NO: 22531058 NR Description: putative protein [Arabidopsis thaliana]
  misc_feature (1)..(199): Homolog of NCBI NO: 28829713 NR Description: similar to Arabidopsis thaliana (Mouse-ear
  misc_feature (27)..(199): Homolog of NCBI NO: 2982272 NR Description: hypothetical protein [Picea mariana]
  misc_feature (1)..(94): Homolog of NCBI NO: 40747370 NR Description: hypothetical protein AN0427.2 [Aspergillus
  misc_feature (48)..(166): Homolog of NCBI NO: 40747370 NR Description: hypothetical protein AN0427.2 [Aspergillus

SEQ ID NO: 88537 - DNA, 1080 bp, Arabidopsis thaliana
  misc_feature (1)..(1080): Ceres Seq. ID no. 12710484
atgaagctcacaagcttgagcaagaatgctaattccacagcaacagcagtaactgtatcttcaatacagaaactcccgtttctgtctctgtctgaaactttgccttgtccgaagagttcgagaaaacccacgtttcttcctttaagatgtagacggagaccaaagttggatttgctctggggaaaatttagagttcgtgcatcagatgctggtgttggatctgggagttatagtggtggagaagaggatggatctcagagtagttctcttgatcagtctcctgccacttcatcagaaagcttaaaacctcgagggccatttccttattctttgtcaatagcgcttgtactactgagttgtggtttggtattttctcttatcacttttgtgaaaggaggaccatcttcagttttagcagcagtagcaaagtcaggcttcacagcagccttctcactcatatttgtttctgagattggagacaagacatttttcattgctgctttgttggccatgcagtatgagaaaacactggtccttttaggttcaatgggggctttatctttgatgactatcttatcagttgttattgggaagatatttcaatccgtgcctgctcagttccaaacgacactaccgataggagaatatgctgcaattgcgcttctcatgttttttggattgaaatccattaaagatgcatgggatcttccaccagtggaagccaagaatggtgaggaaactggtatagaacttggtgaatactccgaagctgaggaactcgtgaaagaaaaggcgtccaaaaagctcacaaacccacttgaaatcctctggaagtcattcagcctcgtgttctttgcggaatggggagatcgatcaatgcttgctactgttgcgcttggtgctgcacagtctccattgggagttgcgagcggagctattgctggacacttagtagcaacagtgcttgcaatcatgggcggcgcgttccttgccaactatatctctgagaaactggtgggctatgttgggggagctctcttcttagtttttgctgcagccacattctttggagtgttctga

SEQ ID NO: 88538 - protein, 359 aa, Arabidopsis thaliana
  peptide (1)..(359): Ceres Seq. ID no. 12710485
  misc_feature (146)..(226): Pfam Name: Uncharacterized protein family UPF0016 Pfam Description: Uncharacterized protein family UPF0016
  misc_feature (88)..(339): Homolog of NCBI NO: 15236316 NR Description: putative protein; protein id: At4g13590.1
  misc_feature (1)..(47): Homolog of NCBI NO: 15236316 NR Description: putative protein; protein id: At4g13590.1
  misc_feature (144)..(354): Homolog of NCBI NO: 15010676 NR Description: At1g64150/F22C12_10 [Arabidopsis thaliana]
  misc_feature (144)..(354): Homolog of NCBI NO: 18407980 NR Description: expressed protein; protein id: At1g64150.1,
  misc_feature (149)..(354): Homolog of NCBI NO: 6692097 NR Description: F22C12.9 [Arabidopsis thaliana]
  misc_feature (144)..(356): Homolog of NCBI NO: 16331550 NR Description: transmembrane protein FT27 [Synechocystis sp. PCC
  misc_feature (144)..(354): Homolog of NCBI NO: 22297922 NR Description: ORF_ID:tlr0379~hypothetical protein
  misc_feature (145)..(356): Homolog of NCBI NO: 17556152 NR Description: Uncharacterized protein family UPF0016 (32.1 kD) elegans] >gi|13491294|gb|AAK27882.1| Hypothetical protein
  misc_feature (144)..(358): Homolog of NCBI NO: 17229190 NR Description: hypothetical protein [Nostoc sp. PCC 7120]
  misc_feature (145)..(356): Homolog of NCBI NO: 39588843 NR Description: Hypothetical protein CBG15669 [Caenorhabditis
MKLTSLSKNANSTATAVTVSSIQKLPFLSLSETLPCPKSSRKPTFLPLRCRRRPKLDLLWGKFRVRASDAGVGSGSYSGGEEDGSQSSSLDQSPATSSESLKPRGPFPYSLSIALVLLSCGLVFSLITFVKGGPSSVLAAVAKSGFTAAFSLIFVSEIGDKTFFIAALLAMQYEKTLVLLGSMGALSLMTILSVVIGKIFQSVPAQFQTTLPIGEYAAIALLMFFGLKSIKDAWDLPPVEAKNGEETGIELGEYSEAEELVKEKASKKLTNPLEILWKSFSLVFFAEWGDRSMLATVALGAAQSPLGVASGAIAGHLVATVLAIMGGAFLANYISEKLVGYVGGALFLVFAAATFFGVF

SEQ ID NO: 88539 - protein, 189 aa, Arabidopsis thaliana
  peptide (1)..(189): Ceres Seq. ID no. 12710486
  misc_feature (1)..(56): Pfam Name: Uncharacterized protein family UPF0016 Pfam Description: Uncharacterized protein family UPF0016
  misc_feature (1)..(169): Homolog of NCBI NO: 15236316 NR Description: putative protein; protein id: At4g13590.1
  misc_feature (1)..(184): Homolog of NCBI NO: 15010676 NR Description: At1g64150/F22C12_10 [Arabidopsis thaliana]
  misc_feature (1)..(184): Homolog of NCBI NO: 18407980 NR Description: expressed protein; protein id: At1g64150.1,
  misc_feature (1)..(184): Homolog of NCBI NO: 6692097 NR Description: F22C12.9 [Arabidopsis thaliana]
  misc_feature (1)..(186): Homolog of NCBI NO: 16331550 NR Description: transmembrane protein FT27 [Synechocystis sp. PCC
  misc_feature (1)..(184): Homolog of NCBI NO: 22297922 NR Description: ORF_ID:tlr0379~hypothetical protein
  misc_feature (1)..(186): Homolog of NCBI NO: 17556152 NR Description: Uncharacterized protein family UPF0016 (32.1 kD) elegans] >gi|13491294|gb|AAK27882.1| Hypothetical protein
  misc_feature (1)..(188): Homolog of NCBI NO: 17229190 NR Description: hypothetical protein [Nostoc sp. PCC 7120]
  misc_feature (1)..(186): Homolog of NCBI NO: 39588843 NR Description: Hypothetical protein CBG15669 [Caenorhabditis
  misc_feature (1)..(186): Homolog of NCBI NO: 18421551 NR Description: transmembrane protein FT27/PFT27-like; protein At5g36290.1, supported by cDNA: 12993., supported by cDNA: [Arabidopsis thaliana] >gi|15450794|gb|AAK96668.1| transmembrane
MQYEKTLVLLGSMGALSLMTILSVVIGKIFQSVPAQFQTTLPIGEYAAIALLMFFGLKSIKDAWDLPPVEAKNGEETGIELGEYSEAEELVKEKASKKLTNPLEILWKSFSLVFFAEWGDRSMLATVALGAAQSPLGVASGAIAGHLVATVLAIMGGAFLANYISEKLVGYVGGALFLVFAAATFFGVF

SEQ ID NO: 88540 - DNA, 2382 bp, Arabidopsis thaliana
  misc_feature (1)..(2382): Ceres Seq. ID no. 12710524
  misc_feature: MA Experiment ID: 20000184 Result: Down-regulated in Transcription
  misc_feature: MA Experiment 20000184 PARAMETER Experiment Name: At_Shoots__P Parameter: Age (day) Value: 7
  misc_feature: MA Experiment 20000184 PARAMETER Experiment Name: At_Shoots__P Parameter: Tissue Value: Shoots vs. Whole Plant
atggaagacgacggcaagagcagccccaagttaccgatccctggaaagagaaatatactaatcaccagtgctttgccttacgtcaacaacgttcctcatctcggaaacatcatcggatgtgttctgagcgctgatgtgtatgctagatactgtcgtctccgtggctataatgcgatttacatatgtggaaccgatgaatatgggactgcaactgagaccaaagctttggaggagaattgcacccccaaggaaatctgtgacaagtaccatgccattcataaagaagtttatgactggtttggtataagttttgacaagtttgggcgaacttcaactccagaacagactgaggtgtgccaagcaattttcaacaagttgtgggacaacaagtggctttcagagaacaccatgcagcagctttactgcgatacatgcaagaagttcttagctgaccggcttgttgagggttcttgtccgttcgaaggatgtaattatgattctgctcgtggagatcagtgcgaaaaatgtggaaagctcctgaatcctactgaacttaaagatccgaagtgcaaggtctgtcaaaacacaccccgaattcgcgacacagaccacctgtttattgagcttccgttactgaaagataggttggaagcgtatattaaaaagacctctgttactggatcttggagtcaaaatgctattcaaacgacaaatgcatggcttagggatgggcttagacagagatgcattacgagggatcttaagtggggagtgcctgtcccacatgagaaatacaaggacaaagtcttctatgtttggtttgatgctcctattggatacgtctcaataacgtcttgctacacatctgaatgggagaagtggtggaagaatcctgagaatgtggagctttatcagtttatggggaaagacaatgtgccatttcacactgtgatgtttccctctacccagcttggaactgaggaaaattggacactcatgaagacaatcagtgtgactgaatatttaaactatgaagacggaaagttctccaagagtaaaggtgttggagtgtttggtaatgatgtaaaagatacaaatatacctgtcgaagtgtggagatactacttgctgaccaacaggcctgaggtgtctgacacatcgttttcatggactgatttgcaagcaaaactgaatggcgagttgctgagcaacctaggcaactttgttaatcgagttctgagttttatagcaaagcctgataatgcaggttacgggtctgtcattcctgatgctcatgatgctgaatctcattctttaacaaaatcactggcggaaaaggttgaaaagtttgtggcagagtatgttgaagccatggaaaaggttaagctcaagcagggactgaaaactgctatgctgatttcaagcgaagggaactattacttgcaggcaagccaattttggaaactttacaaggaagataaacctttgtgtgcagttgttataagaactgctgctggtttagtacaccttcttgctcaattgttagaacctttcatgccatccttttcttgtgagctaaatttgcctccacaattttctctctccgacgagaggggagaggtattactagcaagtagaccatgggatattctgcctcctagccacaggataggcacccctcaacctttgttcaaggagttggaaaacgacgaagtggcacggtacagagaaaagtttgctggaagtcagtctgatagacgtgctagggatgaagcagcaaatttggcggatcaacttaataaaacaaaactttcagatgccaagaaacaaaaggcatcatcaaaaggcggaggaaaacccaaacctcaaccagctgctgatcgtgaaataactatggcaagacttgatatccgagttggtaaaattgtgaaggctgagaaacatcccaaggcagatgcattgtatgtagaagaaattgatgttgggggtggtgaaattcgcactgttgtcagtggactggtcaaatatatacctcttgaggaaatgcagaatcgtatggtttgtgttctttgcaacttgaaaccggcgaaaatgagggatattgtgtcacaagcaatggttcttgcagcttccagtagtgatggaagcaaggtggagttagttgagccccctaaaactgctaatattggagagcgagttacatttcccgggtttgaaggcgagccagacgatgtcttaaacccaaagaagaaagtatgggagacgcttttggttgatctaaacacaaaagagaatctagttgcttgctacaaagatgtgcccttcactacatctgcaggtgtatgcaaagtttcatccatcagcaatggcacgatccggtaa

SEQ ID NO: 88541 - protein, 793 aa, Arabidopsis thaliana
  peptide (1)..(793): Ceres Seq. ID no. 12710525
  misc_feature (9)..(389): Pfam Name: tRNA synthetases class I (I, L, M and V) Pfam Description: tRNA synthetases class I (I, L, M and V)
  misc_feature (11)..(604): Homolog of NCBI NO: 37534108 NR Description: putative methionyl-tRNA synthetase [Oryza sativa
  misc_feature (6)..(655): Homolog of NCBI NO: 17540794 NR Description: Methionyl tRNA Synthetase MRS-1 (101.7 kD) (mrs-1)
  misc_feature (605)..(774): Homolog of NCBI NO: 17540794 NR Description: Methionyl tRNA Synthetase MRS-1 (101.7 kD) (mrs-1)
  misc_feature (9)..(583): Homolog of NCBI NO: 34865769 NR Description: similar to methionine-tRNA synthetase; methionine
  misc_feature (6)..(651): Homolog of NCBI NO: 14043022 NR Description: methionine-tRNA synthetase; methionine tRNA
  misc_feature (6)..(651): Homolog of NCBI NO: 15929104 NR Description: methionine-tRNA synthetase [Homo sapiens]
  misc_feature (6)..(651): Homolog of NCBI NO: 2135628 NR Description: methionine-tRNA ligase (EC 6.1.1.10) - human
  misc_feature (6)..(584): Homolog of NCBI NO: 34785759 NR Description: Unknown (protein for MGC:66122) [Danio rerio]
  misc_feature (9)..(611): Homolog of NCBI NO: 34785909 NR Description: Unknown (protein for MGC:69150) [Xenopus laevis]
  misc_feature (11)..(585): Homolog of NCBI NO: 2257528 NR Description: methionyl-tRNA synthetase [Schizosaccharomyces
MEDDGKSSPKLPIPGKRNILITSALPYVNNVPHLGNIIGCVLSADVYARYCRLRGYNAIYICGTDEYGTATETKALEENCTPKEICDKYHAIHKEVYDWFGISFDKFGRTSTPEQTEVCQAIFNKLWDNKWLSENTMQQLYCDTCKKFLADRLVEGSCPFEGCNYDSARGDQCEKCGKLLNPTELKDPKCKVCQNTPRIRDTDHLFIELPLLKDRLEAYIKKTSVTGSWSQNAIQTTNAWLRDGLRQRCITRDLKWGVPVPHEKYKDKVFYVWFDAPIGYVSITSCYTSEWEKWWKNPENVELYQFMGKDNVPFHTVMFPSTQLGTEENWTLMKTISVTEYLNYEDGKFSKSKGVGVFGNDVKDTNIPVEVWRYYLLTNRPEVSDTSFSWTDLQAKLNGELLSNLGNFVNRVLSFIAKPDNAGYGSVIPDAHDAESHSLTKSLAEKVEKFVAEYVEAMEKVKLKQGLKTAMLISSEGNYYLQASQFWKLYKEDKPLCAVVIRTAAGLVHLLAQLLEPFMPSFSCELNLPPQFSLSDERGEVLLASRPWDILPPSHRIGTPQPLFKELENDEVARYREKFAGSQSDRRARDEAANLADQLNKTKLSDAKKQKASSKGGGKPKPQPAADREITMARLDIRVGKIVKAEKHPKADALYVEEIDVGGGEIRTVVSGLVKYIPLEEMQNRMVCVLCNLKPAKMRDIVSQAMVLAASSSDGSKVELVEPPKTANIGERVTFPGFEGEPDDVLNPKKKVWETLLVDLNTKENLVACYKDVPFTTSAGVCKVSSISNGTIR

SEQ ID NO: 88542 - protein, 657 aa, Arabidopsis thaliana
  peptide (1)..(657): Ceres Seq. ID no. 12710526
  misc_feature (1)..(253): Pfam Name: tRNA synthetases class I (I, L, M and V) Pfam Description: tRNA synthetases class I (I, L, M and V)
  misc_feature (1)..(468): Homolog of NCBI NO: 37534108 NR Description: putative methionyl-tRNA synthetase [Oryza sativa
  misc_feature (1)..(519): Homolog of NCBI NO: 17540794 NR Description: Methionyl tRNA Synthetase MRS-1 (101.7 kD) (mrs-1)
  misc_feature (469)..(638): Homolog of NCBI NO: 17540794 NR Description: Methionyl tRNA Synthetase MRS-1 (101.7 kD) (mrs-1)
  misc_feature (1)..(447): Homolog of NCBI NO: 34865769 NR Description: similar to methionine-tRNA synthetase; methionine
  misc_feature (1)..(515): Homolog of NCBI NO: 14043022 NR Description: methionine-tRNA synthetase; methionine tRNA
  misc_feature (1)..(515): Homolog of NCBI NO: 15929104 NR Description: methionine-tRNA synthetase [Homo sapiens]
  misc_feature (1)..(515): Homolog of NCBI NO: 2135628 NR Description: methionine-tRNA ligase (EC 6.1.1.10) - human
  misc_feature (1)..(448): Homolog of NCBI NO: 34785759 NR Description: Unknown (protein for MGC:66122) [Danio rerio]
  misc_feature (1)..(475): Homolog of NCBI NO: 34785909 NR Description: Unknown (protein for MGC:69150) [Xenopus laevis]
  misc_feature (1)..(449): Homolog of NCBI NO: 2257528 NR Description: methionyl-tRNA synthetase [Schizosaccharomyces
MQQLYCDTCKKFLADRLVEGSCPFEGCNYDSARGDQCEKCGKLLNPTELKDPKCKVCQNTPRIRDTDHLFIELPLLKDRLEAYIKKTSVTGSWSQNAIQTTNAWLRDGLRQRCITRDLKWGVPVPHEKYKDKVFYVWFDAPIGYVSITSCYTSEWEKWWKNPENVELYQFMGKDNVPFHTVMFPSTQLGTEENWTLMKTISVTEYLNYEDGKFSKSKGVGVFGNDVKDTNIPVEVWRYYLLTNRPEVSDTSFSWTDLQAKLNGELLSNLGNFVNRVLSFIAKPDNAGYGSVIPDAHDAESHSLTKSLAEKVEKFVAEYVEAMEKVKLKQGLKTAMLISSEGNYYLQASQFWKLYKEDKPLCAVVIRTAAGLVHLLAQLLEPFMPSFSCELNLPPQFSLSDERGEVLLASRPWDILPPSHRIGTPQPLFKELENDEVARYREKFAGSQSDRRARDEAANLADQLNKTKLSDAKKQKASSKGGGKPKPQPAADREITMARLDIRVGKIVKAEKHPKADALYVEEIDVGGGEIRTVVSGLVKYIPLEEMQNRMVCVLCNLKPAKMRDIVSQAMVLAASSSDGSKVELVEPPKTANIGERVTFPGFEGEPDDVLNPKKKVWETLLVDLNTKENLVACYKDVPFTTSAGVCKVSSISNGTIR

SEQ ID NO: 88543 - protein, 487 aa, Arabidopsis thaliana
  peptide (1)..(487): Ceres Seq. ID no. 12710527
  misc_feature (1)..(83): Pfam Name: tRNA synthetases class I (I, L, M and V) Pfam Description: tRNA synthetases class I (I, L, M and V)
  misc_feature (1)..(298): Homolog of NCBI NO: 37534108 NR Description: putative methionyl-tRNA synthetase [Oryza sativa
  misc_feature (1)..(349): Homolog of NCBI NO: 17540794 NR Description: Methionyl tRNA Synthetase MRS-1 (101.7 kD) (mrs-1)
  misc_feature (299)..(468): Homolog of NCBI NO: 17540794 NR Description: Methionyl tRNA Synthetase MRS-1 (101.7 kD) (mrs-1)
  misc_feature (1)..(277): Homolog of NCBI NO: 34865769 NR Description: similar to methionine-tRNA synthetase; methionine
  misc_feature (1)..(345): Homolog of NCBI NO: 14043022 NR Description: methionine-tRNA synthetase; methionine tRNA
  misc_feature (1)..(345): Homolog of NCBI NO: 15929104 NR Description: methionine-tRNA synthetase [Homo sapiens]
  misc_feature (1)..(345): Homolog of NCBI NO: 2135628 NR Description: methionine-tRNA ligase (EC 6.1.1.10) - human
  misc_feature (1)..(278): Homolog of NCBI NO: 34785759 NR Description: Unknown (protein for MGC:66122) [Danio rerio]
  misc_feature (1)..(305): Homolog of NCBI NO: 34785909 NR Description: Unknown (protein for MGC:69150) [Xenopus laevis]
  misc_feature (1)..(279): Homolog of NCBI NO: 2257528 NR Description: methionyl-tRNA synthetase [Schizosaccharomyces
MGKDNVPFHTVMFPSTQLGTEENWTLMKTISVTEYLNYEDGKFSKSKGVGVFGNDVKDTNIPVEVWRYYLLTNRPEVSDTSFSWTDLQAKLNGELLSNLGNFVNRVLSFIAKPDNAGYGSVIPDAHDAESHSLTKSLAEKVEKFVAEYVEAMEKVKLKQGLKTAMLISSEGNYYLQASQFWKLYKEDKPLCAVVIRTAAGLVHLLAQLLEPFMPSFSCELNLPPQFSLSDERGEVLLASRPWDILPPSHRIGTPQPLFKELENDEVARYREKFAGSQSDRRARDEAANLADQLNKTKLSDAKKQKASSKGGGKPKPQPAADREITMARLDIRVGKIVKAEKHPKADALYVEEIDVGGGEIRTVVSGLVKYIPLEEMQNRMVCVLCNLKPAKMRDIVSQAMVLAASSSDGSKVELVEPPKTANIGERVTFPGFEGEPDDVLNPKKKVWETLLVDLNTKENLVACYKDVPFTTSAGVCKVSSISNGTIR

SEQ ID NO: 88544 - DNA, 1416 bp, Arabidopsis thaliana
  misc_feature (1)..(1416): Ceres Seq. ID no. 12710554
  misc_feature: MA Experiment ID: 108461 Result: Up-regulated in Transcription
  misc_feature: MA Experiment 108461 PARAMETER Experiment Name: At_Germinating_Seeds_cDNA_P Parameter: Age (day) Value: 1 vs. 0
  misc_feature: MA Experiment 108461 PARAMETER Experiment Name: At_Germinating_Seeds_cDNA_P Parameter: Tissue Value: Germinating Seeds
  misc_feature: MA Experiment ID: 108561 Result: Down-regulated in Transcription
  misc_feature: MA Experiment 108561 PARAMETER Experiment Name: At_100uM_ABA_cDNA_P Parameter: Timepoint (hr) Value: 6
  misc_feature: MA Experiment 108561 PARAMETER Experiment Name: At_100uM_ABA_cDNA_P Parameter: Tissue Value: Aerial
  misc_feature: MA Experiment 108561 PARAMETER Experiment Name: At_100uM_ABA_cDNA_P Parameter: Treatment Value: 100uM ABA vs. No Treatment
  misc_feature: MA Experiment ID: 108569 Result: Up-regulated in Transcription
  misc_feature: MA Experiment 108569 PARAMETER Experiment Name: At_0.001%_MeJA__cDNA_P Parameter: Timepoint (hr) Value: 6
  misc_feature: MA Experiment 108569 PARAMETER Experiment Name: At_0.001%_MeJA__cDNA_P Parameter: Tissue Value: Aerial
  misc_feature: MA Experiment 108569 PARAMETER Experiment Name: At_0.001%_MeJA__cDNA_P Parameter: Treatment Value: 0.001% MeJA vs. No Treatment
  misc_feature: MA Experiment ID: 108572 Result: Down-regulated in Transcription
  misc_feature: MA Experiment 108572 PARAMETER Experiment Name: At_Drought_cDNA_P Parameter: Timepoint (hr) Value: 1
  misc_feature: MA Experiment 108572 PARAMETER Experiment Name: At_Drought_cDNA_P Parameter: Tissue Value: Aerial
  misc_feature: MA Experiment 108572 PARAMETER Experiment Name: At_Drought_cDNA_P Parameter: Treatment Value: Drought vs. No Drought
  misc_feature: MA Experiment ID: 108573 Result: Down-regulated in Transcription
  misc_feature: MA Experiment 108573 PARAMETER Experiment Name: At_Drought_cDNA_P Parameter: Timepoint (hr) Value: 6
  misc_feature: MA Experiment 108573 PARAMETER Experiment Name: At_Drought_cDNA_P Parameter: Tissue Value: Aerial
  misc_feature: MA Experiment 108573 PARAMETER Experiment Name: At_Drought_cDNA_P Parameter: Treatment Value: Drought vs. No Drought
  misc_feature: MA Experiment ID: 108576 Result: Down-regulated in Transcription
  misc_feature: MA Experiment 108576 PARAMETER Experiment Name: At_42deg_Heat_cDNA_P Parameter: Temperature (deg C) Value: 42 vs. 22
  misc_feature: MA Experiment 108576 PARAMETER Experiment Name: At_42deg_Heat_cDNA_P Parameter: Timepoint (hr) Value: 1
  misc_feature: MA Experiment 108576 PARAMETER Experiment Name: At_42deg_Heat_cDNA_P Parameter: Tissue Value: Aerial
  misc_feature: MA Experiment ID: 108579 Result: Up-regulated in Transcription
  misc_feature: MA Experiment 108579 PARAMETER Experiment Name: At_4deg_Cold_cDNA_P Parameter: Temperature (deg C) Value: 4 vs. 22
  misc_feature: MA Experiment 108579 PARAMETER Experiment Name: At_4deg_Cold_cDNA_P Parameter: Timepoint (hr) Value: 6
  misc_feature: MA Experiment 108579 PARAMETER Experiment Name: At_4deg_Cold_cDNA_P Parameter: Tissue Value: Aerial
  misc_feature: MA Experiment ID: 108595 Result: Down-regulated in Transcription
  misc_feature: MA Experiment 108595 PARAMETER Experiment Name: At_Ler-pi_Ovule_cDNA_P Parameter: Plant Line Value: null
  misc_feature: MA Experiment ID: 20000069 Result: Down-regulated in Transcription
  misc_feature: MA Experiment 20000069 PARAMETER Experiment Name: At_100uM_ABA_Mutants_cDNA_P Parameter: Plant Line Value: CS23
  misc_feature: MA Experiment 20000069 PARAMETER Experiment Name: At_100uM_ABA_Mutants_cDNA_P Parameter: Timepoint (hr) Value: 6
  misc_feature: MA Experiment 20000069 PARAMETER Experiment Name: At_100uM_ABA_Mutants_cDNA_P Parameter: Tissue Value: Aerial
  misc_feature: MA Experiment 20000069 PARAMETER Experiment Name: At_100uM_ABA_Mutants_cDNA_P Parameter: Treatment Value: 100uM ABA vs. No Treatment
atggaaccagtctcttcatggggtaacacctctctcgtctccgtagatccagagatccacgacctaatcgagaaggagaaacgtcggcaatgtcgaggaatcgaacttatcgcttccgagaatttcacttccttcgccgtcatcgaagctctcggaagtgccttaaccaacaaatactccgaaggtattcctggtaatcgttattacggaggtaacgaattcatcgatgagatcgagaatctttgccgttcaagagctctcgaagctttccattgtgatccagcagcgtggggcgttaatgttcagccgtattctggatctccggcaaatttcgctgcttacacggctttgcttcagcctcacgatcgtatcatggggcttgatttgccttcaggtggtcatttgactcatggttactatacatctggtggtaagaagatctctgcgacttcgatctactttgagagtcttccgtataaggtgaatttcaccactggttacattgattacgataagcttgaagagaaggcgttggatttcaggcctaagttgcttatctgtggtggtagtgcgtatcctagggattgggattacgctagatttagagctattgctgataaggttggagctcttttgctttgtgacatggctcacatcagtggtctcgttgctgctcaggaagctgcaaacccatttgagtactgtgacgttgtgacaaccacaacccacaagagtttgaggggtccaagggctggtatgattttctacaggaagggtccaaaaccaccaaagaagggtcaacccgagggtgcagtctatgattttgaggacaaaatcaactttgctgtattccctgcgcttcaaggtggtcctcacaatcaccagattggtgctctagctgttgcgttgaagcaggctaatactcctgggttcaaggtctacgcaaaacaagtgaaagccaatgctgttgcccttggaaactacctaatgagcaagggttaccagattgtgaccaatggaactgagaaccaccttgttctctgggatcttcgccctcttggattgaccggaaacaaggttgagaagctctgcgatctgtgcagcattacattgaacaagaacgcagtatttggagacagtagtgctcttgctcctggaggtgtaagaatcggtgcacccgcgatgacatcgagaggattggtggagaaggactttgagcagataggagaattcctgagccgtgcagtgacactgacgttggacatccaaaagacatacggtaagttgttgaaggacttcaacaagggtttggtgaacaacaaagatctcgatcagctcaaggctgatgtcgagaagttctcggcgtcttatgagatgcctggattcctcatgtctgagatgaagtacaaggattag

SEQ ID NO: 88545 - protein, 471 aa, Arabidopsis thaliana; identical to SEQ ID NO: 77200
  peptide (1)..(471): Ceres Seq. ID no. 12710555
  misc_feature (12)..(412): Pfam Name: Serine hydroxymethyltransferase Pfam Description: Serine hydroxymethyltransferase
  misc_feature (1)..(471): Homolog of NCBI NO: 15236375 NR Description: hydroxymethyltransferase; protein id: supported by cDNA: 29662., supported by cDNA: gi_13358183, by cDNA: gi_13605526, supported by cDNA: gi_20334773 [Arabidopsis
  misc_feature (1)..(471): Homolog of NCBI NO: 21592544 NR Description: hydroxymethyltransferase [Arabidopsis thaliana]
  misc_feature (1)..(471): Homolog of NCBI NO: 11762130 NR Description: AT4g13930 [Arabidopsis thaliana]
  misc_feature (1)..(468): Homolog of NCBI NO: 15236371 NR Description: glycine hydroxymethyltransferase - like protein; id: At4g13890.1 [Arabidopsis thaliana] >gi|7433549|pir||T05258
  misc_feature (4)..(464): Homolog of NCBI NO: 18400090 NR Description: putative hydroxymethyltransferase; protein id: supported by cDNA: 122515. [Arabidopsis thaliana]
  misc_feature (4)..(464): Homolog of NCBI NO: 25286207 NR Description: probable hydroxymethyltransferase, 49598-47322 - Arabidopsis thaliana >gi|12324475|gb|AAG52195.1|AC021199_1
  misc_feature (4)..(464): Homolog of NCBI NO: 21537165 NR Description: putative hydroxymethyltransferase [Arabidopsis
  misc_feature (4)..(464): Homolog of NCBI NO: 15219182 NR Description: glycine hydroxymethyltransferase, putative; id: At1g22020.1 [Arabidopsis thaliana] F2E2.7 [Arabidopsis thaliana] >gi|21928157|gb|AAM78106.1|
  misc_feature (9)..(471): Homolog of NCBI NO: 17066746 NR Description: serine hydroxymethyltransferase [Chlamydomonas
  misc_feature (3)..(461): Homolog of NCBI NO: 18418028 NR Description: glycine hydroxymethyltransferase (EC 2.1.2.1) - protein; protein id: At4g32520.1, supported by cDNA: gi_14030718

SEQ ID NO: 88546 - protein, 347 aa, Arabidopsis thaliana
  peptide (1)..(347): Ceres Seq. ID no. 12710556
  misc_feature (1)..(288): Pfam Name: Serine hydroxymethyltransferase Pfam Description: Serine hydroxymethyltransferase
  misc_feature (1)..(347): Homolog of NCBI NO: 15236375 NR Description: hydroxymethyltransferase; protein id: supported by cDNA: 29662., supported by cDNA: gi_13358183, by cDNA: gi_13605526, supported by cDNA: gi_20334773 [Arabidopsis
  misc_feature (1)..(347): Homolog of NCBI NO: 21592544 NR Description: hydroxymethyltransferase [Arabidopsis thaliana]
  misc_feature (1)..(347): Homolog of NCBI NO: 11762130 NR Description: AT4g13930 [Arabidopsis thaliana]
  misc_feature (1)..(344): Homolog of NCBI NO: 15236371 NR Description: glycine hydroxymethyltransferase - like protein; id: At4g13890.1 [Arabidopsis thaliana] >gi|7433549|pir||T05258
  misc_feature (1)..(340): Homolog of NCBI NO: 18400090 NR Description: putative hydroxymethyltransferase; protein id: supported by cDNA: 122515. [Arabidopsis thaliana]
  misc_feature (1)..(340): Homolog of NCBI NO: 25286207 NR Description: probable hydroxymethyltransferase, 49598-47322 - Arabidopsis thaliana >gi|12324475|gb|AAG52195.1|AC021199_1
  misc_feature (1)..(340): Homolog of NCBI NO: 21537165 NR Description: putative hydroxymethyltransferase [Arabidopsis
  misc_feature (1)..(340): Homolog of NCBI NO: 15219182 NR Description: glycine hydroxymethyltransferase, putative; id: At1g22020.1 [Arabidopsis thaliana] F2E2.7 [Arabidopsis thaliana] >gi|21928157|gb|AAM78106.1|
  misc_feature (1)..(347): Homolog of NCBI NO: 17066746 NR Description: serine hydroxymethyltransferase [Chlamydomonas
  misc_feature (1)..(337): Homolog of NCBI NO: 18418028 NR Description: glycine hydroxymethyltransferase (EC 2.1.2.1) - protein; protein id: At4g32520.1, supported by cDNA: gi_14030718
MGLDLPSGGHLTHGYYTSGGKKISATSIYFESLPYKVNFTTGYIDYDKLEEKALDFRPKLLICGGSAYPRDWDYARFRAIADKVGALLLCDMAHISGLVAAQEAANPFEYCDVVTTTTHKSLRGPRAGMIFYRKGPKPPKKGQPEGAVYDFEDKINFAVFPALQGGPHNHQIGALAVALKQANTPGFKVYAKQVKANAVALGNYLMSKGYQIVTNGTENHLVLWDLRPLGLTGNKVEKLCDLCSITLNKNAVFGDSSALAPGGVRIGAPAMTSRGLVEKDFEQIGEFLSRAVTLTLDIQKTYGKLLKDFNKGLVNNKDLDQLKADVEKFSASYEMPGFLMSEMKYKD

SEQ ID NO: 88547 - protein, 256 aa, Arabidopsis thaliana
  peptide (1)..(256): Ceres Seq. ID no. 12710557
  misc_feature (1)..(197): Pfam Name: Serine hydroxymethyltransferase Pfam Description: Serine hydroxymethyltransferase
  misc_feature (1)..(256): Homolog of NCBI NO: 15236375 NR Description: hydroxymethyltransferase; protein id: supported by cDNA: 29662., supported by cDNA: gi_13358183, by cDNA: gi_13605526, supported by cDNA: gi_20334773 [Arabidopsis
  misc_feature (1)..(256): Homolog of NCBI NO: 21592544 NR Description: hydroxymethyltransferase [Arabidopsis thaliana]
  misc_feature (1)..(256): Homolog of NCBI NO: 11762130 NR Description: AT4g13930 [Arabidopsis thaliana]
  misc_feature (1)..(253): Homolog of NCBI NO: 15236371 NR Description: glycine hydroxymethyltransferase - like protein; id: At4g13890.1 [Arabidopsis thaliana] >gi|7433549|pir||T05258
  misc_feature (1)..(249): Homolog of NCBI NO: 18400090 NR Description: putative hydroxymethyltransferase; protein id: supported by cDNA: 122515. [Arabidopsis thaliana]
  misc_feature (1)..(249): Homolog of NCBI NO: 25286207 NR Description: probable hydroxymethyltransferase, 49598-47322 - Arabidopsis thaliana >gi|12324475|gb|AAG52195.1|AC021199_1
  misc_feature (1)..(249): Homolog of NCBI NO: 21537165 NR Description: putative hydroxymethyltransferase [Arabidopsis
  misc_feature (1)..(249): Homolog of NCBI NO: 15219182 NR Description: glycine hydroxymethyltransferase, putative; id: At1g22020.1 [Arabidopsis thaliana] F2E2.7 [Arabidopsis thaliana] >gi|21928157|gb|AAM78106.1|
  misc_feature (1)..(256): Homolog of NCBI NO: 17066746 NR Description: serine hydroxymethyltransferase [Chlamydomonas
  misc_feature (1)..(246): Homolog of NCBI NO: 18418028 NR Description: glycine hydroxymethyltransferase (EC 2.1.2.1) - protein; protein id: At4g32520.1, supported by cDNA: gi_14030718
MAHISGLVAAQEAANPFEYCDVVTTTTHKSLRGPRAGMIFYRKGPKPPKKGQPEGAVYDFEDKINFAVFPALQGGPHNHQIGALAVALKQANTPGFKVYAKQVKANAVALGNYLMSKGYQIVTNGTENHLVLWDLRPLGLTGNKVEKLCDLCSITLNKNAVFGDSSALAPGGVRIGAPAMTSRGLVEKDFEQIGEFLSRAVTLTLDIQKTYGKLLKDFNKGLVNNKDLDQLKADVEKFSASYEMPGFLMSEMKYKD

SEQ ID NO: 88548 - DNA, 1799 bp, Arabidopsis thaliana
  misc_feature (1)..(1799): Ceres Seq. ID no. 12710588
  misc_feature: MA Experiment ID: 108433 Result: Down-regulated in Transcription
  misc_feature: MA Experiment 108433 PARAMETER Experiment Name: At_rhl_Mutant2_cDNA_P Parameter: Age (day) Value: 7
  misc_feature: MA Experiment 108433 PARAMETER Experiment Name: At_rhl_Mutant2_cDNA_P Parameter: Organism Value: A. thaliana
  misc_feature: MA Experiment 108433 PARAMETER Experiment Name: At_rhl_Mutant2_cDNA_P Parameter: Plant Line Value: rhl Mutant vs. wt landsburg
  misc_feature: MA Experiment 108433 PARAMETER Experiment Name: At_rhl_Mutant2_cDNA_P Parameter: Tissue Value: Roots
  misc_feature: MA Experiment ID: 108435 Result: Up-regulated in Transcription
  misc_feature: MA Experiment 108435 PARAMETER Experiment Name: At_stm_Mutants_cDNA_P Parameter: Plant Line Value: wt Landsburg vs stm
  misc_feature: MA Experiment 108435 PARAMETER Experiment Name: At_stm_Mutants_cDNA_P Parameter: Tissue Value: Shoot Apical Meristem Region
  misc_feature: MA Experiment ID: 108461 Result: Up-regulated in Transcription
  misc_feature: MA Experiment 108461 PARAMETER Experiment Name: At_Germinating_Seeds_cDNA_P Parameter: Age (day) Value: 1 vs. 0
  misc_feature: MA Experiment 108461 PARAMETER Experiment Name: At_Germinating_Seeds_cDNA_P Parameter: Tissue Value: Germinating Seeds
  misc_feature: MA Experiment ID: 108462 Result: Up-regulated in Transcription
  misc_feature: MA Experiment 108462 PARAMETER Experiment Name: At_Germinating_Seeds_cDNA_P Parameter: Age (day) Value: 2 vs. 0
  misc_feature: MA Experiment 108462 PARAMETER Experiment Name: At_Germinating_Seeds_cDNA_P Parameter: Tissue Value: Germinating Seeds
  misc_feature: MA Experiment ID: 108463 Result: Up-regulated in Transcription
  misc_feature: MA Experiment 108463 PARAMETER Experiment Name: At_Germinating_Seeds_cDNA_P Parameter: Age (day) Value: 3 vs. 0
  misc_feature: MA Experiment 108463 PARAMETER Experiment Name: At_Germinating_Seeds_cDNA_P Parameter: Tissue Value: Germinating Seeds
  misc_feature: MA Experiment ID: 108464 Result: Up-regulated in Transcription
  misc_feature: MA Experiment 108464 PARAMETER Experiment Name: At_Germinating_Seeds_cDNA_P Parameter: Age (day) Value: 4 vs. 0
  misc_feature: MA Experiment 108464 PARAMETER Experiment Name: At_Germinating_Seeds_cDNA_P Parameter: Tissue Value: Germinating Seeds
  misc_feature: MA Experiment ID: 108569 Result: Up-regulated in Transcription
  misc_feature: MA Experiment 108569 PARAMETER Experiment Name: At_0.001%_MeJA__cDNA_P Parameter: Timepoint (hr) Value: 6
  misc_feature: MA Experiment 108569 PARAMETER Experiment Name: At_0.001%_MeJA__cDNA_P Parameter: Tissue Value: Aerial
  misc_feature: MA Experiment 108569 PARAMETER Experiment Name: At_0.001%_MeJA__cDNA_P Parameter: Treatment Value: 0.001% MeJA vs. No Treatment
  misc_feature: MA Experiment ID: 108576 Result: Down-regulated in Transcription
  misc_feature: MA Experiment 108576 PARAMETER Experiment Name: At_42deg_Heat_cDNA_P Parameter: Temperature (deg C) Value: 42 vs. 22
  misc_feature: MA Experiment 108576 PARAMETER Experiment Name: At_42deg_Heat_cDNA_P Parameter: Timepoint (hr) Value: 1
  misc_feature: MA Experiment 108576 PARAMETER Experiment Name: At_42deg_Heat_cDNA_P Parameter: Tissue Value: Aerial
  misc_feature: MA Experiment ID: 108577 Result: Down-regulated in Transcription
  misc_feature: MA Experiment 108577 PARAMETER Experiment Name: At_42deg_Heat_cDNA_P Parameter: Temperature (deg C) Value: 42 vs. 22
  misc_feature: MA Experiment 108577 PARAMETER Experiment Name: At_42deg_Heat_cDNA_P Parameter: Timepoint (hr) Value: 6
  misc_feature: MA Experiment 108577 PARAMETER Experiment Name: At_42deg_Heat_cDNA_P Parameter: Tissue Value: Aerial
  misc_feature: MA Experiment ID: 108595 Result: Down-regulated in Transcription
  misc_feature: MA Experiment 108595 PARAMETER Experiment Name: At_Ler-pi_Ovule_cDNA_P Parameter: Plant Line Value: null
  misc_feature: MA Experiment ID: 108605 Result: Up-regulated in Transcription
  misc_feature: MA Experiment 108605 PARAMETER Experiment Name: At_100uM_ABA_cDNA_P Parameter: Timepoint (hr) Value: 6
  misc_feature: MA Experiment 108605 PARAMETER Experiment Name: At_100uM_ABA_cDNA_P Parameter: Tissue Value: Aerial
  misc_feature: MA Experiment 108605 PARAMETER Experiment Name: At_100uM_ABA_cDNA_P Parameter: Treatment Value: 100uM ABA vs. No Treatment
  misc_feature: MA Experiment ID: 108668 Result: Down-regulated in Transcription
  misc_feature: MA Experiment 108668 PARAMETER Experiment Name: At_2mM_SA_cDNA_P Parameter: Plant Line Value: WS
  misc_feature: MA Experiment 108668 PARAMETER Experiment Name: At_2mM_SA_cDNA_P Parameter: Timepoint (hr) Value: 6
  misc_feature: MA Experiment 108668 PARAMETER Experiment Name: At_2mM_SA_cDNA_P Parameter: Treatment Value: 2mM SA vs. No Treatment
  misc_feature: MA Experiment ID: 20000090 Result: Down-regulated in Transcription
  misc_feature: MA Experiment ID: 20000111 Result: Down-regulated in Transcription
  misc_feature: MA Experiment 20000111 PARAMETER Experiment Name: At_42deg_Heat_cDNA_P Parameter: Temperature (deg C) Value: 42 vs. 22
  misc_feature: MA Experiment 20000111 PARAMETER Experiment Name: At_42deg_Heat_cDNA_P Parameter: Timepoint (hr) Value: 6
  misc_feature: MA Experiment 20000111 PARAMETER Experiment Name: At_42deg_Heat_cDNA_P Parameter: Tissue Value: Aerial
  misc_feature: MA Experiment ID: 20000112 Result: Down-regulated in Transcription
  misc_feature: MA Experiment 20000112 PARAMETER Experiment Name: At_42deg_Heat_cDNA_P Parameter: Temperature (deg C) Value: 42 vs. 22
  misc_feature: MA Experiment 20000112 PARAMETER Experiment Name: At_42deg_Heat_cDNA_P Parameter: Timepoint (hr) Value: 2
  misc_feature: MA Experiment 20000112 PARAMETER Experiment Name: At_42deg_Heat_cDNA_P Parameter: Tissue Value: Aerial
  misc_feature: MA Experiment ID: 20000113 Result: Down-regulated in Transcription
  misc_feature: MA Experiment 20000113 PARAMETER Experiment Name: At_42deg_Heat_cDNA_P Parameter: Temperature (deg C) Value: 42 vs. 22
  misc_feature: MA Experiment 20000113 PARAMETER Experiment Name: At_42deg_Heat_cDNA_P Parameter: Timepoint (hr) Value: 8
  misc_feature: MA Experiment 20000113 PARAMETER Experiment Name: At_42deg_Heat_cDNA_P Parameter: Tissue Value: Aerial
  misc_feature: MA Experiment ID: 20000180 Result: Up-regulated in Transcription
  misc_feature: MA Experiment 20000180 PARAMETER Experiment Name: At_Germinating_Seeds_P Parameter: Age (hr) Value: 24 vs. 0
  misc_feature: MA Experiment 20000180 PARAMETER Experiment Name: At_Germinating_Seeds_P Parameter: Tissue Value: Germinating Seeds
  misc_feature: MA Experiment ID: 20000182 Result: Down-regulated in Transcription
  misc_feature: MA Experiment 20000182 PARAMETER Experiment Name: At_2mM_SA_P Parameter: Age (day) Value: 14
  misc_feature: MA Experiment 20000182 PARAMETER Experiment Name: At_2mM_SA_P Parameter: Organism Value: A. thaliana
  misc_feature: MA Experiment 20000182 PARAMETER Experiment Name: At_2mM_SA_P Parameter: Plant Line Value: WS
  misc_feature: MA Experiment 20000182 PARAMETER Experiment Name: At_2mM_SA_P Parameter: Timepoint (hr) Value: 6
  misc_feature: MA Experiment 20000182 PARAMETER Experiment Name: At_2mM_SA_P Parameter: Tissue Value: Aerial
  misc_feature: MA Experiment 20000182 PARAMETER Experiment Name: At_2mM_SA_P Parameter: Treatment Value: 2mM SA vs. No Treatment
  misc_feature: MA Experiment ID: 20000185 Result: Down-regulated in Transcription
  misc_feature: MA Experiment 20000185 PARAMETER Experiment Name: At_Roots__P Parameter: Age (day) Value: 7 vs. 21
  misc_feature: MA Experiment 20000185 PARAMETER Experiment Name: At_Roots__P Parameter: Organism Value: A. thaliana
  misc_feature: MA Experiment 20000185 PARAMETER Experiment Name: At_Roots__P Parameter: Tissue Value: Roots vs. Whole Plant
  misc_feature: MA Experiment ID: 20000227 Result: Down-regulated in Transcription
  misc_feature: MA Experiment 20000227 PARAMETER Experiment Name: At_Root-Tips-vs-Tops_P Parameter: Tissue Value: Root Tips vs. Root Tops
  misc_feature: MA Experiment ID: 20000234 Result: Down-regulated in Transcription
  misc_feature: MA Experiment 20000234 PARAMETER Experiment Name: At_Siliques_P Parameter: Age (day) Value: 21
  misc_feature: MA Experiment 20000234 PARAMETER Experiment Name: At_Siliques_P Parameter: Organism Value: A. thaliana
  misc_feature: MA Experiment 20000234 PARAMETER Experiment Name: At_Siliques_P Parameter: Plant Line Value: WS
  misc_feature: MA Experiment 20000234 PARAMETER Experiment Name: At_Siliques_P Parameter: Tissue Value: Less Than 5mm Siliques vs. Whole Plant
  misc_feature: MA Experiment ID: 20000264 Result: Down-regulated in Transcription
  misc_feature: MA Experiment 20000264 PARAMETER Experiment Name: At_Open_Flower_P Parameter: Age (day) Value: 21
  misc_feature: MA Experiment 20000264 PARAMETER Experiment Name: At_Open_Flower_P Parameter: Plant Line Value: WS
  misc_feature: MA Experiment 20000264 PARAMETER Experiment Name: At_Open_Flower_P Parameter: Tissue Value: Open Flower vs. Whole Plant
  misc_feature: MA Experiment ID: 20000286 Result: Down-regulated in Transcription
  misc_feature: MA Experiment 20000286 PARAMETER Experiment Name: At_Open_Flower_P Parameter: Age (day) Value: 21
  misc_feature: MA Experiment 20000286 PARAMETER Experiment Name: At_Open_Flower_P Parameter: Plant Line Value: WS
  misc_feature: MA Experiment 20000286 PARAMETER Experiment Name: At_Open_Flower_P Parameter: Tissue Value: Half Open vs. Whole Plant
  misc_feature: MA Experiment ID: 20000436 Result: Down-regulated in Transcription
  misc_feature: MA Experiment 20000436 PARAMETER Experiment Name: At_Drought_P Parameter: Age (day) Value: 7
  misc_feature: MA Experiment 20000436 PARAMETER Experiment Name: At_Drought_P Parameter: Organism Value: A. thaliana
  misc_feature: MA Experiment 20000436 PARAMETER Experiment Name: At_Drought_P Parameter: Plant Line Value: WS
  misc_feature: MA Experiment 20000436 PARAMETER Experiment Name: At_Drought_P Parameter: Timepoint (hr) Value: 12
  misc_feature: MA Experiment 20000436 PARAMETER Experiment Name: At_Drought_P Parameter: Tissue Value: Whole Plant
  misc_feature: MA Experiment 20000436 PARAMETER Experiment Name: At_Drought_P Parameter: Treatment Value: Drought vs. No Drought
  misc_feature: MA Experiment ID: 20000437 Result: Down-regulated in Transcription
  misc_feature: MA Experiment 20000437 PARAMETER Experiment Name: At_Drought_P Parameter: Age (day) Value: 8
  misc_feature: MA Experiment 20000437 PARAMETER Experiment Name: At_Drought_P Parameter: Organism Value: A. thaliana
  misc_feature: MA Experiment 20000437 PARAMETER Experiment Name: At_Drought_P Parameter: Plant Line Value: WS
  misc_feature: MA Experiment 20000437 PARAMETER Experiment Name: At_Drought_P Parameter: Timepoint (hr) Value: 24
  misc_feature: MA Experiment 20000437 PARAMETER Experiment Name: At_Drought_P Parameter: Tissue Value: Whole Plant
  misc_feature: MA Experiment 20000437 PARAMETER Experiment Name: At_Drought_P Parameter: Treatment Value: Drought vs. No Drought
  misc_feature: MA Experiment ID: 20000439 Result: Down-regulated in Transcription
  misc_feature: MA Experiment 20000439 PARAMETER Experiment Name: At_Roots__P Parameter: Age (day) Value: 14 vs. 21
  misc_feature: MA Experiment 20000439 PARAMETER Experiment Name: At_Roots__P Parameter: Organism Value: A. thaliana
  misc_feature: MA Experiment 20000439 PARAMETER Experiment Name: At_Roots__P Parameter: Tissue Value: Roots vs. Whole Plant
  misc_feature: MA Experiment ID: 20000441 Result: Up-regulated in Transcription
  misc_feature: MA Experiment 20000441 PARAMETER Experiment Name: At_1uM_BR-BRZ__P Parameter: Tissue Value: Shoot Apices
  misc_feature: MA Experiment 20000441 PARAMETER Experiment Name: At_1uM_BR-BRZ__P Parameter: Treatment Value: 1uM BR vs. No Treatment
  misc_feature: MA Experiment ID: 20000794 Result: Down-regulated in Transcription
  misc_feature: MA Experiment 20000794 PARAMETER Experiment Name: At_Petals_P Parameter: Age (day) Value: 23-25 days
  misc_feature: MA Experiment 20000794 PARAMETER Experiment Name: At_Petals_P Parameter: Plant Line Value: WS
  misc_feature: MA Experiment 20000794 PARAMETER Experiment Name: At_Petals_P Parameter: Tissue Value: Petals vs. Whole plant
  misc_feature: MA Experiment ID: 20001451 Result: Down-regulated in Transcription
  misc_feature: MA Experiment 20001451 PARAMETER Experiment Name: At_Far-red-induction_P Parameter: Age (day) Value: 7
  misc_feature: MA Experiment 20001451 PARAMETER Experiment Name: At_Far-red-induction_P Parameter: Light Value: Far-red vs. White
  misc_feature: MA Experiment 20001451 PARAMETER Experiment Name: At_Far-red-induction_P Parameter: Organism Value: A. thaliana
  misc_feature: MA Experiment 20001451 PARAMETER Experiment Name: At_Far-red-induction_P Parameter: Plant Line Value: Columbia
  misc_feature: MA Experiment 20001451 PARAMETER Experiment Name: At_Far-red-induction_P Parameter: Timepoint (hr) Value: 24
  misc_feature: MA Experiment 20001451 PARAMETER Experiment Name: At_Far-red-induction_P Parameter: Tissue Value: Whole Plant
  misc_feature: MA Experiment ID: 20001560 Result: Up-regulated in Transcription
  misc_feature: MA Experiment 20001560 PARAMETER Experiment Name: At_Drought_Soil_Dry_P Parameter: Age (day) Value: 28
  misc_feature: MA Experiment 20001560 PARAMETER Experiment Name: At_Drought_Soil_Dry_P Parameter: Organism Value: A. thaliana
  misc_feature: MA Experiment 20001560 PARAMETER Experiment Name: At_Drought_Soil_Dry_P Parameter: Plant Line Value: WS
  misc_feature: MA Experiment 20001560 PARAMETER Experiment Name: At_Drought_Soil_Dry_P Parameter: Post Timepoint (hr) Value: None
  misc_feature: MA Experiment 20001560 PARAMETER Experiment Name: At_Drought_Soil_Dry_P Parameter: Post-Treatment Value: None
  misc_feature: MA Experiment 20001560 PARAMETER Experiment Name: At_Drought_Soil_Dry_P Parameter: Timepoint (day) Value: 14
  misc_feature: MA Experiment 20001560 PARAMETER Experiment Name: At_Drought_Soil_Dry_P Parameter: Treatment Value: Drought vs. No Drought
  misc_feature: MA Experiment ID: 20001757 Result: Up-regulated in Transcription
  misc_feature: MA Experiment 20001757 PARAMETER Experiment Name: At_50mM_NH4NO3_L-to-H_P Parameter: Timepoint (hr) Value: 6
  misc_feature: MA Experiment 20001757 PARAMETER Experiment Name: At_50mM_NH4NO3_L-to-H_P Parameter: Tissue Value: Leaf
  misc_feature: MA Experiment 20001757 PARAMETER Experiment Name: At_50mM_NH4NO3_L-to-H_P Parameter: Treatment Value: 50mM NH4NO3 vs 100mM Mannitol
  misc_feature: MA Experiment ID: 20001911 Result: Down-regulated in Transcription
  misc_feature: MA Experiment 20001911 PARAMETER Experiment Name: At_Drought_Reproduction_P Parameter: Age (day) Value: 40
  misc_feature: MA Experiment 20001911 PARAMETER Experiment Name: At_Drought_Reproduction_P Parameter: Organism Value: A. thaliana
  misc_feature: MA Experiment 20001911 PARAMETER Experiment Name: At_Drought_Reproduction_P Parameter: Plant Line Value: WS
  misc_feature: MA Experiment 20001911 PARAMETER Experiment Name: At_Drought_Reproduction_P Parameter: Timepoint (day) Value: 10
  misc_feature: MA Experiment 20001911 PARAMETER Experiment Name: At_Drought_Reproduction_P Parameter: Tissue Value: Flowers
  misc_feature: MA Experiment 20001911 PARAMETER Experiment Name: At_Drought_Reproduction_P Parameter: Treatment Value: Drought vs. No Drought
atactcagagacgtgtagcttcactaattccacatactcagagagaaatggcaaccgaaaccgtattagccacggcggtgagcaatggcaaaagcaaaggatgttgcaagtccggtccaggttacgcgacgcctctcgccgccatggccggtccacgggaaaagctcatctatgtcactgccctttactccggaacggggcgagacaaaccggactacttggcaacggtggatgtggatccaagctcacccacattttcaagcgtcattcacagactaaaaatgccatatataggagatgagcttcaccacactggttggaactcttgcagctcttgccatggtgatgcttctgctgatagacgttaccttgtcttaccaggcttaatttctggtcgcatctatgcaatcgacacaaagaccgacccaaaggctccgtctttgtacaaggttgtagagcctaaggagattgctgaaaagacaggattagcatttccacatacatctcattgcctagcttcaggggatatgttggtgtcatgccttggggacaaagaaggaaacgccaaagggaacgggtttcttttgctagactctgacttcaatgtcaaaagcaggtgggacaaaccaggacatggtcctttgtttggttatgatttttggtaccaacctcggttcaagaccatgatcagcacttcttggggtgcacctaaagccttctccaaaggtttcaatctccagcatgttgcggatggcttgtatggaagtcatttgcatatttatcaatggcctgaaggtgaaatgaaacagataattgaccttggaaataccggtctcttacctcttgagatcagattcttgcatgatccttctaaagatacagggtatgttgggagtgctttgtctagtaatatgataaggtttttcaagaacagtgatgacacgtggagccatgaggttgttatatcggttaaaccgttgaaagtcgaaaactggatacttccagaaatgccggggcttatcaccgacttcttgatctccctcgatgaccggtttttctactttgtgaactggcttcatggagacattcgtcagtacaacatcgaagaccctaaaaacccggtcttaaccggacaaatatgggtcggaggattactacaaaagggtagtccttataaggctgttggagaagatggtaatacttaccaattcgatgttcctcagatcaaggggaagtctctaagagcaggacctcagatgatccaactaagcctagatgggaaaagattatatgcgacaaactcgctatttagcgcatgggaccgtcagttttacccggaaatcatggagaaaggctcacacataattcaaatcgatgttgatacagacaaaggtggtctcactctaaaccctgacttctttgtggactttggtgatgaaccagacggtcctgcactagctcacgagatgagatatcccggcggagactgcacttccgatatctggatctgattttggctccctaagagtgtaagctggatttgtggctagattcgtgatcaagacaattaaagttgttcttactcctttgtggcttattccgtgataataaaactttctatttatgttgtgtgtctctatctttcgagtaaccgaattgaaccgatcaaaaccgggtcgaattatggatcatcaactcaaaaacacgtcagatacagtgtacgtggacacatggaccagatttgttatcttcttcttgttattttgttaatggacaagatctggttaattgtttatgtt

SEQ ID NO: 88549 - protein, 502 aa, Arabidopsis thaliana
  peptide (1)..(502): Ceres Seq. ID no. 12710589
  misc_feature (35)..(502): Pfam Name: 56kDa selenium binding protein (SBP56) Pfam Description: 56kDa selenium binding protein (SBP56)
  misc_feature (16)..(502): Homolog of NCBI NO: 15236386 NR Description: selenium-binding protein like; protein id: supported by cDNA: gi_13605824, supported by cDNA: gi_13877734, by cDNA: gi_17473633, supported by cDNA: gi_17473651 [Arabidopsis
  misc_feature (16)..(502): Homolog of NCBI NO: 13605825 NR Description: AT4g14040/dl3061c [Arabidopsis thaliana]
  misc_feature (16)..(502): Homolog of NCBI NO: 22530900 NR Description: selenium-binding protein-like protein
  misc_feature (16)..(502): Homolog of NCBI NO: 25348077 NR Description: selenium-binding protein like [imported] -
  misc_feature (16)..(502): Homolog of NCBI NO: 15236385 NR Description: selenium-binding protein like; protein id:
  misc_feature (38)..(502): Homolog of NCBI NO: 15485232 NR Description: selenium binding protein [Arabidopsis thaliana]
  misc_feature (3)..(409): Homolog of NCBI NO: 7488184 NR Description: probable selenium-binding protein - Arabidopsis
  misc_feature (20)..(502): Homolog of NCBI NO: 15485720 NR Description: selenium binding protein [Medicago sativa]
  misc_feature (20)..(502): Homolog of NCBI NO: 15485716 NR Description: selenium binding protein [Lotus japonicus]
  misc_feature (25)..(502): Homolog of NCBI NO: 15229520 NR Description: selenium binding protein, putative; protein id:
TQRRVASLIPHTQREMATETVLATAVSNGKSKGCCKSGPGYATPLAAMAGPREKLIYVTALYSGTGRDKPDYLATVDVDPSSPTFSSVIHRLKMPYIGDELHHTGWNSCSSCHGDASADRRYLVLPGLISGRIYAIDTKTDPKAPSLYKVVEPKEIAEKTGLAFPHTSHCLASGDMLVSCLGDKEGNAKGNGFLLLDSDFNVKSRWDKPGHGPLFGYDFWYQPRFKTMISTSWGAPKAFSKGFNLQHVADGLYGSHLHIYQWPEGEMKQIIDLGNTGLLPLEIRFLHDPSKDTGYVGSALSSNMIRFFKNSDDTWSHEVVISVKPLKVENWILPEMPGLITDFLISLDDRFFYFVNWLHGDIRQYNIEDPKNPVLTGQIWVGGLLQKGSPYKAVGEDGNTYQFDVPQIKGKSLRAGPQMIQLSLDGKRLYATNSLFSAWDRQFYPEIMEKGSHIIQIDVDTDKGGLTLNPDFFVDFGDEPDGPALAHEMRYPGGDCTSDIWI

SEQ ID NO: 88550 - protein, 487 aa, Arabidopsis thaliana
  peptide (1)..(487): Ceres Seq. ID no. 12710590
  misc_feature (20)..(487): Pfam Name: 56kDa selenium binding protein (SBP56) Pfam Description: 56kDa selenium binding protein (SBP56)
  misc_feature (1)..(487): Homolog of NCBI NO: 15236386 NR Description: selenium-binding protein like; protein id: supported by cDNA: gi_13605824, supported by cDNA: gi_13877734, by cDNA: gi_17473633, supported by cDNA: gi_17473651 [Arabidopsis
  misc_feature (1)..(487): Homolog of NCBI NO: 13605825 NR Description: AT4g14040/dl3061c [Arabidopsis thaliana]
  misc_feature (1)..(487): Homolog of NCBI NO: 22530900 NR Description: selenium-binding protein-like protein
  misc_feature (1)..(487): Homolog of NCBI NO: 25348077 NR Description: selenium-binding protein like [imported] -
  misc_feature (1)..(487): Homolog of NCBI NO: 15236385 NR Description: selenium-binding protein like; protein id:
  misc_feature (23)..(487): Homolog of NCBI NO: 15485232 NR Description: selenium binding protein [Arabidopsis thaliana]
  misc_feature (1)..(394): Homolog of NCBI NO: 7488184 NR Description: probable selenium-binding protein - Arabidopsis
  misc_feature (5)..(487): Homolog of NCBI NO: 15485720 NR Description: selenium binding protein [Medicago sativa]
  misc_feature (5)..(487): Homolog of NCBI NO: 15485716 NR Description: selenium binding protein [Lotus japonicus]
  misc_feature (10)..(487): Homolog of NCBI NO: 15229520 NR Description: selenium binding protein, putative; protein id:
MATETVLATAVSNGKSKGCCKSGPGYATPLAAMAGPREKLIYVTALYSGTGRDKPDYLATVDVDPSSPTFSSVIHRLKMPYIGDELHHTGWNSCSSCHGDASADRRYLVLPGLISGRIYAIDTKTDPKAPSLYKVVEPKEIAEKTGLAFPHTSHCLASGDMLVSCLGDKEGNAKGNGFLLLDSDFNVKSRWDKPGHGPLFGYDFWYQPRFKTMISTSWGAPKAFSKGFNLQHVADGLYGSHLHIYQWPEGEMKQIIDLGNTGLLPLEIRFLHDPSKDTGYVGSALSSNMIRFFKNSDDTWSHEVVISVKPLKVENWILPEMPGLITDFLISLDDRFFYFVNWLHGDIRQYNIEDPKNPVLTGQIWVGGLLQKGSPYKAVGEDGNTYQFDVPQIKGKSLRAGPQMIQLSLDGKRLYATNSLFSAWDRQFYPEIMEKGSHIIQIDVDTDKGGLTLNPDFFVDFGDEPDGPALAHEMRYPGGDCTSDIWI

SEQ ID NO: 88551 - protein, 455 aa, Arabidopsis thaliana
  peptide (1)..(455): Ceres Seq. ID no. 12710591
  misc_feature (1)..(455): Pfam Name: 56kDa selenium binding protein (SBP56) Pfam Description: 56kDa selenium binding protein (SBP56)
  misc_feature (1)..(455): Homolog of NCBI NO: 15236386 NR Description: selenium-binding protein like; protein id: supported by cDNA: gi_13605824, supported by cDNA: gi_13877734, by cDNA: gi_17473633, supported by cDNA: gi_17473651 [Arabidopsis
  misc_feature (1)..(455): Homolog of NCBI NO: 13605825 NR Description: AT4g14040/dl3061c [Arabidopsis thaliana]
  misc_feature (1)..(455): Homolog of NCBI NO: 22530900 NR Description: selenium-binding protein-like protein
  misc_feature (1)..(455): Homolog of NCBI NO: 25348077 NR Description: selenium-binding protein like [imported] -
  misc_feature (1)..(455): Homolog of NCBI NO: 15236385 NR Description: selenium-binding protein like; protein id:
  misc_feature (1)..(455): Homolog of NCBI NO: 15485232 NR Description: selenium binding protein [Arabidopsis thaliana]
  misc_feature (1)..(362): Homolog of NCBI NO: 7488184 NR Description: probable selenium-binding protein - Arabidopsis
  misc_feature (1)..(455): Homolog of NCBI NO: 15485720 NR Description: selenium binding protein [Medicago sativa]
  misc_feature (1)..(455): Homolog of NCBI NO: 15485716 NR Description: selenium binding protein [Lotus japonicus]
  misc_feature (1)..(455): Homolog of NCBI NO: 15229520 NR Description: selenium binding protein, putative; protein id:
MAGPREKLIYVTALYSGTGRDKPDYLATVDVDPSSPTFSSVIHRLKMPYIGDELHHTGWNSCSSCHGDASADRRYLVLPGLISGRIYAIDTKTDPKAPSLYKVVEPKEIAEKTGLAFPHTSHCLASGDMLVSCLGDKEGNAKGNGFLLLDSDFNVKSRWDKPGHGPLFGYDFWYQPRFKTMISTSWGAPKAFSKGFNLQHVADGLYGSHLHIYQWPEGEMKQIIDLGNTGLLPLEIRFLHDPSKDTGYVGSALSSNMIRFFKNSDDTWSHEVVISVKPLKVENWILPEMPGLITDFLISLDDRFFYFVNWLHGDIRQYNIEDPKNPVLTGQIWVGGLLQKGSPYKAVGEDGNTYQFDVPQIKGKSLRAGPQMIQLSLDGKRLYATNSLFSAWDRQFYPEIMEKGSHIIQIDVDTDKGGLTLNPDFFVDFGDEPDGPALAHEMRYPGGDCTSDIWI

SEQ ID NO: 88552 - DNA, 663 bp, Arabidopsis thaliana
  misc_feature (1)..(663): Ceres Seq. ID no. 12710652
  misc_feature: MA Experiment ID: 20000307 Result: Up-regulated in Transcription
  misc_feature: MA Experiment 20000307 PARAMETER Experiment Name: At_Germinating_Seeds_Sub_P Parameter: Age (hr) Value: 24 vs. 0
  misc_feature: MA Experiment 20000307 PARAMETER Experiment Name: At_Germinating_Seeds_Sub_P Parameter: Organism Value: A. thaliana
  misc_feature: MA Experiment 20000307 PARAMETER Experiment Name: At_Germinating_Seeds_Sub_P Parameter: Plant Line Value: WS
  misc_feature: MA Experiment 20000307 PARAMETER Experiment Name: At_Germinating_Seeds_Sub_P Parameter: Tissue Value: Germinating Seeds
  misc_feature: MA Experiment ID: 20000314 Result: Down-regulated in Transcription
  misc_feature: MA Experiment 20000314 PARAMETER Experiment Name: At_14day_Shoots-Roots_Sub_P Parameter: Age (day) Value: 14
  misc_feature: MA Experiment 20000314 PARAMETER Experiment Name: At_14day_Shoots-Roots_Sub_P Parameter: Organism Value: A. thaliana
  misc_feature: MA Experiment 20000314 PARAMETER Experiment Name: At_14day_Shoots-Roots_Sub_P Parameter: Plant Line Value: WS
  misc_feature: MA Experiment 20000314 PARAMETER Experiment Name: At_14day_Shoots-Roots_Sub_P Parameter: Tissue Value: Roots vs. Whole Plant
  misc_feature: MA Experiment ID: 20000315 Result: Down-regulated in Transcription
  misc_feature: MA Experiment 20000315 PARAMETER Experiment Name: At_14day_Shoots-Roots_Sub_P Parameter: Age (day) Value: 14
  misc_feature: MA Experiment 20000315 PARAMETER Experiment Name: At_14day_Shoots-Roots_Sub_P Parameter: Organism Value: A. thaliana
  misc_feature: MA Experiment 20000315 PARAMETER Experiment Name: At_14day_Shoots-Roots_Sub_P Parameter: Plant Line Value: WS
  misc_feature: MA Experiment 20000315 PARAMETER Experiment Name: At_14day_Shoots-Roots_Sub_P Parameter: Tissue Value: Shoots vs. Whole Plant
  misc_feature: MA Experiment ID: 20000327 Result: Down-regulated in Transcription
  misc_feature: MA Experiment 20000327 PARAMETER Experiment Name: At_42deg_Heat_Sub_P Parameter: Age (day) Value: 14
  misc_feature: MA Experiment 20000327 PARAMETER Experiment Name: At_42deg_Heat_Sub_P Parameter: Organism Value: A. thaliana
  misc_feature: MA Experiment 20000327 PARAMETER Experiment Name: At_42deg_Heat_Sub_P Parameter: Plant Line Value: WS
  misc_feature: MA Experiment 20000327 PARAMETER Experiment Name: At_42deg_Heat_Sub_P Parameter: Temperature (deg C) Value: 42 vs. 22
  misc_feature: MA Experiment 20000327 PARAMETER Experiment Name: At_42deg_Heat_Sub_P Parameter: Timepoint (hr) Value: 1
  misc_feature: MA Experiment 20000327 PARAMETER Experiment Name: At_42deg_Heat_Sub_P Parameter: Tissue Value: Aerial
  misc_feature: MA Experiment ID: 20000346 Result: Up-regulated in Transcription
  misc_feature: MA Experiment 20000346 PARAMETER Experiment Name: At_2mM_SA_Sub_P Parameter: Age (day) Value: 14
  misc_feature: MA Experiment 20000346 PARAMETER Experiment Name: At_2mM_SA_Sub_P Parameter: Organism Value: A. thaliana
  misc_feature: MA Experiment 20000346 PARAMETER Experiment Name: At_2mM_SA_Sub_P Parameter: Plant Line Value: WS
  misc_feature: MA Experiment 20000346 PARAMETER Experiment Name: At_2mM_SA_Sub_P Parameter: Timepoint (hr) Value: 1
  misc_feature: MA Experiment 20000346 PARAMETER Experiment Name: At_2mM_SA_Sub_P Parameter: Tissue Value: Aerial
  misc_feature: MA Experiment 20000346 PARAMETER Experiment Name: At_2mM_SA_Sub_P Parameter: Treatment Value: 2mM SA vs. No Treatment
  misc_feature: MA Experiment ID: 20000352 Result: Up-regulated in Transcription
  misc_feature: MA Experiment 20000352 PARAMETER Experiment Name: At_Drought_Sub_P Parameter: Age (day) Value: 7
  misc_feature: MA Experiment 20000352 PARAMETER Experiment Name: At_Drought_Sub_P Parameter: Organism Value: A. thaliana
  misc_feature: MA Experiment 20000352 PARAMETER Experiment Name: At_Drought_Sub_P Parameter: Plant Line Value: WS
  misc_feature: MA Experiment 20000352 PARAMETER Experiment Name: At_Drought_Sub_P Parameter: Timepoint (hr) Value: 6
  misc_feature: MA Experiment 20000352 PARAMETER Experiment Name: At_Drought_Sub_P Parameter: Tissue Value: Whole Plant
  misc_feature: MA Experiment 20000352 PARAMETER Experiment Name: At_Drought_Sub_P Parameter: Treatment Value: Drought vs. No Drought
  misc_feature: MA Experiment ID: 20000355 Result: Down-regulated in Transcription
  misc_feature: MA Experiment 20000355 PARAMETER Experiment Name: At_Siliques_Sub_P Parameter: Age (day) Value: 21
  misc_feature: MA Experiment 20000355 PARAMETER Experiment Name: At_Siliques_Sub_P Parameter: Organism Value: A. thaliana
  misc_feature: MA Experiment 20000355 PARAMETER Experiment Name: At_Siliques_Sub_P Parameter: Plant Line Value: WS
  misc_feature: MA Experiment 20000355 PARAMETER Experiment Name: At_Siliques_Sub_P Parameter: Tissue Value: Less Than 5mm Siliques vs. Whole Plant
  misc_feature: MA Experiment ID: 20000440 Result: Down-regulated in Transcription
  misc_feature: MA Experiment 20000440 PARAMETER Experiment Name: At_Closed-Flower__Sub_P Parameter: Tissue Value: Closed Flower vs. Whole Plant
  misc_feature: MA Experiment ID: 20000634 Result: Up-regulated in Transcription
  misc_feature: MA Experiment 20000634 PARAMETER Experiment Name: At_10percent_PEG_Sub_P Parameter: Age (day) Value: 12
  misc_feature: MA Experiment 20000634 PARAMETER Experiment Name: At_10percent_PEG_Sub_P Parameter: Organism Value: A. thaliana
  misc_feature: MA Experiment 20000634 PARAMETER Experiment Name: At_10percent_PEG_Sub_P Parameter: Plant Line Value: WS
  misc_feature: MA Experiment 20000634 PARAMETER Experiment Name: At_10percent_PEG_Sub_P Parameter: Timepoint (day) Value: 12
  misc_feature: MA Experiment 20000634 PARAMETER Experiment Name: At_10percent_PEG_Sub_P Parameter: Tissue Value: Whole Plant
  misc_feature: MA Experiment 20000634 PARAMETER Experiment Name: At_10percent_PEG_Sub_P Parameter: Treatment Value: 10% PEG vs. No Treatment
  misc_feature: MA Experiment ID: 20001807 Result: Down-regulated in Transcription
  misc_feature: MA Experiment 20001807 PARAMETER Experiment Name: At_50mM_NH4NO3_L-to-H_Sub_P Parameter: Timepoint (hr) Value: 6
  misc_feature: MA Experiment 20001807 PARAMETER Experiment Name: At_50mM_NH4NO3_L-to-H_Sub_P Parameter: Tissue Value: Leaf
  misc_feature: MA Experiment 20001807 PARAMETER Experiment Name: At_50mM_NH4NO3_L-to-H_Sub_P Parameter: Treatment Value: 50mM NH4NO3 vs 100mM Mannitol
atggaggatcggttctccactatcaccaatcttcatggagatcgtaaacaggcaatatttggagtctatgttggtcatggaggagttaaagcggctgagtttgcagctaagaacttagataagaacattgtagaagaagtagttgacacaacgtttcttaaggaggaaggttttaagggtggttcatcctgtgtcacggctttggttagcgaagggagccttgttgtgtcaaacgccggtgactgtcgtgctgttatgagtgtaggaggtgtagctaaagttttattttctgatcattgtccgtctagagatgatgaacggaaaagaattgaaaccacgggaggatatgttgatacgtttcacggatccttagttgtgccaagaggaatcggagatgctcaacttaagaaatgggttatagctgaaccagagacaaagatctcgagagttgagcatgaccatgagttcttaatcttggcatcacatggtttatgggataaggtgagtaaccaagaagcagtagacattgctcgtcccttctgcttacgaaccgagaagccattgttgttagcagcttgtaagaagcttgttgatctctcggcttcacgaggctcgtttgatgatatcagtgtgatgttgatcccattgcgccagttcatatag

SEQ ID NO: 88553 - protein, 220 aa, Arabidopsis thaliana
  peptide (1)..(220): Ceres Seq. ID no. 12710653
  misc_feature (1)..(209): Pfam Name: Protein phosphatase 2C Pfam Description: Protein phosphatase 2C
  misc_feature (1)..(220): Homolog of NCBI NO: 15236450 NR Description: protein phosphatase 2C (PP2C), putative; protein At4g08260.1 [Arabidopsis thaliana] >gi|7486866|pir||T10553
  misc_feature (1)..(217): Homolog of NCBI NO: 9294079 NR Description: serine/threonine phosphatase type 2c-like protein
  misc_feature (122)..(217): Homolog of NCBI NO: 22331365 NR Description: protein phosphatase 2C (PP2C), putative; protein
  misc_feature (1)..(93): Homolog of NCBI NO: 22331365 NR Description: protein phosphatase 2C (PP2C), putative; protein
  misc_feature (49)..(216): Homolog of NCBI NO: 15222312 NR Description: protein phosphatase 2C (PP2C); protein id: supported by cDNA: gi_20258779 [Arabidopsis thaliana]
  misc_feature (1)..(48): Homolog of NCBI NO: 15222312 NR Description: protein phosphatase 2C (PP2C); protein id: supported by cDNA: gi_20258779 [Arabidopsis thaliana]
  misc_feature (12)..(220): Homolog of NCBI NO: 15227687 NR Description: protein phosphatase 2C (PP2C); protein id: supported by cDNA: gi_13877670 [Arabidopsis thaliana]
  misc_feature (114)..(216): Homolog of NCBI NO: 25352225 NR Description: hypothetical protein [imported] - Arabidopsis >gi|8954030|gb|AAF82204.1|AC067971_12 Contains similarity to phosphatase 2C from Arabidopsis thaliana gb|AF085279. It contains
  misc_feature (49)..(113): Homolog of NCBI NO: 25352225 NR Description: hypothetical protein [imported] - Arabidopsis >gi|8954030|gb|AAF82204.1|AC067971_12 Contains similarity to phosphatase 2C from Arabidopsis thaliana gb|AF085279. It contains
  misc_feature (1)..(48): Homolog of NCBI NO: 25352225 NR Description: hypothetical protein [imported] - Arabidopsis >gi|8954030|gb|AAF82204.1|AC067971_12 Contains similarity to phosphatase 2C from Arabidopsis thaliana gb|AF085279. It contains
MEDRFSTITNLHGDRKQAIFGVYVGHGGVKAAEFAAKNLDKNIVEEVVDTTFLKEEGFKGGSSCVTALVSEGSLVVSNAGDCRAVMSVGGVAKVLFSDHCPSRDDERKRIETTGGYVDTFHGSLVVPRGIGDAQLKKWVIAEPETKISRVEHDHEFLILASHGLWDKVSNQEAVDIARPFCLRTEKPLLLAACKKLVDLSASRGSFDDISVMLIPLRQFI

SEQ ID NO: 88554 - protein, 135 aa, Arabidopsis thaliana
  peptide (1)..(135): Ceres Seq. ID no. 12710654
  misc_feature (1)..(124): Pfam Name: Protein phosphatase 2C Pfam Description: Protein phosphatase 2C
  misc_feature (1)..(135): Homolog of NCBI NO: 15236450 NR Description: protein phosphatase 2C (PP2C), putative; protein At4g08260.1 [Arabidopsis thaliana] >gi|7486866|pir||T10553
  misc_feature (1)..(132): Homolog of NCBI NO: 9294079 NR Description: serine/threonine phosphatase type 2c-like protein
  misc_feature (37)..(132): Homolog of NCBI NO: 22331365 NR Description: protein phosphatase 2C (PP2C), putative; protein
  misc_feature (1)..(131): Homolog of NCBI NO: 15222312 NR Description: protein phosphatase 2C (PP2C); protein id: supported by cDNA: gi_20258779 [Arabidopsis thaliana]
  misc_feature (1)..(135): Homolog of NCBI NO: 15227687 NR Description: protein phosphatase 2C (PP2C); protein id: supported by cDNA: gi_13877670 [Arabidopsis thaliana]
  misc_feature (29)..(131): Homolog of NCBI NO: 25352225 NR Description: hypothetical protein [imported] - Arabidopsis >gi|8954030|gb|AAF82204.1|AC067971_12 Contains similarity to phosphatase 2C from Arabidopsis thaliana gb|AF085279. It contains
  misc_feature (1)..(28): Homolog of NCBI NO: 25352225 NR Description: hypothetical protein [imported] - Arabidopsis >gi|8954030|gb|AAF82204.1|AC067971_12 Contains similarity to phosphatase 2C from Arabidopsis thaliana gb|AF085279. It contains
  misc_feature (1)..(134): Homolog of NCBI NO: 30013681 NR Description: Avr9/Cf-9 rapidly elicited protein 284 [Nicotiana
  misc_feature (1)..(135): Homolog of NCBI NO: 7488754 NR Description: protein phosphatase 2C - alfalfa
  misc_feature (1)..(135): Homolog of NCBI NO: 15225656 NR Description: protein phosphatase 2C (PP2C); protein id: [Arabidopsis thaliana] >gi|25352216|pir||C84826 protein
MSVGGVAKVLFSDHCPSRDDERKRIETTGGYVDTFHGSLVVPRGIGDAQLKKWVIAEPETKISRVEHDHEFLILASHGLWDKVSNQEAVDIARPFCLRTEKPLLLAACKKLVDLSASRGSFDDISVMLIPLRQFI

SEQ ID NO: 88555 - DNA, 958 bp, Arabidopsis thaliana
  misc_feature (1)..(958): Ceres Seq. ID no. 12710655
  misc_feature: MA Experiment ID: 108434 Result: Down-regulated in Transcription
  misc_feature: MA Experiment 108434 PARAMETER Experiment Name: At_Root_Tips_cDNA_P Parameter: Tissue Value: Root Tips
  misc_feature: MA Experiment ID: 108461 Result: Up-regulated in Transcription
  misc_feature: MA Experiment 108461 PARAMETER Experiment Name: At_Germinating_Seeds_cDNA_P Parameter: Age (day) Value: 1 vs. 0
  misc_feature: MA Experiment 108461 PARAMETER Experiment Name: At_Germinating_Seeds_cDNA_P Parameter: Tissue Value: Germinating Seeds
  misc_feature: MA Experiment ID: 108462 Result: Up-regulated in Transcription
  misc_feature: MA Experiment 108462 PARAMETER Experiment Name: At_Germinating_Seeds_cDNA_P Parameter: Age (day) Value: 2 vs. 0
  misc_feature: MA Experiment 108462 PARAMETER Experiment Name: At_Germinating_Seeds_cDNA_P Parameter: Tissue Value: Germinating Seeds
  misc_feature: MA Experiment ID: 108488 Result: Up-regulated in Transcription
  misc_feature: MA Experiment ID: 108594 Result: Down-regulated in Transcription
  misc_feature: MA Experiment 108594 PARAMETER Experiment Name: At_Ler-rhl_Root_cDNA_P Parameter: Plant Line Value: null
  misc_feature: MA Experiment ID: 108595 Result: Down-regulated in Transcription
  misc_feature: MA Experiment 108595 PARAMETER Experiment Name: At_Ler-pi_Ovule_cDNA_P Parameter: Plant Line Value: null
  misc_feature: MA Experiment ID: 20000090 Result: Down-regulated in Transcription
  misc_feature: MA Experiment ID: 20000307 Result: Up-regulated in Transcription
  misc_feature: MA Experiment 20000307 PARAMETER Experiment Name: At_Germinating_Seeds_Sub_P Parameter: Age (hr) Value: 24 vs. 0
  misc_feature: MA Experiment 20000307 PARAMETER Experiment Name: At_Germinating_Seeds_Sub_P Parameter: Organism Value: A. thaliana
  misc_feature: MA Experiment 20000307 PARAMETER Experiment Name: At_Germinating_Seeds_Sub_P Parameter: Plant Line Value: WS
  misc_feature: MA Experiment 20000307 PARAMETER Experiment Name: At_Germinating_Seeds_Sub_P Parameter: Tissue Value: Germinating Seeds
  misc_feature: MA Experiment ID: 20000314 Result: Down-regulated in Transcription
  misc_feature: MA Experiment 20000314 PARAMETER Experiment Name: At_14day_Shoots-Roots_Sub_P Parameter: Age (day) Value: 14
  misc_feature: MA Experiment 20000314 PARAMETER Experiment Name: At_14day_Shoots-Roots_Sub_P Parameter: Organism Value: A. thaliana
  misc_feature: MA Experiment 20000314 PARAMETER Experiment Name: At_14day_Shoots-Roots_Sub_P Parameter: Plant Line Value: WS
  misc_feature: MA Experiment 20000314 PARAMETER Experiment Name: At_14day_Shoots-Roots_Sub_P Parameter: Tissue Value: Roots vs. Whole Plant
  misc_feature: MA Experiment ID: 20000328 Result: Up-regulated in Transcription
  misc_feature: MA Experiment 20000328 PARAMETER Experiment Name: At_42deg_Heat_Sub_P Parameter: Age (day) Value: 14
  misc_feature: MA Experiment 20000328 PARAMETER Experiment Name: At_42deg_Heat_Sub_P Parameter: Organism Value: A. thaliana
  misc_feature: MA Experiment 20000328 PARAMETER Experiment Name: At_42deg_Heat_Sub_P Parameter: Plant Line Value: WS
  misc_feature: MA Experiment 20000328 PARAMETER Experiment Name: At_42deg_Heat_Sub_P Parameter: Temperature (deg C) Value: 42 vs. 22
  misc_feature: MA Experiment 20000328 PARAMETER Experiment Name: At_42deg_Heat_Sub_P Parameter: Timepoint (hr) Value: 6
  misc_feature: MA Experiment 20000328 PARAMETER Experiment Name: At_42deg_Heat_Sub_P Parameter: Tissue Value: Aerial
  misc_feature: MA Experiment ID: 20001807 Result: Up-regulated in Transcription
  misc_feature: MA Experiment 20001807 PARAMETER Experiment Name: At_50mM_NH4NO3_L-to-H_Sub_P Parameter: Timepoint (hr) Value: 6
  misc_feature: MA Experiment 20001807 PARAMETER Experiment Name: At_50mM_NH4NO3_L-to-H_Sub_P Parameter: Tissue Value: Leaf
  misc_feature: MA Experiment 20001807 PARAMETER Experiment Name: At_50mM_NH4NO3_L-to-H_Sub_P Parameter: Treatment Value: 50mM NH4NO3 vs 100mM Mannitol
ataactcacactctctcttcaatcctttcctttcattgtagttaaacaaagattacgattatggccacatcagctatccaacaatcctccttcgccggccaaacggctctcaagccctccagcgacctcatccaaaaggtgggcgtcttgggcggtggccgtgtgaccatgcgtcgtaccgtcaagtctactccccaaagcatctggtatggaccagaccgtcccaagtacttgggaccattctcggagaacacaccgtcttacttaactggagaataccccggagactacggctgggacaccgctggactctcggctgacccggagacattcgctaagaaccgtgagcttgaagtaatccacagcagatgggctatgttgggtgctctcggatgcacattccctgaaattctctccaagaacggtgttaaattcggagaagccgtgtggttcaaggcaggctctcagattttctcagaaggaggtcttgattacctcggaaaccctaacttgatccacgcgcaaagcatcttagccatctgggctgttcaagttgtgctcatggggttcattgaaggctacagaatcggaggtggaccactcggagaaggacttgacccgctttatcccggaggtgcgttcgacccattgaacttggctgaggatccagaggctttctctgagctgaaggtgaaggagctcaagaacggtcgtcttgccatgttctctatgtttggattctttgtccaagccattgttactggtaaaggtcccattgagaacttatttgatcatttggctgatcctgtggctaacaacgcctggtcttacgctactaactttgtccccggaaagtaattatcttatgtatttgcttcataatctctctgctttgtaaactcgtgattgtgtaatattgacgtttgatgtgaatttggcacttaatgatgtttcttgg

SEQ ID NO: 88556 - protein, 265 aa, Arabidopsis thaliana
  peptide (1)..(265): Ceres Seq. ID no. 12710656
  misc_feature (64)..(232): Pfam Name: Chlorophyll A-B binding protein Pfam Description: Chlorophyll A-B binding protein
  misc_feature (1)..(265): Homolog of NCBI NO: 15224465 NR Description: light-harvesting chlorophyll a/b binding protein; id: At2g05070.1, supported by cDNA: gi_15809900, supported by
  misc_feature (1)..(265): Homolog of NCBI NO: 25299029 NR Description: chlorophyll a/b-binding protein Lhcb2 [imported] Arabidopsis thaliana >gi|4741948|gb|AAD28771.1|AF134124_1 Lhcb2
  misc_feature (1)..(265): Homolog of NCBI NO: 25299022 NR Description: chlorophyll a/b-binding protein Lhcb2 [imported] Arabidopsis thaliana >gi|4741944|gb|AAD28769.1|AF134122_1 Lhcb2
  misc_feature (1)..(264): Homolog of NCBI NO: 15224471 NR Description: light-harvesting chlorophyll a/b binding protein; id: At2g05100.1, supported by cDNA: gi_15450348, supported by gi_15450493, supported by cDNA: gi_4741943, supported by cDNA:
  misc_feature (1)..(265): Homolog of NCBI NO: 15232249 NR Description: light harvesting chlorophyll A/B binding protein, protein id: At3g27690.1, supported by cDNA: 7700., supported by
  misc_feature (1)..(265): Homolog of NCBI NO: 3560529 NR Description: light harvesting chlorophyll A/B binding protein
  misc_feature (1)..(265): Homolog of NCBI NO: 1345698 NR Description: Chlorophyll A-B binding protein 151, chloroplast
MATSAIQQSSFAGQTALKPSSDLIQKVGVLGGGRVTMRRTVKSTPQSIWYGPDRPKYLGPFSENTPSYLTGEYPGDYGWDTAGLSADPETFAKNRELEVIHSRWAMLGALGCTFPEILSKNGVKFGEAVWFKAGSQIFSEGGLDYLGNPNLIHAQSILAIWAVQVVLMGFIEGYRIGGGPLGEGLDPLYPGGAFDPLNLAEDPEAFSELKVKELKNGRLAMFSMFGFFVQAIVTGKGPIENLFDHLADPVANNAWSYATNFVPGK

SEQ ID NO: 88557 - protein, 229 aa, Arabidopsis thaliana
  peptide (1)..(229): Ceres Seq. ID no. 12710657
  misc_feature (28)..(196): Pfam Name: Chlorophyll A-B binding protein Pfam Description: Chlorophyll A-B binding protein
  misc_feature (1)..(229): Homolog of NCBI NO: 15224465 NR Description: light-harvesting chlorophyll a/b binding protein; id: At2g05070.1, supported by cDNA: gi_15809900, supported by
  misc_feature (1)..(229): Homolog of NCBI NO: 25299029 NR Description: chlorophyll a/b-binding protein Lhcb2 [imported] Arabidopsis thaliana >gi|4741948|gb|AAD28771.1|AF134124_1 Lhcb2
  misc_feature (1)..(229): Homolog of NCBI NO: 25299022 NR Description: chlorophyll a/b-binding protein Lhcb2 [imported] Arabidopsis thaliana >gi|4741944|gb|AAD28769.1|AF134122_1 Lhcb2
  misc_feature (1)..(228): Homolog of NCBI NO: 15224471 NR Description: light-harvesting chlorophyll a/b binding protein; id: At2g05100.1, supported by cDNA: gi_15450348, supported by gi_15450493, supported by cDNA: gi_4741943, supported by cDNA:
  misc_feature (1)..(229): Homolog of NCBI NO: 15232249 NR Description: light harvesting chlorophyll A/B binding protein, protein id: At3g27690.1, supported by cDNA: 7700., supported by
  misc_feature (1)..(229): Homolog of NCBI NO: 3560529 NR Description: light harvesting chlorophyll A/B binding protein
  misc_feature (1)..(229): Homolog of NCBI NO: 1345698 NR Description: Chlorophyll A-B binding protein 151, chloroplast
MRRTVKSTPQSIWYGPDRPKYLGPFSENTPSYLTGEYPGDYGWDTAGLSADPETFAKNRELEVIHSRWAMLGALGCTFPEILSKNGVKFGEAVWFKAGSQIFSEGGLDYLGNPNLIHAQSILAIWAVQVVLMGFIEGYRIGGGPLGEGLDPLYPGGAFDPLNLAEDPEAFSELKVKELKNGRLAMFSMFGFFVQAIVTGKGPIENLFDHLADPVANNAWSYATNFVPGK

SEQ ID NO: 88558 - protein, 160 aa, Arabidopsis thaliana; identical to SEQ ID NO: 25132
  peptide (1)..(160): Ceres Seq. ID no. 12710658
  misc_feature (1)..(127): Pfam Name: Chlorophyll A-B binding protein Pfam Description: Chlorophyll A-B binding protein
  misc_feature (1)..(160): Homolog of NCBI NO: 15224465 NR Description: light-harvesting chlorophyll a/b binding protein; id: At2g05070.1, supported by cDNA: gi_15809900, supported by
  misc_feature (1)..(160): Homolog of NCBI NO: 25299029 NR Description: chlorophyll a/b-binding protein Lhcb2 [imported] Arabidopsis thaliana >gi|4741948|gb|AAD28771.1|AF134124_1 Lhcb2
  misc_feature (1)..(160): Homolog of NCBI NO: 25299022 NR Description: chlorophyll a/b-binding protein Lhcb2 [imported] Arabidopsis thaliana >gi|4741944|gb|AAD28769.1|AF134122_1 Lhcb2
  misc_feature (1)..(159): Homolog of NCBI NO: 15224471 NR Description: light-harvesting chlorophyll a/b binding protein; id: At2g05100.1, supported by cDNA: gi_15450348, supported by gi_15450493, supported by cDNA: gi_4741943, supported by cDNA:
  misc_feature (1)..(160): Homolog of NCBI NO: 15232249 NR Description: light harvesting chlorophyll A/B binding protein, protein id: At3g27690.1, supported by cDNA: 7700., supported by
  misc_feature (1)..(160): Homolog of NCBI NO: 3560529 NR Description: light harvesting chlorophyll A/B binding protein
  misc_feature (1)..(160): Homolog of NCBI NO: 1345698 NR Description: Chlorophyll A-B binding protein 151, chloroplast

SEQ ID NO: 88559 - DNA, 1083 bp, Arabidopsis thaliana
  misc_feature (1)..(1083): Ceres Seq. ID no. 12710909
  misc_feature: MA Experiment ID: 108573 Result: Up-regulated in Transcription
  misc_feature: MA Experiment 108573 PARAMETER Experiment Name: At_Drought_cDNA_P Parameter: Timepoint (hr) Value: 6
  misc_feature: MA Experiment 108573 PARAMETER Experiment Name: At_Drought_cDNA_P Parameter: Tissue Value: Aerial
  misc_feature: MA Experiment 108573 PARAMETER Experiment Name: At_Drought_cDNA_P Parameter: Treatment Value: Drought vs. No Drought
  misc_feature: MA Experiment ID: 108579 Result: Down-regulated in Transcription
  misc_feature: MA Experiment 108579 PARAMETER Experiment Name: At_4deg_Cold_cDNA_P Parameter: Temperature (deg C) Value: 4 vs. 22
  misc_feature: MA Experiment 108579 PARAMETER Experiment Name: At_4deg_Cold_cDNA_P Parameter: Timepoint (hr) Value: 6
  misc_feature: MA Experiment 108579 PARAMETER Experiment Name: At_4deg_Cold_cDNA_P Parameter: Tissue Value: Aerial
atgtcaacggagagacgtgcttcgtcgaatccaatgaccaacgaagagaacgctatgtatatatctcttacgttccttgatatattgcatgaagcaccattatttggtcacaggaaatctagaagccttgttggaagttacctctatatgcttctattggcaggttatgctattttagctgctggtgctccttggatgtttcaccgagtccaacagttgaccccttcattgctctgctgctgcgatgttgcgcttttggttgtcacaggtgtctttcaacaatactttgtttatcaagtccagaaaatacgtctccagggttattacagtttcagtcaaaagttgaagcatgttgttcgtctgccatttgcaatcgctgcatatgggactgctgcaatgcttcttgtgatagtgtggaggcctcaaatccacattctttctatttcttctttgcaacggatcatcatgttggttgaagcagtgggcgctggctttttcatgggtttatacatcggttatgtgcaccaatacaattccgtgaattcccggccagatgtcttgaagtcattatattctcctcttcagccgtcaagttctatggaaggtttgaggtattatgaaggccggctttctgatcaacaaacggctttgttacaatatcaacgcgaaaatctccattttctaagcgaggagattctgtgcttgcaagagaaacttagcaaatatgaacaatctgatgatggaagcacacctcaggttgatctcgcacatcttttagctgctcgagatcaagagctgaggacactttcagctgagatgaatcagcttcagtctgagctacggcttgctcgttctttaatagccgagagagatgcagaggtgcagcgtgtcaacagtaccaacaaccagtatatcgaagaaaacgaaagactgagggcaattttgagtgaatggagcatgcgggcagcgaatcttgagagagctttggaagtggaacggatgtcgaactcagaactacagaaggaagtagcaagcacgcgtagaaagcagatgcttgagacaacaacgtctgagcaaccttaa

SEQ ID NO: 88560 - protein, 360 aa, Arabidopsis thaliana
  peptide (1)..(360): Ceres Seq. ID no. 12710910
  misc_feature (1)..(360): Homolog of NCBI NO: 18396221 NR Description: Expressed protein; protein id: At2g06005.1, by cDNA: 253548. [Arabidopsis thaliana] Expressed protein [Arabidopsis thaliana]
  misc_feature (133)..(360): Homolog of NCBI NO: 20453094 NR Description: At2g06010/F5K7.23 [Arabidopsis thaliana]
  misc_feature (204)..(307): Homolog of NCBI NO: 25411202 NR Description: hypothetical protein At2g06010 [imported] -
  misc_feature (231)..(352): Homolog of NCBI NO: 15242018 NR Description: putative protein; protein id: At5g20580.1
MSTERRASSNPMTNEENAMYISLTFLDILHEAPLFGHRKSRSLVGSYLYMLLLAGYAILAAGAPWMFHRVQQLTPSLLCCCDVALLVVTGVFQQYFVYQVQKIRLQGYYSFSQKLKHVVRLPFAIAAYGTAAMLLVIVWRPQIHILSISSLQRIIMLVEAVGAGFFMGLYIGYVHQYNSVNSRPDVLKSLYSPLQPSSSMEGLRYYEGRLSDQQTALLQYQRENLHFLSEEILCLQEKLSKYEQSDDGSTPQVDLAHLLAARDQELRTLSAEMNQLQSELRLARSLIAERDAEVQRVNSTNNQYIEENERLRAILSEWSMRAANLERALEVERMSNSELQKEVASTRRKQMLETTTSEQP

SEQ ID NO: 88561 - protein, 349 aa, Arabidopsis thaliana
  peptide (1)..(349): Ceres Seq. ID no. 12710911
  misc_feature (1)..(349): Homolog of NCBI NO: 18396221 NR Description: Expressed protein; protein id: At2g06005.1, by cDNA: 253548. [Arabidopsis thaliana] Expressed protein [Arabidopsis thaliana]
  misc_feature (122)..(349): Homolog of NCBI NO: 20453094 NR Description: At2g06010/F5K7.23 [Arabidopsis thaliana]
  misc_feature (193)..(296): Homolog of NCBI NO: 25411202 NR Description: hypothetical protein At2g06010 [imported] -
  misc_feature (220)..(341): Homolog of NCBI NO: 15242018 NR Description: putative protein; protein id: At5g20580.1
MTNEENAMYISLTFLDILHEAPLFGHRKSRSLVGSYLYMLLLAGYAILAAGAPWMFHRVQQLTPSLLCCCDVALLVVTGVFQQYFVYQVQKIRLQGYYSFSQKLKHVVRLPFAIAAYGTAAMLLVIVWRPQIHILSISSLQRIIMLVEAVGAGFFMGLYIGYVHQYNSVNSRPDVLKSLYSPLQPSSSMEGLRYYEGRLSDQQTALLQYQRENLHFLSEEILCLQEKLSKYEQSDDGSTPQVDLAHLLAARDQELRTLSAEMNQLQSELRLARSLIAERDAEVQRVNSTNNQYIEENERLRAILSEWSMRAANLERALEVERMSNSELQKEVASTRRKQMLETTTSEQP

SEQ ID NO: 88562 - protein, 342 aa, Arabidopsis thaliana
  peptide (1)..(342): Ceres Seq. ID no. 12710912
  misc_feature (1)..(342): Homolog of NCBI NO: 18396221 NR Description: Expressed protein; protein id: At2g06005.1, by cDNA: 253548. [Arabidopsis thaliana] Expressed protein [Arabidopsis thaliana]
  misc_feature (115)..(342): Homolog of NCBI NO: 20453094 NR Description: At2g06010/F5K7.23 [Arabidopsis thaliana]
  misc_feature (186)..(289): Homolog of NCBI NO: 25411202 NR Description: hypothetical protein At2g06010 [imported] -
  misc_feature (213)..(334): Homolog of NCBI NO: 15242018 NR Description: putative protein; protein id: At5g20580.1
MYISLTFLDILHEAPLFGHRKSRSLVGSYLYMLLLAGYAILAAGAPWMFHRVQQLTPSLLCCCDVALLVVTGVFQQYFVYQVQKIRLQGYYSFSQKLKHVVRLPFAIAAYGTAAMLLVIVWRPQIHILSISSLQRIIMLVEAVGAGFFMGLYIGYVHQYNSVNSRPDVLKSLYSPLQPSSSMEGLRYYEGRLSDQQTALLQYQRENLHFLSEEILCLQEKLSKYEQSDDGSTPQVDLAHLLAARDQELRTLSAEMNQLQSELRLARSLIAERDAEVQRVNSTNNQYIEENERLRAILSEWSMRAANLERALEVERMSNSELQKEVASTRRKQMLETTTSEQP

SEQ ID NO: 88563 - DNA, 501 bp, Arabidopsis thaliana
  misc_feature (1)..(501): Ceres Seq. ID no. 12710913
  misc_feature: MA Experiment ID: 20000184 Result: Down-regulated in Transcription
  misc_feature: MA Experiment 20000184 PARAMETER Experiment Name: At_Shoots__P Parameter: Age (day) Value: 7
  misc_feature: MA Experiment 20000184 PARAMETER Experiment Name: At_Shoots__P Parameter: Tissue Value: Shoots vs. Whole Plant
atgccatcggagctattccttaagttccgcaaagagcttcaaggccttcgcgtcggcgtcaatctcgagttatataacgaacccacgaatgattaccacgcaaagcttgttttgaagcctctatgtccagaaaggaagtggaagtttatatatgagccgctacaccaagaagttcgtgttttatcgaagaagattcctgtcaccagatttctaaacctccaggttggtgttggacataactttcaaatgaatgcaattggttggaaatggaagcttacttcatgtttgggtggagatggtgtgtctcggattcgaaataaaactactcttggtcttagtcctggtatcgatttccggtttggatggagagctgattttgtactcccagaggttactggggcccttggtactgaggaaccgttattcaacatgagctccgggcgtttagaggcatcactagacagagtagaggccattgtaacccattcagattatctatag

SEQ ID NO: 88564 - protein, 166 aa, Arabidopsis thaliana; identical to SEQ ID NO: 47917
  peptide (1)..(166): Ceres Seq. ID no. 12710914
  misc_feature (1)..(166): Homolog of NCBI NO: 18396223 NR Description: hypothetical protein; protein id: At2g06010.1, by cDNA: gi_18252842 [Arabidopsis thaliana] unknown protein [Arabidopsis thaliana]
  misc_feature (1)..(164): Homolog of NCBI NO: 38344551 NR Description: OSJNBa0027P08.19 [Oryza sativa (japonica
  misc_feature (12)..(148): Homolog of NCBI NO: 25411202 NR Description: hypothetical protein At2g06010 [imported] -

SEQ ID NO: 88565 - protein, 84 aa, Arabidopsis thaliana
  peptide (1)..(84): Ceres Seq. ID no. 12710915
  misc_feature (1)..(84): Homolog of NCBI NO: 18396223 NR Description: hypothetical protein; protein id: At2g06010.1, by cDNA: gi_18252842 [Arabidopsis thaliana] unknown protein [Arabidopsis thaliana]
  misc_feature (1)..(82): Homolog of NCBI NO: 38344551 NR Description: OSJNBa0027P08.19 [Oryza sativa (japonica
  misc_feature (1)..(66): Homolog of NCBI NO: 25411202 NR Description: hypothetical protein At2g06010 [imported] -
MNAIGWKWKLTSCLGGDGVSRIRNKTTLGLSPGIDFRFGWRADFVLPEVTGALGTEEPLFNMSSGRLEASLDRVEAIVTHSDYL

SEQ ID NO: 88566 - DNA, 1724 bp, Arabidopsis thaliana
  misc_feature (1)..(1724): Ceres Seq. ID no. 12710988
  misc_feature: MA Experiment ID: 108595 Result: Up-regulated in Transcription
  misc_feature: MA Experiment 108595 PARAMETER Experiment Name: At_Ler-pi_Ovule_cDNA_P Parameter: Plant Line Value: null
  misc_feature: MA Experiment ID: 20000111 Result: Up-regulated in Transcription
  misc_feature: MA Experiment 20000111 PARAMETER Experiment Name: At_42deg_Heat_cDNA_P Parameter: Temperature (deg C) Value: 42 vs. 22
  misc_feature: MA Experiment 20000111 PARAMETER Experiment Name: At_42deg_Heat_cDNA_P Parameter: Timepoint (hr) Value: 6
  misc_feature: MA Experiment 20000111 PARAMETER Experiment Name: At_42deg_Heat_cDNA_P Parameter: Tissue Value: Aerial
  misc_feature: MA Experiment ID: 20000437 Result: Up-regulated in Transcription
  misc_feature: MA Experiment 20000437 PARAMETER Experiment Name: At_Drought_P Parameter: Age (day) Value: 8
  misc_feature: MA Experiment 20000437 PARAMETER Experiment Name: At_Drought_P Parameter: Organism Value: A. thaliana
  misc_feature: MA Experiment 20000437 PARAMETER Experiment Name: At_Drought_P Parameter: Plant Line Value: WS
  misc_feature: MA Experiment 20000437 PARAMETER Experiment Name: At_Drought_P Parameter: Timepoint (hr) Value: 24
  misc_feature: MA Experiment 20000437 PARAMETER Experiment Name: At_Drought_P Parameter: Tissue Value: Whole Plant
  misc_feature: MA Experiment 20000437 PARAMETER Experiment Name: At_Drought_P Parameter: Treatment Value: Drought vs. No Drought
attcaacctctctacttcagtttctctgtccccatttttcatctgagagttaaaactgtaacctcaaaatctgagataaagtcaaaaaaaaaaccccagtttatgattctcattttctctttataatcgaaagcttcgatttttaacaaaacccagaatctgtgttcttgtttttttttttttttggtgagagttatcttttttttttttggaatattgggtgagaatctgagtaatgggatttacataaaaagattctatgtaaatactaaaataatctggaaattattaaatttccaaactttgtgttccattttgtggactcaaatttgtttataaagatctcaaatcagagagattgagacgaccaagaacaagcagaagaagaagaagaattgagagaatgtggtggtggtcttcttcaactaaaggtcgttcgaatctggagaggtttcttttaggaatcactcctaagcctccttccttctctcttcctcaggaacagggaaaggaggagattgagtatttcaggcttggtgatctctgggattgttatgatgagatgagtgcgtatggctttggcacacaggttgatttaaacaatggcgaaaccgttatgcagtactacgtcccgtacctatccgctatccaaatccacactaacaaacccgccttgctttccaggaaccagaatgaggtggctgaatctgagagtagcgagggttggagcgatagtgagagtgaaaagttgttgtcaaggtcaatgagcaatgattcaagcaaaacatgggatgctgtctctgaagattcggttttcgatccggatggttcaccgttgctgaaagatagacttggtaaccttgactttaagtacattgaaagagatcctccgcacaagcggattcccttaaccgacaagataaacgtattggtggagaaatatccgggactcatgaccttaaggagtgtcgacatgtctcctgcaagttggatggctgttgcgtggtacccgatataccacatcccaacctgcaggaacgagaaagatttgacgacaggcttcctaacttatcatactctatcttcgtcttttcaagataatgtggtggaaggagatcaaagcaacaacaatgaagaaacagagttttgtgaagattccgtaataaacaagagaatgccattgcctccgtttggtgtaacaacttacaaaatgcaaggagatctttgggggaagacggggtttgaccaggaccggttgctttatcttcaaagcgctgcggattcatggctgaaacagctcaatgttgatcaccatgactataacttcttccttaactcgagcttctaaagatcaatcgggtcgttcgtatgtttatccttctccaaaccttaaacaaaaaaaaaagacctcataaccctttttctttgttgttttcaagctccttttgtttctctgtgttttttgttctttttgtttttgtctggctcgttgtgttgttttaggtagcaaccgccatcgcggagttttttctccttttgcaagccaatcatggaagtttctaagaagaaaacagagcttttttttctttttttttaacggtgttgagaaaacaagaaagttgttttcttttcttgggtgagagatcatgtaaattgaccttgaacagaggactctgttttgtacttttctgtctaaaatatataaaaaaatctgtctttcttgt

SEQ ID NO: 88567 - protein, 314 aa, Arabidopsis thaliana
  peptide (1)..(314): Ceres Seq. ID no. 12710989
  misc_feature (12)..(309): Pfam Name: Protein of unknown function (DUF789) Pfam Description: Protein of unknown function (DUF789)
  misc_feature (1)..(314): Homolog of NCBI NO: 15219407 NR Description: hypothetical protein; protein id: At1g73210.1
  misc_feature (1)..(314): Homolog of NCBI NO: 27754726 NR Description: unknown protein [Arabidopsis thaliana]
  misc_feature (1)..(313): Homolog of NCBI NO: 18394539 NR Description: expressed protein; protein id: At1g17830.1, by cDNA: 37923. [Arabidopsis thaliana] >gi|25373434|pir||D86313
  misc_feature (1)..(313): Homolog of NCBI NO: 21593308 NR Description: unknown [Arabidopsis thaliana]
  misc_feature (9)..(309): Homolog of NCBI NO: 22328289 NR Description: hypothetical protein; protein id: At4g03420.1, by cDNA: gi_18650615, supported by cDNA: gi_20453246 [Arabidopsis >gi|18650616|gb|AAL75907.1| AT4g03420/F9H3_4 [Arabidopsis
  misc_feature (9)..(309): Homolog of NCBI NO: 25373431 NR Description: hypothetical protein AT4g03420 [imported] - thaliana >gi|4206196|gb|AAD11584.1|AAD11584 hypothetical protein thaliana] >gi|7270212|emb|CAB77827.1| hypothetical protein
  misc_feature (7)..(313): Homolog of NCBI NO: 18958013 NR Description: At1g03610/F21B7_13 [Arabidopsis thaliana]
  misc_feature (7)..(313): Homolog of NCBI NO: 18379117 NR Description: expressed protein; protein id: At1g03610.1, by cDNA: 123030., supported by cDNA: gi_18958012 [Arabidopsis
  misc_feature (7)..(313): Homolog of NCBI NO: 9280648 NR Description: F21B7.22 [Arabidopsis thaliana]
  misc_feature (4)..(310): Homolog of NCBI NO: 37535654 NR Description: unknown protein [Oryza sativa (japonica
MWWWSSSTKGRSNLERFLLGITPKPPSFSLPQEQGKEEIEYFRLGDLWDCYDEMSAYGFGTQVDLNNGETVMQYYVPYLSAIQIHTNKPALLSRNQNEVAESESSEGWSDSESEKLLSRSMSNDSSKTWDAVSEDSVFDPDGSPLLKDRLGNLDFKYIERDPPHKRIPLTDKINVLVEKYPGLMTLRSVDMSPASWMAVAWYPIYHIPTCRNEKDLTTGFLTYHTLSSSFQDNVVEGDQSNNNEETEFCEDSVINKRMPLPPFGVTTYKMQGDLWGKTGFDQDRLLYLQSAADSWLKQLNVDHHDYNFFLNSSF

SEQ ID NO: 88568 - protein, 261 aa, Arabidopsis thaliana; identical to SEQ ID NO: 42859
  peptide (1)..(261): Ceres Seq. ID no. 12710990
  misc_feature (1)..(256): Pfam Name: Protein of unknown function (DUF789) Pfam Description: Protein of unknown function (DUF789)
  misc_feature (1)..(261): Homolog of NCBI NO: 15219407 NR Description: hypothetical protein; protein id: At1g73210.1
  misc_feature (1)..(261): Homolog of NCBI NO: 27754726 NR Description: unknown protein [Arabidopsis thaliana]
  misc_feature (1)..(260): Homolog of NCBI NO: 18394539 NR Description: expressed protein; protein id: At1g17830.1, by cDNA: 37923. [Arabidopsis thaliana] >gi|25373434|pir||D86313
  misc_feature (1)..(260): Homolog of NCBI NO: 21593308 NR Description: unknown [Arabidopsis thaliana]
  misc_feature (1)..(256): Homolog of NCBI NO: 22328289 NR Description: hypothetical protein; protein id: At4g03420.1, by cDNA: gi_18650615, supported by cDNA: gi_20453246 [Arabidopsis >gi|18650616|gb|AAL75907.1| AT4g03420/F9H3_4 [Arabidopsis
  misc_feature (1)..(256): Homolog of NCBI NO: 25373431 NR Description: hypothetical protein AT4g03420 [imported] - thaliana >gi|4206196|gb|AAD11584.1|AAD11584 hypothetical protein thaliana] >gi|7270212|emb|CAB77827.1| hypothetical protein
  misc_feature (1)..(260): Homolog of NCBI NO: 18958013 NR Description: At1g03610/F21B7_13 [Arabidopsis thaliana]
  misc_feature (1)..(260): Homolog of NCBI NO: 18379117 NR Description: expressed protein; protein id: At1g03610.1, by cDNA: 123030., supported by cDNA: gi_18958012 [Arabidopsis
  misc_feature (1)..(260): Homolog of NCBI NO: 9280648 NR Description: F21B7.22 [Arabidopsis thaliana]
  misc_feature (1)..(257): Homolog of NCBI NO: 37535654 NR Description: unknown protein [Oryza sativa (japonica

SEQ ID NO: 88569 - protein, 243 aa, Arabidopsis thaliana; identical to SEQ ID NO: 42860
  peptide (1)..(243): Ceres Seq. ID no. 12710991
  misc_feature (1)..(238): Pfam Name: Protein of unknown function (DUF789) Pfam Description: Protein of unknown function (DUF789)
  misc_feature (1)..(243): Homolog of NCBI NO: 15219407 NR Description: hypothetical protein; protein id: At1g73210.1
  misc_feature (1)..(243): Homolog of NCBI NO: 27754726 NR Description: unknown protein [Arabidopsis thaliana]
  misc_feature (1)..(242): Homolog of NCBI NO: 18394539 NR Description: expressed protein; protein id: At1g17830.1, by cDNA: 37923. [Arabidopsis thaliana] >gi|25373434|pir||D86313
  misc_feature (1)..(242): Homolog of NCBI NO: 21593308 NR Description: unknown [Arabidopsis thaliana]
  misc_feature (1)..(238): Homolog of NCBI NO: 22328289 NR Description: hypothetical protein; protein id: At4g03420.1, by cDNA: gi_18650615, supported by cDNA: gi_20453246 [Arabidopsis >gi|18650616|gb|AAL75907.1| AT4g03420/F9H3_4 [Arabidopsis
  misc_feature (1)..(238): Homolog of NCBI NO: 25373431 NR Description: hypothetical protein AT4g03420 [imported] - thaliana >gi|4206196|gb|AAD11584.1|AAD11584 hypothetical protein thaliana] >gi|7270212|emb|CAB77827.1| hypothetical protein
  misc_feature (1)..(242): Homolog of NCBI NO: 18958013 NR Description: At1g03610/F21B7_13 [Arabidopsis thaliana]
  misc_feature (1)..(242): Homolog of NCBI NO: 18379117 NR Description: expressed protein; protein id: At1g03610.1, by cDNA: 123030., supported by cDNA: gi_18958012 [Arabidopsis
  misc_feature (1)..(242): Homolog of NCBI NO: 9280648 NR Description: F21B7.22 [Arabidopsis thaliana]
  misc_feature (1)..(239): Homolog of NCBI NO: 37535654 NR Description: unknown protein [Oryza sativa (japonica

SEQ ID NO: 88570 - DNA, 894 bp, Arabidopsis thaliana
  misc_feature (1)..(894): Ceres Seq. ID no. 12710992
  misc_feature: MA Experiment ID: 108434 Result: Up-regulated in Transcription
  misc_feature: MA Experiment 108434 PARAMETER Experiment Name: At_Root_Tips_cDNA_P Parameter: Tissue Value: Root Tips
  misc_feature: MA Experiment ID: 108462 Result: Down-regulated in Transcription
  misc_feature: MA Experiment 108462 PARAMETER Experiment Name: At_Germinating_Seeds_cDNA_P Parameter: Age (day) Value: 2 vs. 0
  misc_feature: MA Experiment 108462 PARAMETER Experiment Name: At_Germinating_Seeds_cDNA_P Parameter: Tissue Value: Germinating Seeds
  misc_feature: MA Experiment ID: 108463 Result: Down-regulated in Transcription
  misc_feature: MA Experiment 108463 PARAMETER Experiment Name: At_Germinating_Seeds_cDNA_P Parameter: Age (day) Value: 3 vs. 0
  misc_feature: MA Experiment 108463 PARAMETER Experiment Name: At_Germinating_Seeds_cDNA_P Parameter: Tissue Value: Germinating Seeds
  misc_feature: MA Experiment ID: 108464 Result: Down-regulated in Transcription
  misc_feature: MA Experiment 108464 PARAMETER Experiment Name: At_Germinating_Seeds_cDNA_P Parameter: Age (day) Value: 4 vs. 0
  misc_feature: MA Experiment 108464 PARAMETER Experiment Name: At_Germinating_Seeds_cDNA_P Parameter: Tissue Value: Germinating Seeds
  misc_feature: MA Experiment ID: 108573 Result: Down-regulated in Transcription
  misc_feature: MA Experiment 108573 PARAMETER Experiment Name: At_Drought_cDNA_P Parameter: Timepoint (hr) Value: 6
  misc_feature: MA Experiment 108573 PARAMETER Experiment Name: At_Drought_cDNA_P Parameter: Tissue Value: Aerial
  misc_feature: MA Experiment 108573 PARAMETER Experiment Name: At_Drought_cDNA_P Parameter: Treatment Value: Drought vs. No Drought
  misc_feature: MA Experiment ID: 20000234 Result: Up-regulated in Transcription
  misc_feature: MA Experiment 20000234 PARAMETER Experiment Name: At_Siliques_P Parameter: Age (day) Value: 21
  misc_feature: MA Experiment 20000234 PARAMETER Experiment Name: At_Siliques_P Parameter: Organism Value: A. thaliana
  misc_feature: MA Experiment 20000234 PARAMETER Experiment Name: At_Siliques_P Parameter: Plant Line Value: WS
  misc_feature: MA Experiment 20000234 PARAMETER Experiment Name: At_Siliques_P Parameter: Tissue Value: Less Than 5mm Siliques vs. Whole Plant
  misc_feature: MA Experiment ID: 20000437 Result: Down-regulated in Transcription
  misc_feature: MA Experiment 20000437 PARAMETER Experiment Name: At_Drought_P Parameter: Age (day) Value: 8
  misc_feature: MA Experiment 20000437 PARAMETER Experiment Name: At_Drought_P Parameter: Organism Value: A. thaliana
  misc_feature: MA Experiment 20000437 PARAMETER Experiment Name: At_Drought_P Parameter: Plant Line Value: WS
  misc_feature: MA Experiment 20000437 PARAMETER Experiment Name: At_Drought_P Parameter: Timepoint (hr) Value: 24
  misc_feature: MA Experiment 20000437 PARAMETER Experiment Name: At_Drought_P Parameter: Tissue Value: Whole Plant
  misc_feature: MA Experiment 20000437 PARAMETER Experiment Name: At_Drought_P Parameter: Treatment Value: Drought vs. No Drought
  misc_feature: MA Experiment ID: 20000496 Result: Up-regulated in Transcription
  misc_feature: MA Experiment 20000496 PARAMETER Experiment Name: At_Guard_Cells_P Parameter: Harvest Date Value: 7/19/2002
  misc_feature: MA Experiment 20000496 PARAMETER Experiment Name: At_Guard_Cells_P Parameter: Organism Value: Canola
  misc_feature: MA Experiment 20000496 PARAMETER Experiment Name: At_Guard_Cells_P Parameter: Tissue Value: Guard Cells vs. Leaves
  misc_feature: MA Experiment ID: 20000794 Result: Down-regulated in Transcription
  misc_feature: MA Experiment 20000794 PARAMETER Experiment Name: At_Petals_P Parameter: Age (day) Value: 23-25 days
  misc_feature: MA Experiment 20000794 PARAMETER Experiment Name: At_Petals_P Parameter: Plant Line Value: WS
  misc_feature: MA Experiment 20000794 PARAMETER Experiment Name: At_Petals_P Parameter: Tissue Value: Petals vs. Whole plant
  misc_feature: MA Experiment ID: 20001558 Result: Up-regulated in Transcription
  misc_feature: MA Experiment 20001558 PARAMETER Experiment Name: At_Drought_Soil_Dry_P Parameter: Age (day) Value: 27
  misc_feature: MA Experiment 20001558 PARAMETER Experiment Name: At_Drought_Soil_Dry_P Parameter: Organism Value: A. thaliana
  misc_feature: MA Experiment 20001558 PARAMETER Experiment Name: At_Drought_Soil_Dry_P Parameter: Plant Line Value: WS
  misc_feature: MA Experiment 20001558 PARAMETER Experiment Name: At_Drought_Soil_Dry_P Parameter: Post Timepoint (hr) Value: 6
  misc_feature: MA Experiment 20001558 PARAMETER Experiment Name: At_Drought_Soil_Dry_P Parameter: Post-Treatment Value: Re-Water vs. No Drought
  misc_feature: MA Experiment 20001558 PARAMETER Experiment Name: At_Drought_Soil_Dry_P Parameter: Timepoint (day) Value: 13
  misc_feature: MA Experiment 20001558 PARAMETER Experiment Name: At_Drought_Soil_Dry_P Parameter: Treatment Value: Drought vs. No Drought
  misc_feature: MA Experiment ID: 20001757 Result: Up-regulated in Transcription
  misc_feature: MA Experiment 20001757 PARAMETER Experiment Name: At_50mM_NH4NO3_L-to-H_P Parameter: Timepoint (hr) Value: 6
  misc_feature: MA Experiment 20001757 PARAMETER Experiment Name: At_50mM_NH4NO3_L-to-H_P Parameter: Tissue Value: Leaf
  misc_feature: MA Experiment 20001757 PARAMETER Experiment Name: At_50mM_NH4NO3_L-to-H_P Parameter: Treatment Value: 50mM NH4NO3 vs 100mM Mannitol
gcatttacttaaagggcaaaaccctccagcgccgcttggatctctctctcctctgttctctcttcccttatcttcttcttatacccttcgaccaacgaagaaccctagaaatcgattaacaagatgaatagggaaaagttgatgaagatggctaacactgtccgcactggcggaaaggggacagtaagaagaaagaagaaggctgttcacaagaccactacaaccgatgacaagaggctccagagcactcttaagagagttggagtcaattccattcccgccattgaagaagttaacatttttaaggatgatgtagtcattcagttcattaaccctaaagttcaagcttcaattgctgctaacacatgggttgtgagtggtacaccacagacgaaaaaattgcaagacattcttcctcagattatcagccaacttggaccagataacttggacaacctgaagaagctagcagagcaattccagaaacaagctccaggtgcaggtgatgtcccagcaacaatccaagaagaggacgatgatgatgatgtcccagatcttgtagtgggagagactttcgagacccctgctactgaagaggctcccaaagctgctgcttcttagaggaggaggaagaagaaggagaagagctcacctgcaaaacccatcataaaaatgtttgtcgctcgacctcttctgagcactgtcagattcttgttttctctaatgcttgcgaacagaaagacttggttttattatcacttgatgctttttggtccgaacagcaattttccttttattaaggttagatcgctttttgtttaccacctgttcaaatgagtactactatgtcctgtcgcttcatacacttcttgcaacacagtcctttgttttgag

SEQ ID NO: 88571 - protein, 165 aa, Arabidopsis thaliana; identical to SEQ ID NO: 41188
  peptide (1)..(165): Ceres Seq. ID no. 12710993
  misc_feature (34)..(92): Pfam Name: NAC domain Pfam Description: NAC domain
  misc_feature (1)..(165): Homolog of NCBI NO: 15219413 NR Description: putative transcription factor BTF3 (RNA B transcription factor 3); protein id: At1g73230.1, supported by
  misc_feature (1)..(165): Homolog of NCBI NO: 21537065 NR Description: putative transcription factor BTF3 (RNA
  misc_feature (1)..(165): Homolog of NCBI NO: 15220876 NR Description: transcription factor, putative; protein id: supported by cDNA: 1105., supported by cDNA: gi_12083221, by cDNA: gi_15027872, supported by cDNA: gi_16323126, supported
  misc_feature (1)..(165): Homolog of NCBI NO: 16323127 NR Description: At1g17880/F2H15_10 [Arabidopsis thaliana]
  misc_feature (1)..(164): Homolog of NCBI NO: 33945882 NR Description: transcription factor homolog BTF3-like protein
  misc_feature (1)..(165): Homolog of NCBI NO: 24431603 NR Description: Putative transcription factor [Oryza sativa
  misc_feature (1)..(165): Homolog of NCBI NO: 29367567 NR Description: putative transcription factor BTF3 [Oryza sativa
  misc_feature (1)..(158): Homolog of NCBI NO: 37535464 NR Description: putative transcription factor [Oryza sativa
  misc_feature (1)..(157): Homolog of NCBI NO: 27573340 NR Description: putative transcription factor [Oryza sativa
  misc_feature (9)..(164): Homolog of NCBI NO: 25956272 NR Description: unnamed protein product [Lotus japonicus]

SEQ ID NO: 88572 - protein, 159 aa, Arabidopsis thaliana; identical to SEQ ID NO: 41189
  peptide (1)..(159): Ceres Seq. ID no. 12710994
  misc_feature (28)..(86): Pfam Name: NAC domain Pfam Description: NAC domain
  misc_feature (1)..(159): Homolog of NCBI NO: 15219413 NR Description: putative transcription factor BTF3 (RNA B transcription factor 3); protein id: At1g73230.1, supported by
  misc_feature (1)..(159): Homolog of NCBI NO: 21537065 NR Description: putative transcription factor BTF3 (RNA
  misc_feature (1)..(159): Homolog of NCBI NO: 15220876 NR Description: transcription factor, putative; protein id: supported by cDNA: 1105., supported by cDNA: gi_12083221, by cDNA: gi_15027872, supported by cDNA: gi_16323126, supported
  misc_feature (1)..(159): Homolog of NCBI NO: 16323127 NR Description: At1g17880/F2H15_10 [Arabidopsis thaliana]
  misc_feature (1)..(158): Homolog of NCBI NO: 33945882 NR Description: transcription factor homolog BTF3-like protein
  misc_feature (1)..(159): Homolog of NCBI NO: 24431603 NR Description: Putative transcription factor [Oryza sativa
  misc_feature (1)..(159): Homolog of NCBI NO: 29367567 NR Description: putative transcription factor BTF3 [Oryza sativa
  misc_feature (1)..(152): Homolog of NCBI NO: 37535464 NR Description: putative transcription factor [Oryza sativa
  misc_feature (1)..(151): Homolog of NCBI NO: 27573340 NR Description: putative transcription factor [Oryza sativa
  misc_feature (3)..(158): Homolog of NCBI NO: 25956272 NR Description: unnamed protein product [Lotus japonicus]

SEQ ID NO: 88573 - protein, 157 aa, Arabidopsis thaliana; identical to SEQ ID NO: 41190
  peptide (1)..(157): Ceres Seq. ID no. 12710995
  misc_feature (26)..(84): Pfam Name: NAC domain Pfam Description: NAC domain
  misc_feature (1)..(157): Homolog of NCBI NO: 15219413 NR Description: putative transcription factor BTF3 (RNA B transcription factor 3); protein id: At1g73230.1, supported by
  misc_feature (1)..(157): Homolog of NCBI NO: 21537065 NR Description: putative transcription factor BTF3 (RNA
  misc_feature (1)..(157): Homolog of NCBI NO: 15220876 NR Description: transcription factor, putative; protein id: supported by cDNA: 1105., supported by cDNA: gi_12083221, by cDNA: gi_15027872, supported by cDNA: gi_16323126, supported
  misc_feature (1)..(157): Homolog of NCBI NO: 16323127 NR Description: At1g17880/F2H15_10 [Arabidopsis thaliana]
  misc_feature (1)..(156): Homolog of NCBI NO: 33945882 NR Description: transcription factor homolog BTF3-like protein
  misc_feature (1)..(157): Homolog of NCBI NO: 24431603 NR Description: Putative transcription factor [Oryza sativa
  misc_feature (1)..(157): Homolog of NCBI NO: 29367567 NR Description: putative transcription factor BTF3 [Oryza sativa
  misc_feature (1)..(150): Homolog of NCBI NO: 37535464 NR Description: putative transcription factor [Oryza sativa
  misc_feature (1)..(149): Homolog of NCBI NO: 27573340 NR Description: putative transcription factor [Oryza sativa
  misc_feature (1)..(156): Homolog of NCBI NO: 25956272 NR Description: unnamed protein product [Lotus japonicus]

SEQ ID NO: 88574 - DNA, 1308 bp, Arabidopsis thaliana
  misc_feature (1)..(1308): Ceres Seq. ID no. 12710999
  misc_feature: MA Experiment ID: 20000328 Result: Down-regulated in Transcription
  misc_feature: MA Experiment 20000328 PARAMETER Experiment Name: At_42deg_Heat_Sub_P Parameter: Age (day) Value: 14
  misc_feature: MA Experiment 20000328 PARAMETER Experiment Name: At_42deg_Heat_Sub_P Parameter: Organism Value: A. thaliana
  misc_feature: MA Experiment 20000328 PARAMETER Experiment Name: At_42deg_Heat_Sub_P Parameter: Plant Line Value: WS
  misc_feature: MA Experiment 20000328 PARAMETER Experiment Name: At_42deg_Heat_Sub_P Parameter: Temperature (deg C) Value: 42 vs. 22
  misc_feature: MA Experiment 20000328 PARAMETER Experiment Name: At_42deg_Heat_Sub_P Parameter: Timepoint (hr) Value: 6
  misc_feature: MA Experiment 20000328 PARAMETER Experiment Name: At_42deg_Heat_Sub_P Parameter: Tissue Value: Aerial
  misc_feature: MA Experiment ID: 20000440 Result: Up-regulated in Transcription
  misc_feature: MA Experiment 20000440 PARAMETER Experiment Name: At_Closed-Flower__Sub_P Parameter: Tissue Value: Closed Flower vs. Whole Plant
atggcaaacaacaacgtttactctgttctgaagtcgctgcttctgcttcttcaccttgtattcttgagtaagcaacatgttgactctgcctcaatcgtcaaattccttcctggttttgaaggccctcttccctttgagctcgaaaccgggtatattggtgttggtgaggaagaggaggtgcaactgttctactacttcatcaagtctgagaggaacccaaaagaagaccctcttcttctctggctaactggaggacctggctgctctgccatctctggccttctttatcagaatgggcctctggctatgaagctcgatgtttacaatggaactctcccttctttggtctctactacatattcttggacaaagacttcgagcatgatattcttggaccagcccgttggaactggcttctcctattcaagaacgcaactttttaataaacctagtgatacaggagaagccaaacggatccatgagtttcttcaaaagtggctaggcaagcatcaagagttttcctccaaccctttctatgttggcggagattcctattccggtctggttgttccagctaccgttcaagaaatttcaaaaggaaattgtcaatgctgcaatcgtccaataaatcttcagggctatgtgctcggtaacccgttaacagactgtgtatatgattgtaactaccgcgttccatttgctcataaaatggcactgatctctgatgaactctacgagtcgttgaagagaacctgcagaggagaatatgtaaatgttcatccacatgacacagaatgcttgaaattcgttgaagaatttaacaagttaacaaacagagtatgcgaacgacatatattacattcatgttgcgaaactgaaactccaagttgctattcttataggtttatgctaactacctactgggccaatgacgaaaccgtacgcaaagctcttcaaatcaataaggaggatctacgattgcaggagagtataggggaatggacacgatgttatcgcggtattccttacaatcatgacattaaaagtagcgtaccttaccatatgaataacagcatcgatggttatcgttctctcatctacagtggtgatcatgatatccaagtacctttccttgggactcaagcttggataagatcgctcaactattctatcattgatgactggaggccatggatgatcaaagatcaaatcgctgggtatatacggggaggtgggcacacagcagagtttacaccaaaggaaacctttatgatgttccaaaggtggatcaatggccaacctctgtga

SEQ ID NO: 88575 - protein, 435 aa, Arabidopsis thaliana
  peptide (1)..(435): Ceres Seq. ID no. 12711000
  misc_feature (37)..(432): Pfam Name: Serine carboxypeptidase Pfam Description: Serine carboxypeptidase
  misc_feature (1)..(435): Homolog of NCBI NO: 15219435 NR Description: putative serine carboxypeptidase; protein id: [Arabidopsis thaliana] >gi|12324317|gb|AAG52126.1|AC010556_8
  misc_feature (1)..(275): Homolog of NCBI NO: 25289774 NR Description: probable serine carboxypeptidase T9L24.47 - Arabidopsis thaliana >gi|11120810|gb|AAG30990.1|AC012396_26
  misc_feature (299)..(435): Homolog of NCBI NO: 25289774 NR Description: probable serine carboxypeptidase T9L24.47 - Arabidopsis thaliana >gi|11120810|gb|AAG30990.1|AC012396_26
  misc_feature (1)..(435): Homolog of NCBI NO: 15219433 NR Description: putative serine carboxypeptidase; protein id: [Arabidopsis thaliana] >gi|25289779|pir||C96759 protein serine
  misc_feature (1)..(435): Homolog of NCBI NO: 15219429 NR Description: putative serine carboxypeptidase; protein id: [Arabidopsis thaliana] >gi|25289788|pir||A96759 protein serine
  misc_feature (1)..(435): Homolog of NCBI NO: 22327401 NR Description: serine carboxypeptidase; protein id: At5g36180.1, by cDNA: gi_20260289 [Arabidopsis thaliana] serine carboxypeptidase [Arabidopsis thaliana]
  misc_feature (1)..(435): Homolog of NCBI NO: 8777303 NR Description: serine carboxypeptidase [Arabidopsis thaliana]
  misc_feature (4)..(435): Homolog of NCBI NO: 15219431 NR Description: putative serine carboxypeptidase; protein id: [Arabidopsis thaliana] >gi|25289778|pir||B96759 protein serine
  misc_feature (1)..(435): Homolog of NCBI NO: 15219427 NR Description: putative serine carboxypeptidase; protein id: [Arabidopsis thaliana] >gi|25289777|pir||H96758 protein serine
  misc_feature (1)..(435): Homolog of NCBI NO: 15228300 NR Description: putative glucose acyltransferase; protein id: [Arabidopsis thaliana] >gi|8567775|gb|AAF76347.1| glucose putative [Arabidopsis thaliana]
MANNNVYSVLKSLLLLLHLVFLSKQHVDSASIVKFLPGFEGPLPFELETGYIGVGEEEEVQLFYYFIKSERNPKEDPLLLWLTGGPGCSAISGLLYQNGPLAMKLDVYNGTLPSLVSTTYSWTKTSSMIFLDQPVGTGFSYSRTQLFNKPSDTGEAKRIHEFLQKWLGKHQEFSSNPFYVGGDSYSGLVVPATVQEISKGNCQCCNRPINLQGYVLGNPLTDCVYDCNYRVPFAHKMALISDELYESLKRTCRGEYVNVHPHDTECLKFVEEFNKLTNRVCERHILHSCCETETPSCYSYRFMLTTYWANDETVRKALQINKEDLRLQESIGEWTRCYRGIPYNHDIKSSVPYHMNNSIDGYRSLIYSGDHDIQVPFLGTQAWIRSLNYSIIDDWRPWMIKDQIAGYIRGGGHTAEFTPKETFMMFQRWINGQPL

SEQ ID NO: 88576 - protein, 333 aa, Arabidopsis thaliana
  peptide (1)..(333): Ceres Seq. ID no. 12711001
  misc_feature (1)..(330): Pfam Name: Serine carboxypeptidase Pfam Description: Serine carboxypeptidase
  misc_feature (1)..(333): Homolog of NCBI NO: 15219435 NR Description: putative serine carboxypeptidase; protein id: [Arabidopsis thaliana] >gi|12324317|gb|AAG52126.1|AC010556_8
  misc_feature (1)..(173): Homolog of NCBI NO: 25289774 NR Description: probable serine carboxypeptidase T9L24.47 - Arabidopsis thaliana >gi|11120810|gb|AAG30990.1|AC012396_26
  misc_feature (197)..(333): Homolog of NCBI NO: 25289774 NR Description: probable serine carboxypeptidase T9L24.47 - Arabidopsis thaliana >gi|11120810|gb|AAG30990.1|AC012396_26
  misc_feature (1)..(333): Homolog of NCBI NO: 15219433 NR Description: putative serine carboxypeptidase; protein id: [Arabidopsis thaliana] >gi|25289779|pir||C96759 protein serine
  misc_feature (1)..(333): Homolog of NCBI NO: 15219429 NR Description: putative serine carboxypeptidase; protein id: [Arabidopsis thaliana] >gi|25289788|pir||A96759 protein serine
  misc_feature (1)..(333): Homolog of NCBI NO: 22327401 NR Description: serine carboxypeptidase; protein id: At5g36180.1, by cDNA: gi_20260289 [Arabidopsis thaliana] serine carboxypeptidase [Arabidopsis thaliana]
  misc_feature (1)..(333): Homolog of NCBI NO: 8777303 NR Description: serine carboxypeptidase [Arabidopsis thaliana]
  misc_feature (1)..(333): Homolog of NCBI NO: 15219431 NR Description: putative serine carboxypeptidase; protein id: [Arabidopsis thaliana] >gi|25289778|pir||B96759 protein serine
  misc_feature (1)..(333): Homolog of NCBI NO: 15219427 NR Description: putative serine carboxypeptidase; protein id: [Arabidopsis thaliana] >gi|25289777|pir||H96758 protein serine
  misc_feature (1)..(333): Homolog of NCBI NO: 15228300 NR Description: putative glucose acyltransferase; protein id: [Arabidopsis thaliana] >gi|8567775|gb|AAF76347.1| glucose putative [Arabidopsis thaliana]
MKLDVYNGTLPSLVSTTYSWTKTSSMIFLDQPVGTGFSYSRTQLFNKPSDTGEAKRIHEFLQKWLGKHQEFSSNPFYVGGDSYSGLVVPATVQEISKGNCQCCNRPINLQGYVLGNPLTDCVYDCNYRVPFAHKMALISDELYESLKRTCRGEYVNVHPHDTECLKFVEEFNKLTNRVCERHILHSCCETETPSCYSYRFMLTTYWANDETVRKALQINKEDLRLQESIGEWTRCYRGIPYNHDIKSSVPYHMNNSIDGYRSLIYSGDHDIQVPFLGTQAWIRSLNYSIIDDWRPWMIKDQIAGYIRGGGHTAEFTPKETFMMFQRWINGQPL

SEQ ID NO: 88577 - protein, 308 aa, Arabidopsis thaliana
  peptide (1)..(308): Ceres Seq. ID no. 12711002
  misc_feature (1)..(305): Pfam Name: Serine carboxypeptidase Pfam Description: Serine carboxypeptidase
  misc_feature (1)..(308): Homolog of NCBI NO: 15219435 NR Description: putative serine carboxypeptidase; protein id: [Arabidopsis thaliana] >gi|12324317|gb|AAG52126.1|AC010556_8
  misc_feature (1)..(148): Homolog of NCBI NO: 25289774 NR Description: probable serine carboxypeptidase T9L24.47 - Arabidopsis thaliana >gi|11120810|gb|AAG30990.1|AC012396_26
  misc_feature (172)..(308): Homolog of NCBI NO: 25289774 NR Description: probable serine carboxypeptidase T9L24.47 - Arabidopsis thaliana >gi|11120810|gb|AAG30990.1|AC012396_26
  misc_feature (1)..(308): Homolog of NCBI NO: 15219433 NR Description: putative serine carboxypeptidase; protein id: [Arabidopsis thaliana] >gi|25289779|pir||C96759 protein serine
  misc_feature (1)..(308): Homolog of NCBI NO: 15219429 NR Description: putative serine carboxypeptidase; protein id: [Arabidopsis thaliana] >gi|25289788|pir||A96759 protein serine
  misc_feature (1)..(308): Homolog of NCBI NO: 22327401 NR Description: serine carboxypeptidase; protein id: At5g36180.1, by cDNA: gi_20260289 [Arabidopsis thaliana] serine carboxypeptidase [Arabidopsis thaliana]
  misc_feature (1)..(308): Homolog of NCBI NO: 8777303 NR Description: serine carboxypeptidase [Arabidopsis thaliana]
  misc_feature (1)..(308): Homolog of NCBI NO: 15219431 NR Description: putative serine carboxypeptidase; protein id: [Arabidopsis thaliana] >gi|25289778|pir||B96759 protein serine
  misc_feature (1)..(308): Homolog of NCBI NO: 15219427 NR Description: putative serine carboxypeptidase; protein id: [Arabidopsis thaliana] >gi|25289777|pir||H96758 protein serine
  misc_feature (1)..(308): Homolog of NCBI NO: 15228300 NR Description: putative glucose acyltransferase; protein id: [Arabidopsis thaliana] >gi|8567775|gb|AAF76347.1| glucose putative [Arabidopsis thaliana]
MIFLDQPVGTGFSYSRTQLFNKPSDTGEAKRIHEFLQKWLGKHQEFSSNPFYVGGDSYSGLVVPATVQEISKGNCQCCNRPINLQGYVLGNPLTDCVYDCNYRVPFAHKMALISDELYESLKRTCRGEYVNVHPHDTECLKFVEEFNKLTNRVCERHILHSCCETETPSCYSYRFMLTTYWANDETVRKALQINKEDLRLQESIGEWTRCYRGIPYNHDIKSSVPYHMNNSIDGYRSLIYSGDHDIQVPFLGTQAWIRSLNYSIIDDWRPWMIKDQIAGYIRGGGHTAEFTPKETFMMFQRWINGQPL

SEQ ID NO: 88578 - DNA, 1563 bp, Arabidopsis thaliana
  misc_feature (1)..(1563): Ceres Seq. ID no. 12711003
  misc_feature: MA Experiment ID: 20000185 Result: Up-regulated in Transcription
  misc_feature: MA Experiment 20000185 PARAMETER Experiment Name: At_Roots__P Parameter: Age (day) Value: 7 vs. 21
  misc_feature: MA Experiment 20000185 PARAMETER Experiment Name: At_Roots__P Parameter: Organism Value: A. thaliana
  misc_feature: MA Experiment 20000185 PARAMETER Experiment Name: At_Roots__P Parameter: Tissue Value: Roots vs. Whole Plant
  misc_feature: MA Experiment ID: 20000437 Result: Down-regulated in Transcription
  misc_feature: MA Experiment 20000437 PARAMETER Experiment Name: At_Drought_P Parameter: Age (day) Value: 8
  misc_feature: MA Experiment 20000437 PARAMETER Experiment Name: At_Drought_P Parameter: Organism Value: A. thaliana
  misc_feature: MA Experiment 20000437 PARAMETER Experiment Name: At_Drought_P Parameter: Plant Line Value: WS
  misc_feature: MA Experiment 20000437 PARAMETER Experiment Name: At_Drought_P Parameter: Timepoint (hr) Value: 24
  misc_feature: MA Experiment 20000437 PARAMETER Experiment Name: At_Drought_P Parameter: Tissue Value: Whole Plant
  misc_feature: MA Experiment 20000437 PARAMETER Experiment Name: At_Drought_P Parameter: Treatment Value: Drought vs. No Drought
atggcggaatctgcaggagaatcctataggcttctctctgtttcttcatcaaccacatttcttgccttcataatcatcttcttacttgcgggtatagcaagaagaaagagaagagcgcctcacaggctgcctccgggaagcagaggatggcctttgatcggagataccttcgcttggctcaacgccgtcgctggttctcatccttcaagcttcgtcgagaaacaaataaaaaagttcgtctctttgctatgctctgttttgttattaatactcaagaggcctgataatagtggttttaatgaaattaggtatgggaggatattctcgtgtagcttgtttgggaaatgggcagtggtatcagcagacccggattttaaccggtttataatgcagaacgaaggaaagctatttcagtcaagttatccaaagtctttcagggatttggttgggaaagatggagtgatcacagtgcatggtgatcagcagagacggcttcactcgattgcatcgagcatgatgcgtcatgaccagctcaagactcattttcttgaggttattcccgtcgttatgctccagacactgagtaatttcaaggacggtgaagtcgtgcttctccaagatatctgcagaaaggttgccattcatcttatggttaaccaacttctcggtgtgtcgagcgaatcagaagtcgatgaaatgtctcagcttttctctgattttgttgatggatgtctctctgttcctattgacttgcctggtttcacatacaacaaagcaatgaaggcacgaaaggagatcataaggaagataaacaagacgatagaaaagcggttgcaaaacaaagcagcatcagatactgctggtaatggtgtacttggaagattgcttgaagaagaaagtttaccaaacgaatcaatggcagattttatcatcaatctactgtttgccggaaatgaaacaacctcaaaaacaatgctgtttgcggtttacttcctcactcattgtcctaaggccatgacccaactcctggaggaacatgataggctcgcgggtggaatgttaacatggcaagattacaagacaatggacttcactcaatgcgtaatagatgaaacactcaggcttggtggaattgcgatatggcttatgagagaggccaaagaagatgtctcatatcaagattatgtcattcccaagggatgcttcgtagttccgtttctctcggcagtgcacttagacgagagctattacaaagaaagtctctccttcaatccatggcgatggcttgaccctgaaactcagcaaaagaggaattggagaacgagccctttttattgcccatttggtggaggaactcggttttgcccaggagcagaactggctcgccttcaaattgctctctttctgcattacttcatcaccacatataagtcagtacatgttatgcttctgaagtggacacaacttaaggaagatcgtatctccttcttcccttcggctcgtctagtgaatggcttcaaaatccagttgaacagacgagacagtgatcctccgaatcaataa

SEQ ID NO: 88579 - protein, 520 aa, Arabidopsis thaliana
  peptide (1)..(520): Ceres Seq. ID no. 12711004
  misc_feature (230)..(510): Pfam Name: Cytochrome P450 Pfam Description: Cytochrome P450
  misc_feature (1)..(520): Homolog of NCBI NO: 15219454 NR Description: steroid 22-alpha-hydroxylase, putative; protein
  misc_feature (103)..(514): Homolog of NCBI NO: 15239203 NR Description: cytochrome p450, putative; protein id: supported by cDNA: 36334., supported by cDNA: gi_14596098, by cDNA: gi_15450716, supported by cDNA: gi_17380617, supported
  misc_feature (20)..(111): Homolog of NCBI NO: 15239203 NR Description: cytochrome p450, putative; protein id: supported by cDNA: 36334., supported by cDNA: gi_14596098, by cDNA: gi_15450716, supported by cDNA: gi_17380617, supported
  misc_feature (103)..(516): Homolog of NCBI NO: 9587211 NR Description: cytochrome P450 [Vigna radiata]
  misc_feature (14)..(114): Homolog of NCBI NO: 9587211 NR Description: cytochrome P450 [Vigna radiata]
  misc_feature (31)..(516): Homolog of NCBI NO: 34902330 NR Description: Putative steroid 22-alpha-hydroxylase [Oryza
  misc_feature (93)..(512): Homolog of NCBI NO: 18400142 NR Description: cytochrome P450, putative; protein id: supported by cDNA: gi_14971016 [Arabidopsis thaliana] CYP90D [Arabidopsis thaliana] >gi|28393374|gb|AAO42111.1|
  misc_feature (42)..(75): Homolog of NCBI NO: 18400142 NR Description: cytochrome P450, putative; protein id: supported by cDNA: gi_14971016 [Arabidopsis thaliana] CYP90D [Arabidopsis thaliana] >gi|28393374|gb|AAO42111.1|
  misc_feature (291)..(512): Homolog of NCBI NO: 15229822 NR Description: steroid 22-alpha-hydroxylase (DWF4); protein id:
  misc_feature (103)..(277): Homolog of NCBI NO: 15229822 NR Description: steroid 22-alpha-hydroxylase (DWF4); protein id:
MAESAGESYRLLSVSSSTTFLAFIIIFLLAGIARRKRRAPHRLPPGSRGWPLIGDTFAWLNAVAGSHPSSFVEKQIKKFVSLLCSVLLLILKRPDNSGFNEIRYGRIFSCSLFGKWAVVSADPDFNRFIMQNEGKLFQSSYPKSFRDLVGKDGVITVHGDQQRRLHSIASSMMRHDQLKTHFLEVIPVVMLQTLSNFKDGEVVLLQDICRKVAIHLMVNQLLGVSSESEVDEMSQLFSDFVDGCLSVPIDLPGFTYNKAMKARKEIIRKINKTIEKRLQNKAASDTAGNGVLGRLLEEESLPNESMADFIINLLFAGNETTSKTMLFAVYFLTHCPKAMTQLLEEHDRLAGGMLTWQDYKTMDFTQCVIDETLRLGGIAIWLMREAKEDVSYQDYVIPKGCFVVPFLSAVHLDESYYKESLSFNPWRWLDPETQQKRNWRTSPFYCPFGGGTRFCPGAELARLQIALFLHYFITTYKSVHVMLLKWTQLKEDRISFFPSARLVNGFKIQLNRRDSDPPNQ

SEQ ID NO: 88580 - protein, 391 aa, Arabidopsis thaliana
  peptide (1)..(391): Ceres Seq. ID no. 12711005
  misc_feature (101)..(381): Pfam Name: Cytochrome P450 Pfam Description: Cytochrome P450
  misc_feature (1)..(391): Homolog of NCBI NO: 15219454 NR Description: steroid 22-alpha-hydroxylase, putative; protein
  misc_feature (1)..(385): Homolog of NCBI NO: 15239203 NR Description: cytochrome p450, putative; protein id: supported by cDNA: 36334., supported by cDNA: gi_14596098, by cDNA: gi_15450716, supported by cDNA: gi_17380617, supported
  misc_feature (1)..(387): Homolog of NCBI NO: 9587211 NR Description: cytochrome P450 [Vigna radiata]
  misc_feature (1)..(387): Homolog of NCBI NO: 34902330 NR Description: Putative steroid 22-alpha-hydroxylase [Oryza
  misc_feature (1)..(383): Homolog of NCBI NO: 18400142 NR Description: cytochrome P450, putative; protein id: supported by cDNA: gi_14971016 [Arabidopsis thaliana] CYP90D [Arabidopsis thaliana] >gi|28393374|gb|AAO42111.1|
  misc_feature (162)..(383): Homolog of NCBI NO: 15229822 NR Description: steroid 22-alpha-hydroxylase (DWF4); protein id:
  misc_feature (1)..(148): Homolog of NCBI NO: 15229822 NR Description: steroid 22-alpha-hydroxylase (DWF4); protein id:
  misc_feature (162)..(383): Homolog of NCBI NO: 2935342 NR Description: steroid 22-alpha-hydroxylase; DWF4; CYP90B1
  misc_feature (1)..(148): Homolog of NCBI NO: 2935342 NR Description: steroid 22-alpha-hydroxylase; DWF4; CYP90B1
  misc_feature (1)..(348): Homolog of NCBI NO: 9294019 NR Description: cytochrome P450-like protein [Arabidopsis
MQNEGKLFQSSYPKSFRDLVGKDGVITVHGDQQRRLHSIASSMMRHDQLKTHFLEVIPVVMLQTLSNFKDGEVVLLQDICRKVAIHLMVNQLLGVSSESEVDEMSQLFSDFVDGCLSVPIDLPGFTYNKAMKARKEIIRKINKTIEKRLQNKAASDTAGNGVLGRLLEEESLPNESMADFIINLLFAGNETTSKTMLFAVYFLTHCPKAMTQLLEEHDRLAGGMLTWQDYKTMDFTQCVIDETLRLGGIAIWLMREAKEDVSYQDYVIPKGCFVVPFLSAVHLDESYYKESLSFNPWRWLDPETQQKRNWRTSPFYCPFGGGTRFCPGAELARLQIALFLHYFITTYKSVHVMLLKWTQLKEDRISFFPSARLVNGFKIQLNRRDSDPPNQ

SEQ ID NO: 88581 - protein, 349 aa, Arabidopsis thaliana
  peptide (1)..(349): Ceres Seq. ID no. 12711006
  misc_feature (59)..(339): Pfam Name: Cytochrome P450 Pfam Description: Cytochrome P450
  misc_feature (1)..(349): Homolog of NCBI NO: 15219454 NR Description: steroid 22-alpha-hydroxylase, putative; protein
  misc_feature (1)..(343): Homolog of NCBI NO: 15239203 NR Description: cytochrome p450, putative; protein id: supported by cDNA: 36334., supported by cDNA: gi_14596098, by cDNA: gi_15450716, supported by cDNA: gi_17380617, supported
  misc_feature (1)..(345): Homolog of NCBI NO: 9587211 NR Description: cytochrome P450 [Vigna radiata]
  misc_feature (1)..(345): Homolog of NCBI NO: 34902330 NR Description: Putative steroid 22-alpha-hydroxylase [Oryza
  misc_feature (1)..(341): Homolog of NCBI NO: 18400142 NR Description: cytochrome P450, putative; protein id: supported by cDNA: gi_14971016 [Arabidopsis thaliana] CYP90D [Arabidopsis thaliana] >gi|28393374|gb|AAO42111.1|
  misc_feature (120)..(341): Homolog of NCBI NO: 15229822 NR Description: steroid 22-alpha-hydroxylase (DWF4); protein id:
  misc_feature (1)..(106): Homolog of NCBI NO: 15229822 NR Description: steroid 22-alpha-hydroxylase (DWF4); protein id:
  misc_feature (120)..(341): Homolog of NCBI NO: 2935342 NR Description: steroid 22-alpha-hydroxylase; DWF4; CYP90B1
  misc_feature (1)..(106): Homolog of NCBI NO: 2935342 NR Description: steroid 22-alpha-hydroxylase; DWF4; CYP90B1
  misc_feature (1)..(306): Homolog of NCBI NO: 9294019 NR Description: cytochrome P450-like protein [Arabidopsis
MMRHDQLKTHFLEVIPVVMLQTLSNFKDGEVVLLQDICRKVAIHLMVNQLLGVSSESEVDEMSQLFSDFVDGCLSVPIDLPGFTYNKAMKARKEIIRKINKTIEKRLQNKAASDTAGNGVLGRLLEEESLPNESMADFIINLLFAGNETTSKTMLFAVYFLTHCPKAMTQLLEEHDRLAGGMLTWQDYKTMDFTQCVIDETLRLGGIAIWLMREAKEDVSYQDYVIPKGCFVVPFLSAVHLDESYYKESLSFNPWRWLDPETQQKRNWRTSPFYCPFGGGTRFCPGAELARLQIALFLHYFITTYKSVHVMLLKWTQLKEDRISFFPSARLVNGFKIQLNRRDSDPPNQ

SEQ ID NO: 88582 - DNA, 1623 bp, Arabidopsis thaliana
  misc_feature (1)..(1623): Ceres Seq. ID no. 12711037
  misc_feature: MA Experiment ID: 20000306 Result: Up-regulated in Transcription
  misc_feature: MA Experiment 20000306 PARAMETER Experiment Name: At_Germinating_Seeds_Sub_P Parameter: Age (hr) Value: 6 vs. 0
  misc_feature: MA Experiment 20000306 PARAMETER Experiment Name: At_Germinating_Seeds_Sub_P Parameter: Organism Value: A. thaliana
  misc_feature: MA Experiment 20000306 PARAMETER Experiment Name: At_Germinating_Seeds_Sub_P Parameter: Plant Line Value: WS
  misc_feature: MA Experiment 20000306 PARAMETER Experiment Name: At_Germinating_Seeds_Sub_P Parameter: Tissue Value: Germinating Seeds
  misc_feature: MA Experiment ID: 20000307 Result: Up-regulated in Transcription
  misc_feature: MA Experiment 20000307 PARAMETER Experiment Name: At_Germinating_Seeds_Sub_P Parameter: Age (hr) Value: 24 vs. 0
  misc_feature: MA Experiment 20000307 PARAMETER Experiment Name: At_Germinating_Seeds_Sub_P Parameter: Organism Value: A. thaliana
  misc_feature: MA Experiment 20000307 PARAMETER Experiment Name: At_Germinating_Seeds_Sub_P Parameter: Plant Line Value: WS
  misc_feature: MA Experiment 20000307 PARAMETER Experiment Name: At_Germinating_Seeds_Sub_P Parameter: Tissue Value: Germinating Seeds
  misc_feature: MA Experiment ID: 20000329 Result: Up-regulated in Transcription
  misc_feature: MA Experiment 20000329 PARAMETER Experiment Name: At_4deg_Cold_Sub_P Parameter: Age (day) Value: 14
  misc_feature: MA Experiment 20000329 PARAMETER Experiment Name: At_4deg_Cold_Sub_P Parameter: Organism Value: A. thaliana
  misc_feature: MA Experiment 20000329 PARAMETER Experiment Name: At_4deg_Cold_Sub_P Parameter: Plant Line Value: WS
  misc_feature: MA Experiment 20000329 PARAMETER Experiment Name: At_4deg_Cold_Sub_P Parameter: Temperature (deg C) Value: 4 vs. 22
  misc_feature: MA Experiment 20000329 PARAMETER Experiment Name: At_4deg_Cold_Sub_P Parameter: Timepoint (hr) Value: 6
  misc_feature: MA Experiment 20000329 PARAMETER Experiment Name: At_4deg_Cold_Sub_P Parameter: Tissue Value: Aerial
  misc_feature: MA Experiment ID: 20000332 Result: Up-regulated in Transcription
  misc_feature: MA Experiment 20000332 PARAMETER Experiment Name: At_4deg_Cold_Sub_P Parameter: Age (day) Value: 14
  misc_feature: MA Experiment 20000332 PARAMETER Experiment Name: At_4deg_Cold_Sub_P Parameter: Organism Value: A. thaliana
  misc_feature: MA Experiment 20000332 PARAMETER Experiment Name: At_4deg_Cold_Sub_P Parameter: Plant Line Value: WS
  misc_feature: MA Experiment 20000332 PARAMETER Experiment Name: At_4deg_Cold_Sub_P Parameter: Temperature (deg C) Value: 4 vs. 22
  misc_feature: MA Experiment 20000332 PARAMETER Experiment Name: At_4deg_Cold_Sub_P Parameter: Timepoint (hr) Value: 2
  misc_feature: MA Experiment 20000332 PARAMETER Experiment Name: At_4deg_Cold_Sub_P Parameter: Tissue Value: Aerial
  misc_feature: MA Experiment ID: 20000349 Result: Down-regulated in Transcription
  misc_feature: MA Experiment 20000349 PARAMETER Experiment Name: At_100uM_ABA_Sub_P Parameter: Age (day) Value: 14
  misc_feature: MA Experiment 20000349 PARAMETER Experiment Name: At_100uM_ABA_Sub_P Parameter: Organism Value: A. thaliana
  misc_feature: MA Experiment 20000349 PARAMETER Experiment Name: At_100uM_ABA_Sub_P Parameter: Plant Line Value: WS
  misc_feature: MA Experiment 20000349 PARAMETER Experiment Name: At_100uM_ABA_Sub_P Parameter: Timepoint (hr) Value: 6
  misc_feature: MA Experiment 20000349 PARAMETER Experiment Name: At_100uM_ABA_Sub_P Parameter: Tissue Value: Aerial
  misc_feature: MA Experiment 20000349 PARAMETER Experiment Name: At_100uM_ABA_Sub_P Parameter: Treatment Value: 100uM ABA vs. No Treatment
  misc_feature: MA Experiment ID: 20000440 Result: Up-regulated in Transcription
  misc_feature: MA Experiment 20000440 PARAMETER Experiment Name: At_Closed-Flower__Sub_P Parameter: Tissue Value: Closed Flower vs. Whole Plant
atggctcacagtcacactaatggcgccatctctccttctttctccaaagacttattcatctccgtctcgaatttcttctctattcatagatttcattaccctcgtgaaaaaatcgtctcttttttgtttcctagtgtgttctcaaggataatggcttcgtatggcgaggagcgtgaaatccaaaagaattactggaaagagcattcagtgggattgagtgttgaagctatgatgcttgattccaaagcttctgacctcgacaaagaagaacgtcctgagatacttgcgtttcttccacctattgaagggacaacagtgctagagtttggtgctggaattggtcgttttactactgaattagctcagaaggccggccaggtcattgcggttgacttcattgaaagtgttatcaaaaagaatgagaacattaacggtcactacaagaacgtcaaatttctgtgcgctgatgtcacatcaccaaatatgaactttccaaatgagtctatggatctgatattctccaactggctgctaatgtatctctctgatcaagaggttgaagatttggcgaaaaagatgttacaatggacaaaggttggcgggtatattttctttcgggagtcttgtttccatcagtctggtgataacaagcggaagtacaacccaacacactaccgtgaacctaaattttacacaaagcttttcaaagaatgccatatgaatgacgaagatgggaattcgtatgaactctctttggttagctgtaaatgcattggagcttatgtgagaaacaaaaagaaccagaaccagatatgctggctttggcagaaagtcagttcggataatgataggggcttccaacgcttcttggacaatgtccagtataagtctagtggtatcttacgctatgagcgtgtctttggagaagggtttgttagcacagggggactcgagacaacaaaggaattcgtggatatgctggatctgaaacctggccaaaaagttctagacgttgggtgcggaataggaggaggggacttctacatggctgagaactttgacgtggatgttgtgggcattgatctatctgtaaacatgatctcttttgcgcttgaacacgcaataggactcaaatgctctgtagaattcgaagtagctgattgcaccaagaaggagtatcctgataacacctttgatgttatttatagcagagacaccattctacatatccaagacaagccagcattgttcagaagattctacaaatggttgaagccgggagggaaagttctcatcactgattactgcagaagccccaaaaccccatctccagactttgcaatctacatcaagaaacgaggttatgatcttcatgatgtacaagcatacggtcagatgctgagagatgctggtttcgaggaggtaatcgcggaggatagaaccgatcagttcatgaaagtcctgaaacgggaactggatgcagtggagaaggagaaggaagaattcatcagtgacttctcgaaagaggattacgaggatattataggcgggtggaagtcaaagctacttaggagctcaagtggtgagcagaagtggggtttgttcatcgccaagagaaactga

SEQ ID NO: 88583 - protein, 540 aa, Arabidopsis thaliana
  peptide (1)..(540): Ceres Seq. ID no. 12711038
  misc_feature (20)..(540): Homolog of NCBI NO: 15219502 NR Description: phosphoethanolamine N-methyltransferase, protein id: At1g73600.1 [Arabidopsis thaliana]
  misc_feature (51)..(540): Homolog of NCBI NO: 24212080 NR Description: Putative phosphoethanolamine N-methyltransferase 3
  misc_feature (52)..(540): Homolog of NCBI NO: 30684743 NR Description: phosphoethanolamine N-methyltransferase, putative
  misc_feature (52)..(540): Homolog of NCBI NO: 20260388 NR Description: unknown protein [Arabidopsis thaliana]
  misc_feature (52)..(540): Homolog of NCBI NO: 9294501 NR Description: methyl transferase-like protein [Arabidopsis
  misc_feature (55)..(539): Homolog of NCBI NO: 28804509 NR Description: phosphoethanolamine N-methyltransferase [Aster
  misc_feature (67)..(539): Homolog of NCBI NO: 15221909 NR Description: phosphoethanolamine N-methyltransferase, protein id: At1g48600.1, supported by cDNA: gi_16226648, by cDNA: gi_17380783 [Arabidopsis thaliana]
  misc_feature (56)..(539): Homolog of NCBI NO: 24212082 NR Description: Phosphoethanolamine N-methyltransferase
  misc_feature (52)..(539): Homolog of NCBI NO: 12584943 NR Description: phosphoethanolamine N-methyltransferase
  misc_feature (56)..(539): Homolog of NCBI NO: 28436074 NR Description: phosphoethanolamine N-methyltransferase [Suaeda
MAHSHTNGAISPSFSKDLFISVSNFFSIHRFHYPREKIVSFLFPSVFSRIMASYGEEREIQKNYWKEHSVGLSVEAMMLDSKASDLDKEERPEILAFLPPIEGTTVLEFGAGIGRFTTELAQKAGQVIAVDFIESVIKKNENINGHYKNVKFLCADVTSPNMNFPNESMDLIFSNWLLMYLSDQEVEDLAKKMLQWTKVGGYIFFRESCFHQSGDNKRKYNPTHYREPKFYTKLFKECHMNDEDGNSYELSLVSCKCIGAYVRNKKNQNQICWLWQKVSSDNDRGFQRFLDNVQYKSSGILRYERVFGEGFVSTGGLETTKEFVDMLDLKPGQKVLDVGCGIGGGDFYMAENFDVDVVGIDLSVNMISFALEHAIGLKCSVEFEVADCTKKEYPDNTFDVIYSRDTILHIQDKPALFRRFYKWLKPGGKVLITDYCRSPKTPSPDFAIYIKKRGYDLHDVQAYGQMLRDAGFEEVIAEDRTDQFMKVLKRELDAVEKEKEEFISDFSKEDYEDIIGGWKSKLLRSSSGEQKWGLFIAKRN

SEQ ID NO: 88584 - protein, 490 aa, Arabidopsis thaliana
  peptide (1)..(490): Ceres Seq. ID no. 12711039
  misc_feature (1)..(490): Homolog of NCBI NO: 15219502 NR Description: phosphoethanolamine N-methyltransferase, protein id: At1g73600.1 [Arabidopsis thaliana]
  misc_feature (1)..(490): Homolog of NCBI NO: 24212080 NR Description: Putative phosphoethanolamine N-methyltransferase 3
  misc_feature (2)..(490): Homolog of NCBI NO: 30684743 NR Description: phosphoethanolamine N-methyltransferase, putative
  misc_feature (2)..(490): Homolog of NCBI NO: 20260388 NR Description: unknown protein [Arabidopsis thaliana]
  misc_feature (2)..(490): Homolog of NCBI NO: 9294501 NR Description: methyl transferase-like protein [Arabidopsis
  misc_feature (5)..(489): Homolog of NCBI NO: 28804509 NR Description: phosphoethanolamine N-methyltransferase [Aster
  misc_feature (17)..(489): Homolog of NCBI NO: 15221909 NR Description: phosphoethanolamine N-methyltransferase, protein id: At1g48600.1, supported by cDNA: gi_16226648, by cDNA: gi_17380783 [Arabidopsis thaliana]
  misc_feature (6)..(489): Homolog of NCBI NO: 24212082 NR Description: Phosphoethanolamine N-methyltransferase
  misc_feature (2)..(489): Homolog of NCBI NO: 12584943 NR Description: phosphoethanolamine N-methyltransferase
  misc_feature (6)..(489): Homolog of NCBI NO: 28436074 NR Description: phosphoethanolamine N-methyltransferase [Suaeda
MASYGEEREIQKNYWKEHSVGLSVEAMMLDSKASDLDKEERPEILAFLPPIEGTTVLEFGAGIGRFTTELAQKAGQVIAVDFIESVIKKNENINGHYKNVKFLCADVTSPNMNFPNESMDLIFSNWLLMYLSDQEVEDLAKKMLQWTKVGGYIFFRESCFHQSGDNKRKYNPTHYREPKFYTKLFKECHMNDEDGNSYELSLVSCKCIGAYVRNKKNQNQICWLWQKVSSDNDRGFQRFLDNVQYKSSGILRYERVFGEGFVSTGGLETTKEFVDMLDLKPGQKVLDVGCGIGGGDFYMAENFDVDVVGIDLSVNMISFALEHAIGLKCSVEFEVADCTKKEYPDNTFDVIYSRDTILHIQDKPALFRRFYKWLKPGGKVLITDYCRSPKTPSPDFAIYIKKRGYDLHDVQAYGQMLRDAGFEEVIAEDRTDQFMKVLKRELDAVEKEKEEFISDFSKEDYEDIIGGWKSKLLRSSSGEQKWGLFIAKRN

SEQ ID NO: 88585 - protein, 464 aa, Arabidopsis thaliana
  peptide (1)..(464): Ceres Seq. ID no. 12711040
  misc_feature (1)..(464): Homolog of NCBI NO: 15219502 NR Description: phosphoethanolamine N-methyltransferase, protein id: At1g73600.1 [Arabidopsis thaliana]
  misc_feature (1)..(464): Homolog of NCBI NO: 24212080 NR Description: Putative phosphoethanolamine N-methyltransferase 3
  misc_feature (1)..(464): Homolog of NCBI NO: 30684743 NR Description: phosphoethanolamine N-methyltransferase, putative
  misc_feature (1)..(464): Homolog of NCBI NO: 20260388 NR Description: unknown protein [Arabidopsis thaliana]
  misc_feature (1)..(464): Homolog of NCBI NO: 9294501 NR Description: methyl transferase-like protein [Arabidopsis
  misc_feature (1)..(463): Homolog of NCBI NO: 28804509 NR Description: phosphoethanolamine N-methyltransferase [Aster
  misc_feature (1)..(463): Homolog of NCBI NO: 15221909 NR Description: phosphoethanolamine N-methyltransferase, protein id: At1g48600.1, supported by cDNA: gi_16226648, by cDNA: gi_17380783 [Arabidopsis thaliana]
  misc_feature (1)..(463): Homolog of NCBI NO: 24212082 NR Description: Phosphoethanolamine N-methyltransferase
  misc_feature (1)..(463): Homolog of NCBI NO: 12584943 NR Description: phosphoethanolamine N-methyltransferase
  misc_feature (1)..(463): Homolog of NCBI NO: 28436074 NR Description: phosphoethanolamine N-methyltransferase [Suaeda
MMLDSKASDLDKEERPEILAFLPPIEGTTVLEFGAGIGRFTTELAQKAGQVIAVDFIESVIKKNENINGHYKNVKFLCADVTSPNMNFPNESMDLIFSNWLLMYLSDQEVEDLAKKMLQWTKVGGYIFFRESCFHQSGDNKRKYNPTHYREPKFYTKLFKECHMNDEDGNSYELSLVSCKCIGAYVRNKKNQNQICWLWQKVSSDNDRGFQRFLDNVQYKSSGILRYERVFGEGFVSTGGLETTKEFVDMLDLKPGQKVLDVGCGIGGGDFYMAENFDVDVVGIDLSVNMISFALEHAIGLKCSVEFEVADCTKKEYPDNTFDVIYSRDTILHIQDKPALFRRFYKWLKPGGKVLITDYCRSPKTPSPDFAIYIKKRGYDLHDVQAYGQMLRDAGFEEVIAEDRTDQFMKVLKRELDAVEKEKEEFISDFSKEDYEDIIGGWKSKLLRSSSGEQKWGLFIAKRN

SEQ ID NO: 88586 - DNA, 3009 bp, Arabidopsis thaliana
  misc_feature (1)..(3009): Ceres Seq. ID no. 12711064
  misc_feature: MA Experiment ID: 20000185 Result: Up-regulated in Transcription
  misc_feature: MA Experiment 20000185 PARAMETER Experiment Name: At_Roots__P Parameter: Age (day) Value: 7 vs. 21
  misc_feature: MA Experiment 20000185 PARAMETER Experiment Name: At_Roots__P Parameter: Organism Value: A. thaliana
  misc_feature: MA Experiment 20000185 PARAMETER Experiment Name: At_Roots__P Parameter: Tissue Value: Roots vs. Whole Plant
  misc_feature: MA Experiment ID: 20000438 Result: Up-regulated in Transcription
  misc_feature: MA Experiment 20000438 PARAMETER Experiment Name: At_Shoots__P Parameter: Age (day) Value: 14
  misc_feature: MA Experiment 20000438 PARAMETER Experiment Name: At_Shoots__P Parameter: Tissue Value: Shoots vs. Whole Plant
  misc_feature: MA Experiment ID: 20000439 Result: Up-regulated in Transcription
  misc_feature: MA Experiment 20000439 PARAMETER Experiment Name: At_Roots__P Parameter: Age (day) Value: 14 vs. 21
  misc_feature: MA Experiment 20000439 PARAMETER Experiment Name: At_Roots__P Parameter: Organism Value: A. thaliana
  misc_feature: MA Experiment 20000439 PARAMETER Experiment Name: At_Roots__P Parameter: Tissue Value: Roots vs. Whole Plant
  misc_feature: MA Experiment ID: 20000441 Result: Up-regulated in Transcription
  misc_feature: MA Experiment 20000441 PARAMETER Experiment Name: At_1uM_BR-BRZ__P Parameter: Tissue Value: Shoot Apices
  misc_feature: MA Experiment 20000441 PARAMETER Experiment Name: At_1uM_BR-BRZ__P Parameter: Treatment Value: 1uM BR vs. No Treatment
  misc_feature: MA Experiment ID: 20000443 Result: Up-regulated in Transcription
  misc_feature: MA Experiment 20000443 PARAMETER Experiment Name: At_1uM_BR-BRZ__P Parameter: Tissue Value: Shoot Apices
  misc_feature: MA Experiment 20000443 PARAMETER Experiment Name: At_1uM_BR-BRZ__P Parameter: Treatment Value: 1uM BRZ vs. No Treatment
  misc_feature: MA Experiment ID: 20000794 Result: Up-regulated in Transcription
  misc_feature: MA Experiment 20000794 PARAMETER Experiment Name: At_Petals_P Parameter: Age (day) Value: 23-25 days
  misc_feature: MA Experiment 20000794 PARAMETER Experiment Name: At_Petals_P Parameter: Plant Line Value: WS
  misc_feature: MA Experiment 20000794 PARAMETER Experiment Name: At_Petals_P Parameter: Tissue Value: Petals vs. Whole plant
  misc_feature: MA Experiment ID: 20001450 Result: Up-regulated in Transcription
  misc_feature: MA Experiment 20001450 PARAMETER Experiment Name: At_Far-red-induction_P Parameter: Age (day) Value: 7
  misc_feature: MA Experiment 20001450 PARAMETER Experiment Name: At_Far-red-induction_P Parameter: Light Value: Far-red vs. White
  misc_feature: MA Experiment 20001450 PARAMETER Experiment Name: At_Far-red-induction_P Parameter: Organism Value: A. thaliana
  misc_feature: MA Experiment 20001450 PARAMETER Experiment Name: At_Far-red-induction_P Parameter: Plant Line Value: Columbia
  misc_feature: MA Experiment 20001450 PARAMETER Experiment Name: At_Far-red-induction_P Parameter: Timepoint (hr) Value: 8
  misc_feature: MA Experiment 20001450 PARAMETER Experiment Name: At_Far-red-induction_P Parameter: Tissue Value: Whole Plant
  misc_feature: MA Experiment ID: 20001556 Result: Down-regulated in Transcription
  misc_feature: MA Experiment 20001556 PARAMETER Experiment Name: At_Drought_Soil_Dry_P Parameter: Age (day) Value: 26
  misc_feature: MA Experiment 20001556 PARAMETER Experiment Name: At_Drought_Soil_Dry_P Parameter: Organism Value: A. thaliana
  misc_feature: MA Experiment 20001556 PARAMETER Experiment Name: At_Drought_Soil_Dry_P Parameter: Plant Line Value: WS
  misc_feature: MA Experiment 20001556 PARAMETER Experiment Name: At_Drought_Soil_Dry_P Parameter: Post Timepoint (hr) Value: None
  misc_feature: MA Experiment 20001556 PARAMETER Experiment Name: At_Drought_Soil_Dry_P Parameter: Post-Treatment Value: None
  misc_feature: MA Experiment 20001556 PARAMETER Experiment Name: At_Drought_Soil_Dry_P Parameter: Timepoint (day) Value: 12
  misc_feature: MA Experiment 20001556 PARAMETER Experiment Name: At_Drought_Soil_Dry_P Parameter: Treatment Value: Drought vs. No Drought
  misc_feature: MA Experiment ID: 20001904 Result: Down-regulated in Transcription
  misc_feature: MA Experiment 20001904 PARAMETER Experiment Name: At_Drought_Reproduction_P Parameter: Age (day) Value: 37
  misc_feature: MA Experiment 20001904 PARAMETER Experiment Name: At_Drought_Reproduction_P Parameter: Organism Value: A. thaliana
  misc_feature: MA Experiment 20001904 PARAMETER Experiment Name: At_Drought_Reproduction_P Parameter: Plant Line Value: WS
  misc_feature: MA Experiment 20001904 PARAMETER Experiment Name: At_Drought_Reproduction_P Parameter: Timepoint (day) Value: 7
  misc_feature: MA Experiment 20001904 PARAMETER Experiment Name: At_Drought_Reproduction_P Parameter: Tissue Value: Rosettes
  misc_feature: MA Experiment 20001904 PARAMETER Experiment Name: At_Drought_Reproduction_P Parameter: Treatment Value: Drought vs. No Drought
atgaagatgaacatgaagaactttcttaagaaacttcatatctcgcccaatcaatcagatgaagctgaaggatcaatttcaacaactaagagcaatcatcataagtctatcgatgtatcatcatcatcatcaccgaggtctcatcacagcaatagccctgaaatcaaacctttttctggtttatctaattggttaagttctgttggtcatagaaaaatccctagtcctcctaattctttcaatgccaagaacagagccgccacggttgatgacactgttgttgttaatgggtcagaacatgtggatttaggttccaaagatccagctgttgaagaagagaatcagatacagttggctttagagttaagtgctagagaagatcctgaggctactcagattgaggctattaagcaattcagtttaggctcttgtgctcctgagaactctccagctgaactcatcgcttatcgctactggaattacaattgtcttggctatgatgacaagatcttggatggtttttatgacttgtatggagtgttgaatgcatcctcagcagaaagaatacctcctttgctcgatcttcaagggacacctgtttcagacggtgtgacatgggaagctgttcttgtgaacagaagtggggattctaatctgttgagacttgaacagatggctcttgatattgctgctaaatcaagatcagtttcttcctctggttttgtgaatagtgaattggtaaggaaactggctattttagtgggagattacatgggtggaccagtcgtgcacccagagagcatgttgagagcttggaggagtcttagctatagtttgaaagcaactcttggaagcatggttttgccacttggttctctgactattggtttggctcgtcaccgagccttgttattcaaagtattgtgtgatagtgttggtgttccttgtcgaatagtcaaaggtcagcaatataccggttctgaagatgtggcaatgaactttattaaggctgatgatggcagggagtacattgttgatcttatgggagatcccggcacgcttattccagctgatgcagctggactacaaatagactatgatgaatctgcctattccgctagtcctggagacaatgattcaattcatgtagcttcttccagcaatggtattgaaagctcatatgaagagaatacagagtttcgaacaggggaacatcgttctagtaccaagagttctggggagagaaaccaatccggaggtggaggcgatctcattgttcatccaaatatttctagagaagatgtgaaaaatcagaagaaagttgaaaaggctccatttcaaaatctgtctagcaggcctattcattctttcacccatatgagatcaccttcttggactgaaggggttagctccccagctgcacaaaggatgaaagtcaaagatgtttcacaatatatgattgatgctgctaaagagaatccacggttagctcagaagcttcatgatgtattacttgaaagcggagttgtagctcctcccaatttattttccgaagtctatccccagcaattggaggcaactgttgaaagcaaaaactcgactgaagccaagaaagagagaggaaaagatttagagacaactcaggaaggaagacaccaaaacggttttggtccagtgaggtttttgcctccattaccaagagtgcaatctaaaacaaatgcacatgatcaacgtgataatggcaaagttgtaagtcagtctgattcttcacattctgaagcatcttcgacagaatatgccagaaccgtccctgctgctgtagctgcagctgctgttgttgcatcttccatggttgctgctgctgctgccaagtctgcaaactcagactcctcccccatagaacttcctgctgcagctgctgccacggccactgctgctgcagttgtggcaacagctgcagccgtgtccaggcaacttgaattaggctcgaatagcgacggggatgatggttctggtgggcatgagcctcaaggtagtggggactctaatcatgggccaaattcaggaggggaaagaatatctgacaaatctattggcaatgaaagttctaagtcagactgtgatgatgtatctgactgtgagattttgtgggaagaaattactgtgggagaacgtattggacttggatcttatggagaagtgtatcggggagattggcacgggactgaagtggctgtcaagaagttccttgatcaagatttaacaggagaagcattggaggaattcagaagtgaggtccgaatcatgaaaaagctaagacatcccaacattgttctcttcatgggagctgtgactcgcccaccgaatctttcaattgttacagagtttcttcctagaggtagcttgtataggttaatccaccggccaaataaccaattagacgagaggaggcgcctgagaatggcccttgatgctgctcgtggaatgaactatttgcacagctgtaatccgatgattgtccatcgcgatcttaagtccccaaaccttctagttgacaaaaactgggtcgtgaaggtgtgtgattttggattgtctaggatgaaacacagtacatacctctcttcaaagtcaacagcagggacggctgaatggatggctccagaagtgctaagaaacgaacctgctgatgagaagtgcgatgtttacagctacggtgtgatcttatgggaactctttacgttacaacaaccgtggggaaagatgaacccgatgcaagtagttggggcagttgggtttcagcatcgacgtcttgacattcccgactttgtagatccagcaattgcagatctcatcagtaaatgctggcagacggattcaaagttaaggccaagttttgcagagataatggcgtctctaaagcggctacagaaacctgtaacaggttccaacatcccaagaccagtccccagttcctcttcattaccaactgaacatgaacaaaaggattga

SEQ ID NO: 88587 - protein, 1002 aa, Arabidopsis thaliana
  peptide (1)..(1002): Ceres Seq. ID no. 12711065
  misc_feature (720)..(972): Pfam Name: Protein kinase domain Pfam Description: Protein kinase domain
  misc_feature (1)..(84): Homolog of NCBI NO: 32527767 NR Description: shoot regeneration-related mitogen activated
  misc_feature (5)..(524): Homolog of NCBI NO: 22326737 NR Description: MAP3K delta-1 protein kinase; protein id: supported by cDNA: gi_18700074 [Arabidopsis thaliana]
  misc_feature (683)..(994): Homolog of NCBI NO: 22326737 NR Description: MAP3K delta-1 protein kinase; protein id: supported by cDNA: gi_18700074 [Arabidopsis thaliana]
  misc_feature (91)..(524): Homolog of NCBI NO: 11358502 NR Description: MAP3K delta-1 protein kinase - Arabidopsis
  misc_feature (683)..(957): Homolog of NCBI NO: 11358502 NR Description: MAP3K delta-1 protein kinase - Arabidopsis
  misc_feature (5)..(358): Homolog of NCBI NO: 7489058 NR Description: probable protein kinase TCTR2 - tomato
  misc_feature (708)..(997): Homolog of NCBI NO: 7489058 NR Description: probable protein kinase TCTR2 - tomato
  misc_feature (111)..(418): Homolog of NCBI NO: 7488198 NR Description: probable serine/threonine-specific protein kinase
  misc_feature (111)..(418): Homolog of NCBI NO: 18390931 NR Description: putative protein kinase; protein id: At1g08720.1, by cDNA: gi_11127924 [Arabidopsis thaliana]
  misc_feature (668)..(979): Homolog of NCBI NO: 7488198 NR Description: probable serine/threonine-specific protein kinase
MKMNMKNFLKKLHISPNQSDEAEGSISTTKSNHHKSIDVSSSSSPRSHHSNSPEIKPFSGLSNWLSSVGHRKIPSPPNSFNAKNRAATVDDTVVVNGSEHVDLGSKDPAVEEENQIQLALELSAREDPEATQIEAIKQFSLGSCAPENSPAELIAYRYWNYNCLGYDDKILDGFYDLYGVLNASSAERIPPLLDLQGTPVSDGVTWEAVLVNRSGDSNLLRLEQMALDIAAKSRSVSSSGFVNSELVRKLAILVGDYMGGPVVHPESMLRAWRSLSYSLKATLGSMVLPLGSLTIGLARHRALLFKVLCDSVGVPCRIVKGQQYTGSEDVAMNFIKADDGREYIVDLMGDPGTLIPADAAGLQIDYDESAYSASPGDNDSIHVASSSNGIESSYEENTEFRTGEHRSSTKSSGERNQSGGGGDLIVHPNISREDVKNQKKVEKAPFQNLSSRPIHSFTHMRSPSWTEGVSSPAAQRMKVKDVSQYMIDAAKENPRLAQKLHDVLLESGVVAPPNLFSEVYPQQLEATVESKNSTEAKKERGKDLETTQEGRHQNGFGPVRFLPPLPRVQSKTNAHDQRDNGKVVSQSDSSHSEASSTEYARTVPAAVAAAAVVASSMVAAAAAKSANSDSSPIELPAAAAATATAAAVVATAAAVSRQLELGSNSDGDDGSGGHEPQGSGDSNHGPNSGGERISDKSIGNESSKSDCDDVSDCEILWEEITVGERIGLGSYGEVYRGDWHGTEVAVKKFLDQDLTGEALEEFRSEVRIMKKLRHPNIVLFMGAVTRPPNLSIVTEFLPRGSLYRLIHRPNNQLDERRRLRMALDAARGMNYLHSCNPMIVHRDLKSPNLLVDKNWVVKVCDFGLSRMKHSTYLSSKSTAGTAEWMAPEVLRNEPADEKCDVYSYGVILWELFTLQQPWGKMNPMQVVGAVGFQHRRLDIPDFVDPAIADLISKCWQTDSKLRPSFAEIMASLKRLQKPVTGSNIPRPVPSSSSLPTEHEQKD

SEQ ID NO: 88588 - protein, 1000 aa, Arabidopsis thaliana
  peptide (1)..(1000): Ceres Seq. ID no. 12711066
  misc_feature (718)..(970): Pfam Name: Protein kinase domain Pfam Description: Protein kinase domain
  misc_feature (1)..(82): Homolog of NCBI NO: 32527767 NR Description: shoot regeneration-related mitogen activated
  misc_feature (3)..(522): Homolog of NCBI NO: 22326737 NR Description: MAP3K delta-1 protein kinase; protein id: supported by cDNA: gi_18700074 [Arabidopsis thaliana]
  misc_feature (681)..(992): Homolog of NCBI NO: 22326737 NR Description: MAP3K delta-1 protein kinase; protein id: supported by cDNA: gi_18700074 [Arabidopsis thaliana]
  misc_feature (89)..(522): Homolog of NCBI NO: 11358502 NR Description: MAP3K delta-1 protein kinase - Arabidopsis
  misc_feature (681)..(955): Homolog of NCBI NO: 11358502 NR Description: MAP3K delta-1 protein kinase - Arabidopsis
  misc_feature (3)..(356): Homolog of NCBI NO: 7489058 NR Description: probable protein kinase TCTR2 - tomato
  misc_feature (706)..(995): Homolog of NCBI NO: 7489058 NR Description: probable protein kinase TCTR2 - tomato
  misc_feature (109)..(416): Homolog of NCBI NO: 7488198 NR Description: probable serine/threonine-specific protein kinase
  misc_feature (109)..(416): Homolog of NCBI NO: 18390931 NR Description: putative protein kinase; protein id: At1g08720.1, by cDNA: gi_11127924 [Arabidopsis thaliana]
  misc_feature (666)..(977): Homolog of NCBI NO: 7488198 NR Description: probable serine/threonine-specific protein kinase
MNMKNFLKKLHISPNQSDEAEGSISTTKSNHHKSIDVSSSSSPRSHHSNSPEIKPFSGLSNWLSSVGHRKIPSPPNSFNAKNRAATVDDTVVVNGSEHVDLGSKDPAVEEENQIQLALELSAREDPEATQIEAIKQFSLGSCAPENSPAELIAYRYWNYNCLGYDDKILDGFYDLYGVLNASSAERIPPLLDLQGTPVSDGVTWEAVLVNRSGDSNLLRLEQMALDIAAKSRSVSSSGFVNSELVRKLAILVGDYMGGPVVHPESMLRAWRSLSYSLKATLGSMVLPLGSLTIGLARHRALLFKVLCDSVGVPCRIVKGQQYTGSEDVAMNFIKADDGREYIVDLMGDPGTLIPADAAGLQIDYDESAYSASPGDNDSIHVASSSNGIESSYEENTEFRTGEHRSSTKSSGERNQSGGGGDLIVHPNISREDVKNQKKVEKAPFQNLSSRPIHSFTHMRSPSWTEGVSSPAAQRMKVKDVSQYMIDAAKENPRLAQKLHDVLLESGVVAPPNLFSEVYPQQLEATVESKNSTEAKKERGKDLETTQEGRHQNGFGPVRFLPPLPRVQSKTNAHDQRDNGKVVSQSDSSHSEASSTEYARTVPAAVAAAAVVASSMVAAAAAKSANSDSSPIELPAAAAATATAAAVVATAAAVSRQLELGSNSDGDDGSGGHEPQGSGDSNHGPNSGGERISDKSIGNESSKSDCDDVSDCEILWEEITVGERIGLGSYGEVYRGDWHGTEVAVKKFLDQDLTGEALEEFRSEVRIMKKLRHPNIVLFMGAVTRPPNLSIVTEFLPRGSLYRLIHRPNNQLDERRRLRMALDAARGMNYLHSCNPMIVHRDLKSPNLLVDKNWVVKVCDFGLSRMKHSTYLSSKSTAGTAEWMAPEVLRNEPADEKCDVYSYGVILWELFTLQQPWGKMNPMQVVGAVGFQHRRLDIPDFVDPAIADLISKCWQTDSKLRPSFAEIMASLKRLQKPVTGSNIPRPVPSSSSLPTEHEQKD

SEQ ID NO: 88589 - protein, 998 aa, Arabidopsis thaliana
  peptide (1)..(998): Ceres Seq. ID no. 12711067
  misc_feature (716)..(968): Pfam Name: Protein kinase domain Pfam Description: Protein kinase domain
  misc_feature (1)..(80): Homolog of NCBI NO: 32527767 NR Description: shoot regeneration-related mitogen activated
  misc_feature (1)..(520): Homolog of NCBI NO: 22326737 NR Description: MAP3K delta-1 protein kinase; protein id: supported by cDNA: gi_18700074 [Arabidopsis thaliana]
  misc_feature (679)..(990): Homolog of NCBI NO: 22326737 NR Description: MAP3K delta-1 protein kinase; protein id: supported by cDNA: gi_18700074 [Arabidopsis thaliana]
  misc_feature (87)..(520): Homolog of NCBI NO: 11358502 NR Description: MAP3K delta-1 protein kinase - Arabidopsis
  misc_feature (679)..(953): Homolog of NCBI NO: 11358502 NR Description: MAP3K delta-1 protein kinase - Arabidopsis
  misc_feature (1)..(354): Homolog of NCBI NO: 7489058 NR Description: probable protein kinase TCTR2 - tomato
  misc_feature (704)..(993): Homolog of NCBI NO: 7489058 NR Description: probable protein kinase TCTR2 - tomato
  misc_feature (107)..(414): Homolog of NCBI NO: 7488198 NR Description: probable serine/threonine-specific protein kinase
  misc_feature (107)..(414): Homolog of NCBI NO: 18390931 NR Description: putative protein kinase; protein id: At1g08720.1, by cDNA: gi_11127924 [Arabidopsis thaliana]
  misc_feature (664)..(975): Homolog of NCBI NO: 7488198 NR Description: probable serine/threonine-specific protein kinase
MKNFLKKLHISPNQSDEAEGSISTTKSNHHKSIDVSSSSSPRSHHSNSPEIKPFSGLSNWLSSVGHRKIPSPPNSFNAKNRAATVDDTVVVNGSEHVDLGSKDPAVEEENQIQLALELSAREDPEATQIEAIKQFSLGSCAPENSPAELIAYRYWNYNCLGYDDKILDGFYDLYGVLNASSAERIPPLLDLQGTPVSDGVTWEAVLVNRSGDSNLLRLEQMALDIAAKSRSVSSSGFVNSELVRKLAILVGDYMGGPVVHPESMLRAWRSLSYSLKATLGSMVLPLGSLTIGLARHRALLFKVLCDSVGVPCRIVKGQQYTGSEDVAMNFIKADDGREYIVDLMGDPGTLIPADAAGLQIDYDESAYSASPGDNDSIHVASSSNGIESSYEENTEFRTGEHRSSTKSSGERNQSGGGGDLIVHPNISREDVKNQKKVEKAPFQNLSSRPIHSFTHMRSPSWTEGVSSPAAQRMKVKDVSQYMIDAAKENPRLAQKLHDVLLESGVVAPPNLFSEVYPQQLEATVESKNSTEAKKERGKDLETTQEGRHQNGFGPVRFLPPLPRVQSKTNAHDQRDNGKVVSQSDSSHSEASSTEYARTVPAAVAAAAVVASSMVAAAAAKSANSDSSPIELPAAAAATATAAAVVATAAAVSRQLELGSNSDGDDGSGGHEPQGSGDSNHGPNSGGERISDKSIGNESSKSDCDDVSDCEILWEEITVGERIGLGSYGEVYRGDWHGTEVAVKKFLDQDLTGEALEEFRSEVRIMKKLRHPNIVLFMGAVTRPPNLSIVTEFLPRGSLYRLIHRPNNQLDERRRLRMALDAARGMNYLHSCNPMIVHRDLKSPNLLVDKNWVVKVCDFGLSRMKHSTYLSSKSTAGTAEWMAPEVLRNEPADEKCDVYSYGVILWELFTLQQPWGKMNPMQVVGAVGFQHRRLDIPDFVDPAIADLISKCWQTDSKLRPSFAEIMASLKRLQKPVTGSNIPRPVPSSSSLPTEHEQKD

SEQ ID NO: 88590 - DNA, 3042 bp, Arabidopsis thaliana
  misc_feature (1)..(3042): Ceres Seq. ID no. 12711084
  misc_feature: MA Experiment ID: 20000180 Result: Up-regulated in Transcription
  misc_feature: MA Experiment 20000180 PARAMETER Experiment Name: At_Germinating_Seeds_P Parameter: Age (hr) Value: 24 vs. 0
  misc_feature: MA Experiment 20000180 PARAMETER Experiment Name: At_Germinating_Seeds_P Parameter: Tissue Value: Germinating Seeds
  misc_feature: MA Experiment ID: 20000185 Result: Up-regulated in Transcription
  misc_feature: MA Experiment 20000185 PARAMETER Experiment Name: At_Roots__P Parameter: Age (day) Value: 7 vs. 21
  misc_feature: MA Experiment 20000185 PARAMETER Experiment Name: At_Roots__P Parameter: Organism Value: A. thaliana
  misc_feature: MA Experiment 20000185 PARAMETER Experiment Name: At_Roots__P Parameter: Tissue Value: Roots vs. Whole Plant
  misc_feature: MA Experiment ID: 20000235 Result: Up-regulated in Transcription
  misc_feature: MA Experiment 20000235 PARAMETER Experiment Name: At_Siliques_P Parameter: Age (day) Value: 21
  misc_feature: MA Experiment 20000235 PARAMETER Experiment Name: At_Siliques_P Parameter: Organism Value: A. thaliana
  misc_feature: MA Experiment 20000235 PARAMETER Experiment Name: At_Siliques_P Parameter: Plant Line Value: WS
  misc_feature: MA Experiment 20000235 PARAMETER Experiment Name: At_Siliques_P Parameter: Tissue Value: 5-10mm Siliques vs. Whole Plant
  misc_feature: MA Experiment ID: 20000264 Result: Up-regulated in Transcription
  misc_feature: MA Experiment 20000264 PARAMETER Experiment Name: At_Open_Flower_P Parameter: Age (day) Value: 21
  misc_feature: MA Experiment 20000264 PARAMETER Experiment Name: At_Open_Flower_P Parameter: Plant Line Value: WS
  misc_feature: MA Experiment 20000264 PARAMETER Experiment Name: At_Open_Flower_P Parameter: Tissue Value: Open Flower vs. Whole Plant
  misc_feature: MA Experiment ID: 20000794 Result: Up-regulated in Transcription
  misc_feature: MA Experiment 20000794 PARAMETER Experiment Name: At_Petals_P Parameter: Age (day) Value: 23-25 days
  misc_feature: MA Experiment 20000794 PARAMETER Experiment Name: At_Petals_P Parameter: Plant Line Value: WS
  misc_feature: MA Experiment 20000794 PARAMETER Experiment Name: At_Petals_P Parameter: Tissue Value: Petals vs. Whole plant
  misc_feature: MA Experiment ID: 20001910 Result: Up-regulated in Transcription
  misc_feature: MA Experiment 20001910 PARAMETER Experiment Name: At_Drought_Reproduction_P Parameter: Age (day) Value: 37
  misc_feature: MA Experiment 20001910 PARAMETER Experiment Name: At_Drought_Reproduction_P Parameter: Organism Value: A. thaliana
  misc_feature: MA Experiment 20001910 PARAMETER Experiment Name: At_Drought_Reproduction_P Parameter: Plant Line Value: WS
  misc_feature: MA Experiment 20001910 PARAMETER Experiment Name: At_Drought_Reproduction_P Parameter: Timepoint (day) Value: 7
  misc_feature: MA Experiment 20001910 PARAMETER Experiment Name: At_Drought_Reproduction_P Parameter: Tissue Value: Flowers
  misc_feature: MA Experiment 20001910 PARAMETER Experiment Name: At_Drought_Reproduction_P Parameter: Treatment Value: Drought vs. No Drought
atgaatcctatgcgtgatcaaccgggcagcccttatggagattcaactcctcgtagtccgttttctcccttttctccattatctgtagatgataggcatagaaatcatgcagatacaaaaactcctcgtagtcctttctctccattttctccattatccggagatgaaaggcacaaaagtctggcagagtccaaatttcagcaagcccttgccagctctggccaattagatccattatctcctggatcaatgcatcatggaggacacaagtttcatgaggttttccaaatgaaacaggggcgttatgatcttcaagcttcaaagatttctgaaatgatgaaatcaagtagcttagataatgctcctacgcagtcattgctaagcgtcttgaatggaattctagatgaaagtatcgaaagaaagaatggtgaaatccctcagcgtgtggcatgcctgttaagaaaagtcgtgcaggagattgagcggcgtatatcaactcaagctgaacatctaagaacgcaaaacaatattttcaaaactcgcgaggaaaaataccagtcaaggatcaatgtccttgaagccttagcatcaggaactggtgtagaacacgagacagaaaagtcaatgtgggaggaaaagaagaaacacgaagaggaagatatggttaagctaatgaaacaaaatgatcagcacaacctcgaaatttctgcgctgaagcaagaactggagacaactaaaagaaaatatgaacaacaatactcgcaaattgaaagccaaacaaagacagagaagtcaaagtgggaagaacagaagaaaaatgaagaggaggatatggacaagctattgaaagaaaatgatcagttcaaccttcagatttctgcgttaaggcaagagctggagacaacaagaaaagcgtatgaacagcaatgctcgcaaatggaaagccaaacaatggtcgctacaacaggacttgagagcaggctcaaggaacttgaacaagagggaaaagtggtaaacactgcaaaaaatgcccttgaggaaagggttaaagagcttgaacaaatgggaaaagaagcacattctgctaaaaatgctcttgaggaaaagattaaacagcttcaacaaatggaaaaagaaacaaaaactgctaatacaagccttgaaggaaagatccaagagcttgaacaaaacctcgtaatgtggaagactaaagtcagagaaatggagaaaaagtctgagtccaaccaccaaagatggagtcagaaagaactttcctataaaagctttattgataaccagtctcaggcactactggagttgaggtcctattcaagatccatcaagcaagaaatactgaaggtacaagagaactatacagaccagttcagccaactaggaaagaaactgattgaacttagcaatgctgctgaaaactatcacgctgtactaactgaaaaccggaagcttttcaacgagcttcaggagctaaaaggaaacatcagagtgttttgccgggtgaggcctttccttcctgcacagggtgcagcaaacacagtggtcgagtatgtcggtgaagatggagaattagtagttaccaatccaactagacccgggaaagacggtcttcgccagtttaagttcaacaaggtgtatagtccaactgcttcacaagctgacgtcttttcagacataagaccgctggttaggtcagtacttgatgggtacaatgtttgtatatttgcatatggccagacaggatcagggaaaacttatacaatgactggtccagatggatcaagtgaagaagactggggagtaaattatcgcgctctcaatgatctttttaaaatctctcagtccagaaagggaaacatatcgtatgaagtcggggtgcaaatggtggagatatataatgaacaaccattcctttttgttttccttgaccttcacacaacactagggatcctttctacaactcaacaaaatggcctggctgtgcctgacgcaagcatgtatcctgtgacatcaacttcagatgtgattacattgatggacattggactacagaatcgagccgttggttctactgccttgaatgaaagaagtagtcgttcacatagcattgtcactgttcacgttcgcggtaaagatttaaagaccggttccgtgctatacggtaatcttcatttggtggatctggcaggaagtgagagagtagatcgctctgaagttacaggagacagactaagagaagcacaacatataaacaagtcgctctcatctcttggagatgtgatattctctctcgcttcaaagagttctcatgtaccatacagaaacagcaagctaacacagcttctccaaacctctcttggaggacgagcaaagacactaatgtttgtgcaactcaaccctgacgctacttcatactcagagtcaatgagtaccttgaaatttgcagagcgtgtctctggagtcgaacttggtgctgcaaagacaagtaaagaaggtaaagatgttcgagacttgatggaacagttagcgtcccttaaggacaccatagcgagaaaagacgaagagatagagagacttcagcatcagcctcagagacttcagaaatcaatgatgagaagaaaaagcataggacatacagatgacataaactcagatacaggagaatattcatcacaatcaagatactctgttactgacggcgaaagtttagcatcctctgccgaggcagagtacgacgagagactaagcgagattacgtctgatgctgcatctatgggaacacaaggatccattgatgttaccaaaagaccacccagaatttcagacagagctaagtcggtgactgcaaaatcatctacgagtgtaacacggccactcgataaacttcggaaagtagctacaagaacaacatcgaccgttgctaaggtcacgggcttgacatcatcaagtaaaggcttagcgtcatcaagcattaagaagacgggaagtacatcaagtttggcaaagtcttcaaaacggtgggcgtaa

SEQ ID NO: 88591 - protein, 1013 aa, Arabidopsis thaliana
  peptide (1)..(1013): Ceres Seq. ID no. 12711085
  misc_feature (62)..(500): Pfam Name: Myosin tail Pfam Description: Myosin tail
  misc_feature (6)..(640): Homolog of NCBI NO: 6714287 NR Description: F15H18.10 [Arabidopsis thaliana]
  misc_feature (645)..(1013): Homolog of NCBI NO: 6714287 NR Description: F15H18.10 [Arabidopsis thaliana]
  misc_feature (279)..(952): Homolog of NCBI NO: 25404429 NR Description: kinesin-like protein, 73641-79546 [imported] -
  misc_feature (279)..(952): Homolog of NCBI NO: 30696876 NR Description: kinesin-related protein [Arabidopsis thaliana]
  misc_feature (559)..(952): Homolog of NCBI NO: 6633835 NR Description: F2K11.1 [Arabidopsis thaliana]
  misc_feature (317)..(557): Homolog of NCBI NO: 6633835 NR Description: F2K11.1 [Arabidopsis thaliana]
  misc_feature (91)..(381): Homolog of NCBI NO: 6633835 NR Description: F2K11.1 [Arabidopsis thaliana]
  misc_feature (333)..(628): Homolog of NCBI NO: 34909422 NR Description: putative kinesin-like protein [Oryza sativa
  misc_feature (690)..(931): Homolog of NCBI NO: 34909422 NR Description: putative kinesin-like protein [Oryza sativa
  misc_feature (302)..(904): Homolog of NCBI NO: 18421069 NR Description: kinesin-related protein; protein id: At5g27000.1
MNPMRDQPGSPYGDSTPRSPFSPFSPLSVDDRHRNHADTKTPRSPFSPFSPLSGDERHKSLAESKFQQALASSGQLDPLSPGSMHHGGHKFHEVFQMKQGRYDLQASKISEMMKSSSLDNAPTQSLLSVLNGILDESIERKNGEIPQRVACLLRKVVQEIERRISTQAEHLRTQNNIFKTREEKYQSRINVLEALASGTGVEHETEKSMWEEKKKHEEEDMVKLMKQNDQHNLEISALKQELETTKRKYEQQYSQIESQTKTEKSKWEEQKKNEEEDMDKLLKENDQFNLQISALRQELETTRKAYEQQCSQMESQTMVATTGLESRLKELEQEGKVVNTAKNALEERVKELEQMGKEAHSAKNALEEKIKQLQQMEKETKTANTSLEGKIQELEQNLVMWKTKVREMEKKSESNHQRWSQKELSYKSFIDNQSQALLELRSYSRSIKQEILKVQENYTDQFSQLGKKLIELSNAAENYHAVLTENRKLFNELQELKGNIRVFCRVRPFLPAQGAANTVVEYVGEDGELVVTNPTRPGKDGLRQFKFNKVYSPTASQADVFSDIRPLVRSVLDGYNVCIFAYGQTGSGKTYTMTGPDGSSEEDWGVNYRALNDLFKISQSRKGNISYEVGVQMVEIYNEQPFLFVFLDLHTTLGILSTTQQNGLAVPDASMYPVTSTSDVITLMDIGLQNRAVGSTALNERSSRSHSIVTVHVRGKDLKTGSVLYGNLHLVDLAGSERVDRSEVTGDRLREAQHINKSLSSLGDVIFSLASKSSHVPYRNSKLTQLLQTSLGGRAKTLMFVQLNPDATSYSESMSTLKFAERVSGVELGAAKTSKEGKDVRDLMEQLASLKDTIARKDEEIERLQHQPQRLQKSMMRRKSIGHTDDINSDTGEYSSQSRYSVTDGESLASSAEAEYDERLSEITSDAASMGTQGSIDVTKRPPRISDRAKSVTAKSSTSVTRPLDKLRKVATRTTSTVAKVTGLTSSSKGLASSSIKKTGSTSSLAKSSKRWA

SEQ ID NO: 88592 - protein, 1010 aa, Arabidopsis thaliana
  peptide (1)..(1010): Ceres Seq. ID no. 12711086
  misc_feature (59)..(497): Pfam Name: Myosin tail Pfam Description: Myosin tail
  misc_feature (3)..(637): Homolog of NCBI NO: 6714287 NR Description: F15H18.10 [Arabidopsis thaliana]
  misc_feature (642)..(1010): Homolog of NCBI NO: 6714287 NR Description: F15H18.10 [Arabidopsis thaliana]
  misc_feature (276)..(949): Homolog of NCBI NO: 25404429 NR Description: kinesin-like protein, 73641-79546 [imported] -
  misc_feature (276)..(949): Homolog of NCBI NO: 30696876 NR Description: kinesin-related protein [Arabidopsis thaliana]
  misc_feature (556)..(949): Homolog of NCBI NO: 6633835 NR Description: F2K11.1 [Arabidopsis thaliana]
  misc_feature (314)..(554): Homolog of NCBI NO: 6633835 NR Description: F2K11.1 [Arabidopsis thaliana]
  misc_feature (88)..(378): Homolog of NCBI NO: 6633835 NR Description: F2K11.1 [Arabidopsis thaliana]
  misc_feature (330)..(625): Homolog of NCBI NO: 34909422 NR Description: putative kinesin-like protein [Oryza sativa
  misc_feature (687)..(928): Homolog of NCBI NO: 34909422 NR Description: putative kinesin-like protein [Oryza sativa
  misc_feature (299)..(901): Homolog of NCBI NO: 18421069 NR Description: kinesin-related protein; protein id: At5g27000.1
MRDQPGSPYGDSTPRSPFSPFSPLSVDDRHRNHADTKTPRSPFSPFSPLSGDERHKSLAESKFQQALASSGQLDPLSPGSMHHGGHKFHEVFQMKQGRYDLQASKISEMMKSSSLDNAPTQSLLSVLNGILDESIERKNGEIPQRVACLLRKVVQEIERRISTQAEHLRTQNNIFKTREEKYQSRINVLEALASGTGVEHETEKSMWEEKKKHEEEDMVKLMKQNDQHNLEISALKQELETTKRKYEQQYSQIESQTKTEKSKWEEQKKNEEEDMDKLLKENDQFNLQISALRQELETTRKAYEQQCSQMESQTMVATTGLESRLKELEQEGKVVNTAKNALEERVKELEQMGKEAHSAKNALEEKIKQLQQMEKETKTANTSLEGKIQELEQNLVMWKTKVREMEKKSESNHQRWSQKELSYKSFIDNQSQALLELRSYSRSIKQEILKVQENYTDQFSQLGKKLIELSNAAENYHAVLTENRKLFNELQELKGNIRVFCRVRPFLPAQGAANTVVEYVGEDGELVVTNPTRPGKDGLRQFKFNKVYSPTASQADVFSDIRPLVRSVLDGYNVCIFAYGQTGSGKTYTMTGPDGSSEEDWGVNYRALNDLFKISQSRKGNISYEVGVQMVEIYNEQPFLFVFLDLHTTLGILSTTQQNGLAVPDASMYPVTSTSDVITLMDIGLQNRAVGSTALNERSSRSHSIVTVHVRGKDLKTGSVLYGNLHLVDLAGSERVDRSEVTGDRLREAQHINKSLSSLGDVIFSLASKSSHVPYRNSKLTQLLQTSLGGRAKTLMFVQLNPDATSYSESMSTLKFAERVSGVELGAAKTSKEGKDVRDLMEQLASLKDTIARKDEEIERLQHQPQRLQKSMMRRKSIGHTDDINSDTGEYSSQSRYSVTDGESLASSAEAEYDERLSEITSDAASMGTQGSIDVTKRPPRISDRAKSVTAKSSTSVTRPLDKLRKVATRTTSTVAKVTGLTSSSKGLASSSIKKTGSTSSLAKSSKRWA

SEQ ID NO: 88593 - protein, 930 aa, Arabidopsis thaliana
  peptide (1)..(930): Ceres Seq. ID no. 12711087
  misc_feature (1)..(417): Pfam Name: Myosin tail Pfam Description: Myosin tail
  misc_feature (1)..(557): Homolog of NCBI NO: 6714287 NR Description: F15H18.10 [Arabidopsis thaliana]
  misc_feature (562)..(930): Homolog of NCBI NO: 6714287 NR Description: F15H18.10 [Arabidopsis thaliana]
  misc_feature (196)..(869): Homolog of NCBI NO: 25404429 NR Description: kinesin-like protein, 73641-79546 [imported] -
  misc_feature (196)..(869): Homolog of NCBI NO: 30696876 NR Description: kinesin-related protein [Arabidopsis thaliana]
  misc_feature (476)..(869): Homolog of NCBI NO: 6633835 NR Description: F2K11.1 [Arabidopsis thaliana]
  misc_feature (234)..(474): Homolog of NCBI NO: 6633835 NR Description: F2K11.1 [Arabidopsis thaliana]
  misc_feature (8)..(298): Homolog of NCBI NO: 6633835 NR Description: F2K11.1 [Arabidopsis thaliana]
  misc_feature (250)..(545): Homolog of NCBI NO: 34909422 NR Description: putative kinesin-like protein [Oryza sativa
  misc_feature (607)..(848): Homolog of NCBI NO: 34909422 NR Description: putative kinesin-like protein [Oryza sativa
  misc_feature (219)..(821): Homolog of NCBI NO: 18421069 NR Description: kinesin-related protein; protein id: At5g27000.1
MHHGGHKFHEVFQMKQGRYDLQASKISEMMKSSSLDNAPTQSLLSVLNGILDESIERKNGEIPQRVACLLRKVVQEIERRISTQAEHLRTQNNIFKTREEKYQSRINVLEALASGTGVEHETEKSMWEEKKKHEEEDMVKLMKQNDQHNLEISALKQELETTKRKYEQQYSQIESQTKTEKSKWEEQKKNEEEDMDKLLKENDQFNLQISALRQELETTRKAYEQQCSQMESQTMVATTGLESRLKELEQEGKVVNTAKNALEERVKELEQMGKEAHSAKNALEEKIKQLQQMEKETKTANTSLEGKIQELEQNLVMWKTKVREMEKKSESNHQRWSQKELSYKSFIDNQSQALLELRSYSRSIKQEILKVQENYTDQFSQLGKKLIELSNAAENYHAVLTENRKLFNELQELKGNIRVFCRVRPFLPAQGAANTVVEYVGEDGELVVTNPTRPGKDGLRQFKFNKVYSPTASQADVFSDIRPLVRSVLDGYNVCIFAYGQTGSGKTYTMTGPDGSSEEDWGVNYRALNDLFKISQSRKGNISYEVGVQMVEIYNEQPFLFVFLDLHTTLGILSTTQQNGLAVPDASMYPVTSTSDVITLMDIGLQNRAVGSTALNERSSRSHSIVTVHVRGKDLKTGSVLYGNLHLVDLAGSERVDRSEVTGDRLREAQHINKSLSSLGDVIFSLASKSSHVPYRNSKLTQLLQTSLGGRAKTLMFVQLNPDATSYSESMSTLKFAERVSGVELGAAKTSKEGKDVRDLMEQLASLKDTIARKDEEIERLQHQPQRLQKSMMRRKSIGHTDDINSDTGEYSSQSRYSVTDGESLASSAEAEYDERLSEITSDAASMGTQGSIDVTKRPPRISDRAKSVTAKSSTSVTRPLDKLRKVATRTTSTVAKVTGLTSSSKGLASSSIKKTGSTSSLAKSSKRWA

SEQ ID NO: 88594 - DNA, 1683 bp, Arabidopsis thaliana
  misc_feature (1)..(1683): Ceres Seq. ID no. 12711092
  misc_feature: MA Experiment ID: 20000306 Result: Down-regulated in Transcription
  misc_feature: MA Experiment 20000306 PARAMETER Experiment Name: At_Germinating_Seeds_Sub_P Parameter: Age (hr) Value: 6 vs. 0
  misc_feature: MA Experiment 20000306 PARAMETER Experiment Name: At_Germinating_Seeds_Sub_P Parameter: Organism Value: A. thaliana
  misc_feature: MA Experiment 20000306 PARAMETER Experiment Name: At_Germinating_Seeds_Sub_P Parameter: Plant Line Value: WS
  misc_feature: MA Experiment 20000306 PARAMETER Experiment Name: At_Germinating_Seeds_Sub_P Parameter: Tissue Value: Germinating Seeds
  misc_feature: MA Experiment ID: 20000307 Result: Down-regulated in Transcription
  misc_feature: MA Experiment 20000307 PARAMETER Experiment Name: At_Germinating_Seeds_Sub_P Parameter: Age (hr) Value: 24 vs. 0
  misc_feature: MA Experiment 20000307 PARAMETER Experiment Name: At_Germinating_Seeds_Sub_P Parameter: Organism Value: A. thaliana
  misc_feature: MA Experiment 20000307 PARAMETER Experiment Name: At_Germinating_Seeds_Sub_P Parameter: Plant Line Value: WS
  misc_feature: MA Experiment 20000307 PARAMETER Experiment Name: At_Germinating_Seeds_Sub_P Parameter: Tissue Value: Germinating Seeds
  misc_feature: MA Experiment ID: 20000328 Result: Up-regulated in Transcription
  misc_feature: MA Experiment 20000328 PARAMETER Experiment Name: At_42deg_Heat_Sub_P Parameter: Age (day) Value: 14
  misc_feature: MA Experiment 20000328 PARAMETER Experiment Name: At_42deg_Heat_Sub_P Parameter: Organism Value: A. thaliana
  misc_feature: MA Experiment 20000328 PARAMETER Experiment Name: At_42deg_Heat_Sub_P Parameter: Plant Line Value: WS
  misc_feature: MA Experiment 20000328 PARAMETER Experiment Name: At_42deg_Heat_Sub_P Parameter: Temperature (deg C) Value: 42 vs. 22
  misc_feature: MA Experiment 20000328 PARAMETER Experiment Name: At_42deg_Heat_Sub_P Parameter: Timepoint (hr) Value: 6
  misc_feature: MA Experiment 20000328 PARAMETER Experiment Name: At_42deg_Heat_Sub_P Parameter: Tissue Value: Aerial
  misc_feature: MA Experiment ID: 20000347 Result: Up-regulated in Transcription
  misc_feature: MA Experiment 20000347 PARAMETER Experiment Name: At_2mM_SA_Sub_P Parameter: Age (day) Value: 14
  misc_feature: MA Experiment 20000347 PARAMETER Experiment Name: At_2mM_SA_Sub_P Parameter: Organism Value: A. thaliana
  misc_feature: MA Experiment 20000347 PARAMETER Experiment Name: At_2mM_SA_Sub_P Parameter: Plant Line Value: WS
  misc_feature: MA Experiment 20000347 PARAMETER Experiment Name: At_2mM_SA_Sub_P Parameter: Timepoint (hr) Value: 6
  misc_feature: MA Experiment 20000347 PARAMETER Experiment Name: At_2mM_SA_Sub_P Parameter: Tissue Value: Aerial
  misc_feature: MA Experiment 20000347 PARAMETER Experiment Name: At_2mM_SA_Sub_P Parameter: Treatment Value: 2mM SA vs. No Treatment
  misc_feature: MA Experiment ID: 20000352 Result: Up-regulated in Transcription
  misc_feature: MA Experiment 20000352 PARAMETER Experiment Name: At_Drought_Sub_P Parameter: Age (day) Value: 7
  misc_feature: MA Experiment 20000352 PARAMETER Experiment Name: At_Drought_Sub_P Parameter: Organism Value: A. thaliana
  misc_feature: MA Experiment 20000352 PARAMETER Experiment Name: At_Drought_Sub_P Parameter: Plant Line Value: WS
  misc_feature: MA Experiment 20000352 PARAMETER Experiment Name: At_Drought_Sub_P Parameter: Timepoint (hr) Value: 6
  misc_feature: MA Experiment 20000352 PARAMETER Experiment Name: At_Drought_Sub_P Parameter: Tissue Value: Whole Plant
  misc_feature: MA Experiment 20000352 PARAMETER Experiment Name: At_Drought_Sub_P Parameter: Treatment Value: Drought vs. No Drought
  misc_feature: MA Experiment ID: 20001807 Result: Down-regulated in Transcription
  misc_feature: MA Experiment 20001807 PARAMETER Experiment Name: At_50mM_NH4NO3_L-to-H_Sub_P Parameter: Timepoint (hr) Value: 6
  misc_feature: MA Experiment 20001807 PARAMETER Experiment Name: At_50mM_NH4NO3_L-to-H_Sub_P Parameter: Tissue Value: Leaf
  misc_feature: MA Experiment 20001807 PARAMETER Experiment Name: At_50mM_NH4NO3_L-to-H_Sub_P Parameter: Treatment Value: 50mM NH4NO3 vs 100mM Mannitol
atgaaagtgaacgaggaaaacaacaagccgacaaagacccatgtcttaatcttcccatttccggcgcaaggtcacatgattcccctcctcgacttcacccaccgccttgctctccgcggcggcgccgccttaaaaataaccgtcctagtcactccaaaaaaccttccttttctctctccgcttctctccgccgtagttaacatcgaaccacttatcctcccttttccctcccacccttcaatcccctccggcgtcgaaaacgtccaagacttacctccttcaggcttccctttaatgatccacgcgcttggtaatctccacgcgccgcttatctcttggattacttctcacccttctcctccagtagccatcgtatctgatttcttccttggttggaccaaaaacctcggaatccctcgtttcgatttctctccctccgctgctatcacttgctgcatactcaatactctctggatcgaaatgcccaccaagatcaacgaagatgacgataacgagatcctccactttcccaagatcccgaattgtccaaaataccgttttgatcagatctcctctctttacagaagttacgttcacggagatccagcttgggagttcataagagactcctttagagataacgtggcgagttggggactcgtcgtgaactcgttcaccgccatggaaggtgtttatctcgaacatcttaagcgagagatgggccatgatcgtgtatgggctgtaggcccaattattccgttatctggggataaccgtggtggcccgacttctgtttctgttgatcacgtgatgtcgtggcttgacgcacgtgaggataaccacgtggtgtacgtgtgctttggaagtcaagtagttttgactaaagagcagactcttgcactcgcctctgggcttgagaaaagcggcgtccatttcatatgggccgtaaaggagcccgttgagaaagactcaacacgtggcaacatcctggacggtttcgacgatcgcgtggctgggagaggtctggtgatcagaggatgggctccacaagtagctgtgctacgtcaccgagccgttggcgcgtttttaacgcactgtggttggaactctgtggtggaggcggttgtcgccggcgttttgatgctgacgtggccgatgagagctgaccagtacactgacgcgtctctggtggttgatgagttgaaagtaggtgtgcgtgcttgcgaaggacctgacacggtgcctgacccggacgagttagctcgagttttcgctgattccgtgaccggaaatcaaacggagaggatcaaagccgtggagctgaggaaagcagcgttggatgcgattcaagaacgtgggagctcagtgaatgatttagatggatttatccaacatgtcgttagagctagaatccgctgcaacgacctcaccgattcttctcgtaaccctttctccaccttccgactcgtaaacttccctaatccatcaagaaccggtcttcacgttgtctctgccgccaaaaaaccttccacacagaccggtcgtttcgacagcaagaagcgtcggactctcgttcctacaacgactaagaacagcaggaagagggaaacgaaggttttgacggcgagaacccgccgtctcagatcgttatcaacgacgaagatggagatagaacggtggtga

SEQ ID NO: 88595 - protein, 560 aa, Arabidopsis thaliana
  peptide (1)..(560): Ceres Seq. ID no. 12711093
  misc_feature (1)..(560): Homolog of NCBI NO: 25406301 NR Description: protein glucosyltransferase F2P9.25 [imported] - thaliana >gi|12325153|gb|AAG52529.1|AC016662_23 putative
  misc_feature (1)..(467): Homolog of NCBI NO: 22330612 NR Description: putative glucosyltransferase; protein id:
  misc_feature (26)..(467): Homolog of NCBI NO: 20260128 NR Description: putative glucosyltransferase [Arabidopsis
  misc_feature (12)..(441): Homolog of NCBI NO: 15223779 NR Description: putative glucosyl transferase; protein id: [Arabidopsis thaliana] >gi|25286807|pir||H96549 hypothetical
  misc_feature (6)..(464): Homolog of NCBI NO: 15242769 NR Description: putative protein; protein id: At5g03490.1
  misc_feature (27)..(468): Homolog of NCBI NO: 19911191 NR Description: glucosyltransferase like protein [Vigna angularis]
  misc_feature (7)..(470): Homolog of NCBI NO: 2232354 NR Description: UDPG glucosyltransferase [Solanum berthaultii]
  misc_feature (206)..(463): Homolog of NCBI NO: 21536579 NR Description: unknown [Arabidopsis thaliana]
  misc_feature (12)..(160): Homolog of NCBI NO: 21536579 NR Description: unknown [Arabidopsis thaliana]
  misc_feature (36)..(466): Homolog of NCBI NO: 10241430 NR Description: putative glucosyltransferase [Oryza sativa
MKVNEENNKPTKTHVLIFPFPAQGHMIPLLDFTHRLALRGGAALKITVLVTPKNLPFLSPLLSAVVNIEPLILPFPSHPSIPSGVENVQDLPPSGFPLMIHALGNLHAPLISWITSHPSPPVAIVSDFFLGWTKNLGIPRFDFSPSAAITCCILNTLWIEMPTKINEDDDNEILHFPKIPNCPKYRFDQISSLYRSYVHGDPAWEFIRDSFRDNVASWGLVVNSFTAMEGVYLEHLKREMGHDRVWAVGPIIPLSGDNRGGPTSVSVDHVMSWLDAREDNHVVYVCFGSQVVLTKEQTLALASGLEKSGVHFIWAVKEPVEKDSTRGNILDGFDDRVAGRGLVIRGWAPQVAVLRHRAVGAFLTHCGWNSVVEAVVAGVLMLTWPMRADQYTDASLVVDELKVGVRACEGPDTVPDPDELARVFADSVTGNQTERIKAVELRKAALDAIQERGSSVNDLDGFIQHVVRARIRCNDLTDSSRNPFSTFRLVNFPNPSRTGLHVVSAAKKPSTQTGRFDSKKRRTLVPTTTKNSRKRETKVLTARTRRLRSLSTTKMEIERW

SEQ ID NO: 88596 - protein, 535 aa, Arabidopsis thaliana
  peptide (1)..(535): Ceres Seq. ID no. 12711094
  misc_feature (1)..(535): Homolog of NCBI NO: 25406301 NR Description: protein glucosyltransferase F2P9.25 [imported] - thaliana >gi|12325153|gb|AAG52529.1|AC016662_23 putative
  misc_feature (1)..(442): Homolog of NCBI NO: 22330612 NR Description: putative glucosyltransferase; protein id:
  misc_feature (1)..(442): Homolog of NCBI NO: 20260128 NR Description: putative glucosyltransferase [Arabidopsis
  misc_feature (1)..(416): Homolog of NCBI NO: 15223779 NR Description: putative glucosyl transferase; protein id: [Arabidopsis thaliana] >gi|25286807|pir||H96549 hypothetical
  misc_feature (1)..(439): Homolog of NCBI NO: 15242769 NR Description: putative protein; protein id: At5g03490.1
  misc_feature (2)..(443): Homolog of NCBI NO: 19911191 NR Description: glucosyltransferase like protein [Vigna angularis]
  misc_feature (1)..(445): Homolog of NCBI NO: 2232354 NR Description: UDPG glucosyltransferase [Solanum berthaultii]
  misc_feature (181)..(438): Homolog of NCBI NO: 21536579 NR Description: unknown [Arabidopsis thaliana]
  misc_feature (1)..(135): Homolog of NCBI NO: 21536579 NR Description: unknown [Arabidopsis thaliana]
  misc_feature (11)..(441): Homolog of NCBI NO: 10241430 NR Description: putative glucosyltransferase [Oryza sativa
MIPLLDFTHRLALRGGAALKITVLVTPKNLPFLSPLLSAVVNIEPLILPFPSHPSIPSGVENVQDLPPSGFPLMIHALGNLHAPLISWITSHPSPPVAIVSDFFLGWTKNLGIPRFDFSPSAAITCCILNTLWIEMPTKINEDDDNEILHFPKIPNCPKYRFDQISSLYRSYVHGDPAWEFIRDSFRDNVASWGLVVNSFTAMEGVYLEHLKREMGHDRVWAVGPIIPLSGDNRGGPTSVSVDHVMSWLDAREDNHVVYVCFGSQVVLTKEQTLALASGLEKSGVHFIWAVKEPVEKDSTRGNILDGFDDRVAGRGLVIRGWAPQVAVLRHRAVGAFLTHCGWNSVVEAVVAGVLMLTWPMRADQYTDASLVVDELKVGVRACEGPDTVPDPDELARVFADSVTGNQTERIKAVELRKAALDAIQERGSSVNDLDGFIQHVVRARIRCNDLTDSSRNPFSTFRLVNFPNPSRTGLHVVSAAKKPSTQTGRFDSKKRRTLVPTTTKNSRKRETKVLTARTRRLRSLSTTKMEIERW

SEQ ID NO: 88597 - protein, 462 aa, Arabidopsis thaliana
  peptide (1)..(462): Ceres Seq. ID no. 12711095
  misc_feature (1)..(462): Homolog of NCBI NO: 25406301 NR Description: protein glucosyltransferase F2P9.25 [imported] - thaliana >gi|12325153|gb|AAG52529.1|AC016662_23 putative
  misc_feature (1)..(369): Homolog of NCBI NO: 22330612 NR Description: putative glucosyltransferase; protein id:
  misc_feature (1)..(369): Homolog of NCBI NO: 20260128 NR Description: putative glucosyltransferase [Arabidopsis
  misc_feature (1)..(343): Homolog of NCBI NO: 15223779 NR Description: putative glucosyl transferase; protein id: [Arabidopsis thaliana] >gi|25286807|pir||H96549 hypothetical
  misc_feature (1)..(366): Homolog of NCBI NO: 15242769 NR Description: putative protein; protein id: At5g03490.1
  misc_feature (1)..(370): Homolog of NCBI NO: 19911191 NR Description: glucosyltransferase like protein [Vigna angularis]
  misc_feature (1)..(372): Homolog of NCBI NO: 2232354 NR Description: UDPG glucosyltransferase [Solanum berthaultii]
  misc_feature (108)..(365): Homolog of NCBI NO: 21536579 NR Description: unknown [Arabidopsis thaliana]
  misc_feature (1)..(62): Homolog of NCBI NO: 21536579 NR Description: unknown [Arabidopsis thaliana]
  misc_feature (1)..(368): Homolog of NCBI NO: 10241430 NR Description: putative glucosyltransferase [Oryza sativa
MIHALGNLHAPLISWITSHPSPPVAIVSDFFLGWTKNLGIPRFDFSPSAAITCCILNTLWIEMPTKINEDDDNEILHFPKIPNCPKYRFDQISSLYRSYVHGDPAWEFIRDSFRDNVASWGLVVNSFTAMEGVYLEHLKREMGHDRVWAVGPIIPLSGDNRGGPTSVSVDHVMSWLDAREDNHVVYVCFGSQVVLTKEQTLALASGLEKSGVHFIWAVKEPVEKDSTRGNILDGFDDRVAGRGLVIRGWAPQVAVLRHRAVGAFLTHCGWNSVVEAVVAGVLMLTWPMRADQYTDASLVVDELKVGVRACEGPDTVPDPDELARVFADSVTGNQTERIKAVELRKAALDAIQERGSSVNDLDGFIQHVVRARIRCNDLTDSSRNPFSTFRLVNFPNPSRTGLHVVSAAKKPSTQTGRFDSKKRRTLVPTTTKNSRKRETKVLTARTRRLRSLSTTKMEIERW

SEQ ID NO: 88598 - DNA, 987 bp, Arabidopsis thaliana
  misc_feature (1)..(987): Ceres Seq. ID no. 12711102
  misc_feature: MA Experiment ID: 108434 Result: Down-regulated in Transcription
  misc_feature: MA Experiment 108434 PARAMETER Experiment Name: At_Root_Tips_cDNA_P Parameter: Tissue Value: Root Tips
  misc_feature: MA Experiment ID: 108561 Result: Up-regulated in Transcription
  misc_feature: MA Experiment 108561 PARAMETER Experiment Name: At_100uM_ABA_cDNA_P Parameter: Timepoint (hr) Value: 6
  misc_feature: MA Experiment 108561 PARAMETER Experiment Name: At_100uM_ABA_cDNA_P Parameter: Tissue Value: Aerial
  misc_feature: MA Experiment 108561 PARAMETER Experiment Name: At_100uM_ABA_cDNA_P Parameter: Treatment Value: 100uM ABA vs. No Treatment
  misc_feature: MA Experiment ID: 20000072 Result: Up-regulated in Transcription
  misc_feature: MA Experiment 20000072 PARAMETER Experiment Name: At_100uM_ABA_Mutants_cDNA_P Parameter: Plant Line Value: CS8105
  misc_feature: MA Experiment 20000072 PARAMETER Experiment Name: At_100uM_ABA_Mutants_cDNA_P Parameter: Timepoint (hr) Value: 6
  misc_feature: MA Experiment 20000072 PARAMETER Experiment Name: At_100uM_ABA_Mutants_cDNA_P Parameter: Tissue Value: Aerial
  misc_feature: MA Experiment 20000072 PARAMETER Experiment Name: At_100uM_ABA_Mutants_cDNA_P Parameter: Treatment Value: 100uM ABA vs. No Treatment
atgaggtcgtttgtctcgttgatttctcttctccttcttctctcattttcttcatctgttctctcaaccaaaaagtcatcatttcaaaaacttccggtgccaggaaacagaacaggccctgaagctttcgcttttgattccaccggaaaaggattctacaccggagtcaccggcggtaaaatcctaaaatatcttccaaagaaaggttatgtcgactttgcccagatcacaaactcttcgaagtcttcgttgtgcgacggagcacttggaaccactaacgtcgaaaaatgtggtcgaccagccggaatagccttcaacacgaaaacaggtgatctttacgtcgcagatgctgcattgggtctccacgtcatccctcgccgtgggggtttggctaagaagatcgccgacagtgtcggcggcaagccctttttgtttcttgacgggcttgacgtagatcccactaccggcgtcgtctatttcacttccttcagctcaacatttggccctagggatgtgttgaaagcagtggcaacaaaagactcgaccggtaagttcttcaaatacgatccatcaaaaaaggtcgtgactgtattgatggaaggtcttagcggctcagccggatgtgccgttagctcagatggttcattcgtgctggttggtcagttcacaaaaagtaacatcaagaggtattggatcaaaggatccaaagctggtacttctgaagacttcaccaactcggtctcgaaccctgacaacatcaagaggatcggttctactggaaacttttgggttgcttcggtcgtgaactcagccaccggaccgacaaacccttcggcggttaaagtcagttctgccggtaaagtgcttcagaccattcccctaaaagacaagtttggggatactttggttagtgaagttaacgaatacaaaggacagctttacatcggagctctttttggtcctttcgccggaattcttaagctttaa

SEQ ID NO: 88599 - protein, 328 aa, Arabidopsis thaliana
  peptide (1)..(328): Ceres Seq. ID no. 12711103
  misc_feature (2)..(323): Pfam Name: Strictosidine synthase Pfam Description: Strictosidine synthase
  misc_feature (1)..(328): Homolog of NCBI NO: 21431845 NR Description: Strictosidine synthase 3 precursor (SS-3)
  misc_feature (1)..(328): Homolog of NCBI NO: 30698979 NR Description: strictosidine synthase family [Arabidopsis
  misc_feature (1)..(314): Homolog of NCBI NO: 1754987 NR Description: strictosidine synthase
  misc_feature (1)..(328): Homolog of NCBI NO: 15221106 NR Description: strictosidine synthase family; protein id: supported by cDNA: gi_14334593, supported by cDNA: gi_17104522, by cDNA: gi_1754984 [Arabidopsis thaliana]
  misc_feature (1)..(328): Homolog of NCBI NO: 1754983 NR Description: strictosidine synthase >gi|1754985|gb|AAB40594.1|
  misc_feature (1)..(328): Homolog of NCBI NO: 15221105 NR Description: strictosidine synthase family; protein id: supported by cDNA: 17206. [Arabidopsis thaliana]
  misc_feature (38)..(265): Homolog of NCBI NO: 11280567 NR Description: hypothetical protein F24I3.110 - Arabidopsis >gi|6911873|emb|CAB72173.1| putative protein [Arabidopsis
  misc_feature (38)..(265): Homolog of NCBI NO: 30694556 NR Description: strictosidine synthase-related [Arabidopsis
  misc_feature (273)..(328): Homolog of NCBI NO: 11280567 NR Description: hypothetical protein F24I3.110 - Arabidopsis >gi|6911873|emb|CAB72173.1| putative protein [Arabidopsis
  misc_feature (273)..(328): Homolog of NCBI NO: 30694556 NR Description: strictosidine synthase-related [Arabidopsis
MRSFVSLISLLLLLSFSSSVLSTKKSSFQKLPVPGNRTGPEAFAFDSTGKGFYTGVTGGKILKYLPKKGYVDFAQITNSSKSSLCDGALGTTNVEKCGRPAGIAFNTKTGDLYVADAALGLHVIPRRGGLAKKIADSVGGKPFLFLDGLDVDPTTGVVYFTSFSSTFGPRDVLKAVATKDSTGKFFKYDPSKKVVTVLMEGLSGSAGCAVSSDGSFVLVGQFTKSNIKRYWIKGSKAGTSEDFTNSVSNPDNIKRIGSTGNFWVASVVNSATGPTNPSAVKVSSAGKVLQTIPLKDKFGDTLVSEVNEYKGQLYIGALFGPFAGILKL

SEQ ID NO: 88600 - DNA, 1344 bp, Arabidopsis thaliana
  misc_feature (1)..(1344): Ceres Seq. ID no. 12711141
  misc_feature: MA Experiment ID: 20000437 Result: Up-regulated in Transcription
  misc_feature: MA Experiment 20000437 PARAMETER Experiment Name: At_Drought_P Parameter: Age (day) Value: 8
  misc_feature: MA Experiment 20000437 PARAMETER Experiment Name: At_Drought_P Parameter: Organism Value: A. thaliana
  misc_feature: MA Experiment 20000437 PARAMETER Experiment Name: At_Drought_P Parameter: Plant Line Value: WS
  misc_feature: MA Experiment 20000437 PARAMETER Experiment Name: At_Drought_P Parameter: Timepoint (hr) Value: 24
  misc_feature: MA Experiment 20000437 PARAMETER Experiment Name: At_Drought_P Parameter: Tissue Value: Whole Plant
  misc_feature: MA Experiment 20000437 PARAMETER Experiment Name: At_Drought_P Parameter: Treatment Value: Drought vs. No Drought
  misc_feature: MA Experiment ID: 20001555 Result: Up-regulated in Transcription
  misc_feature: MA Experiment 20001555 PARAMETER Experiment Name: At_Drought_Soil_Dry_P Parameter: Age (day) Value: 24
  misc_feature: MA Experiment 20001555 PARAMETER Experiment Name: At_Drought_Soil_Dry_P Parameter: Organism Value: A. thaliana
  misc_feature: MA Experiment 20001555 PARAMETER Experiment Name: At_Drought_Soil_Dry_P Parameter: Plant Line Value: WS
  misc_feature: MA Experiment 20001555 PARAMETER Experiment Name: At_Drought_Soil_Dry_P Parameter: Post Timepoint (hr) Value: None
  misc_feature: MA Experiment 20001555 PARAMETER Experiment Name: At_Drought_Soil_Dry_P Parameter: Post-Treatment Value: None
  misc_feature: MA Experiment 20001555 PARAMETER Experiment Name: At_Drought_Soil_Dry_P Parameter: Timepoint (day) Value: 10
  misc_feature: MA Experiment 20001555 PARAMETER Experiment Name: At_Drought_Soil_Dry_P Parameter: Treatment Value: Drought vs. No Drought
  misc_feature: MA Experiment ID: 20001905 Result: Up-regulated in Transcription
  misc_feature: MA Experiment 20001905 PARAMETER Experiment Name: At_Drought_Reproduction_P Parameter: Age (day) Value: 40
  misc_feature: MA Experiment 20001905 PARAMETER Experiment Name: At_Drought_Reproduction_P Parameter: Organism Value: A. thaliana
  misc_feature: MA Experiment 20001905 PARAMETER Experiment Name: At_Drought_Reproduction_P Parameter: Plant Line Value: WS
  misc_feature: MA Experiment 20001905 PARAMETER Experiment Name: At_Drought_Reproduction_P Parameter: Timepoint (day) Value: 10
  misc_feature: MA Experiment 20001905 PARAMETER Experiment Name: At_Drought_Reproduction_P Parameter: Tissue Value: Rosettes
  misc_feature: MA Experiment 20001905 PARAMETER Experiment Name: At_Drought_Reproduction_P Parameter: Treatment Value: Drought vs. No Drought
  misc_feature: MA Experiment ID: 20001911 Result: Up-regulated in Transcription
  misc_feature: MA Experiment 20001911 PARAMETER Experiment Name: At_Drought_Reproduction_P Parameter: Age (day) Value: 40
  misc_feature: MA Experiment 20001911 PARAMETER Experiment Name: At_Drought_Reproduction_P Parameter: Organism Value: A. thaliana
  misc_feature: MA Experiment 20001911 PARAMETER Experiment Name: At_Drought_Reproduction_P Parameter: Plant Line Value: WS
  misc_feature: MA Experiment 20001911 PARAMETER Experiment Name: At_Drought_Reproduction_P Parameter: Timepoint (day) Value: 10
  misc_feature: MA Experiment 20001911 PARAMETER Experiment Name: At_Drought_Reproduction_P Parameter: Tissue Value: Flowers
  misc_feature: MA Experiment 20001911 PARAMETER Experiment Name: At_Drought_Reproduction_P Parameter: Treatment Value: Drought vs. No Drought
atggcgggaagtgaagcggtagaagataaggagataaaatcggcggtttcaagctgtgaagcgtatttcgagaaagtacaatcaaggaagaatctacccaaatctcttcaagaaaccctaaactctgctttcgccggaatcccagtctcctccttccctcaagtccccggcggcagagtgatagagattcaagcggaaacacctgtatcagaagcagtaaagatcttatcagatagcaagattctatcagctcctgtgattaacacagatcacgagagttctttagattggagagaaagatatttaggaatcattgactactcttcaatcatcttatgggtgctagagagtgctgaactcgctgcaatcgcgttgtccgctacgtcagcaactgctgctggtgttggtgctggagctgttggagctcttggtgttgcagcgctcgggatgaccggtccggttgctgctgcggggctagccgcagctgcggttggagccgcggttgctggtggtgttgcagctgaacgtgggattggaaaagatgctccaactgctgctgataagttggggaaagatttctatgaagttattcttcaagaagagccttttaaatcaaccactgttagaacaatacttaagtcgtttagatgggctccttttcttccggtttcaacagagagttcgatgttgagtgttatgttgttactctcgaaatatcggttaagaaatgtgccggttattaaaacaggagaaccggatatcaagaactacgttactcaatctgcagttgttcatggtcttgaaggttgcaaaggtagagattggtttgatcacatttccgctctcccgatttctgatctcggcctcccgtttatgtcacccaatgaggttattagcattgagagtgaggaacttatccttgaagcatttaaaaggatgagagacaacaacattggtggtctccctgtagttgaagggttgaataagaagattgttggtaacattagcatgagagacattagatatttgcttttacaacctgaagtcttttccaatttcagacaactcacggtgaagagtttcgcgacaaagattgctacagcgggagaggaatacggtttagcgattcctgcaataacttgtaggcctgattcgactttagggagtgttataaacagtttggcttcgaggtcggtgcatcgggtttatgtagcggctggagatgagaatgagctttatggggttataacactgagggatgtgatctcttgtttcgtatcagaacctccaaattactttgagaactgtctcggtttctcggttaaggaaatgcttaaccgatga

SEQ ID NO: 88601 - protein, 447 aa, Arabidopsis thaliana
  peptide (1)..(447): Ceres Seq. ID no. 12711142
  misc_feature (54)..(115): Pfam Name: CBS domain Pfam Description: CBS domain
  misc_feature (1)..(447): Homolog of NCBI NO: 25404839 NR Description: hypothetical protein T17F3.17 [imported] -
  misc_feature (9)..(444): Homolog of NCBI NO: 34912162 NR Description: P0712E02.24 [Oryza sativa (japonica
  misc_feature (208)..(447): Homolog of NCBI NO: 18409372 NR Description: expressed protein; protein id: At1g69800.1, by cDNA: gi_15450969 [Arabidopsis thaliana]
  misc_feature (153)..(433): Homolog of NCBI NO: 32364482 NR Description: AKIN gamma [Medicago truncatula]
  misc_feature (35)..(158): Homolog of NCBI NO: 32364482 NR Description: AKIN gamma [Medicago truncatula]
  misc_feature (138)..(433): Homolog of NCBI NO: 38346640 NR Description: OSJNBa0072D21.10 [Oryza sativa (japonica
  misc_feature (35)..(144): Homolog of NCBI NO: 38346640 NR Description: OSJNBa0072D21.10 [Oryza sativa (japonica
  misc_feature (172)..(433): Homolog of NCBI NO: 15228397 NR Description: putative protein; protein id: At3g48530.1, by cDNA: 34151., supported by cDNA: gi_14596102, supported by
  misc_feature (13)..(119): Homolog of NCBI NO: 15228397 NR Description: putative protein; protein id: At3g48530.1, by cDNA: 34151., supported by cDNA: gi_14596102, supported by
  misc_feature (172)..(433): Homolog of NCBI NO: 21592917 NR Description: unknown [Arabidopsis thaliana]
MAGSEAVEDKEIKSAVSSCEAYFEKVQSRKNLPKSLQETLNSAFAGIPVSSFPQVPGGRVIEIQAETPVSEAVKILSDSKILSAPVINTDHESSLDWRERYLGIIDYSSIILWVLESAELAAIALSATSATAAGVGAGAVGALGVAALGMTGPVAAAGLAAAAVGAAVAGGVAAERGIGKDAPTAADKLGKDFYEVILQEEPFKSTTVRTILKSFRWAPFLPVSTESSMLSVMLLLSKYRLRNVPVIKTGEPDIKNYVTQSAVVHGLEGCKGRDWFDHISALPISDLGLPFMSPNEVISIESEELILEAFKRMRDNNIGGLPVVEGLNKKIVGNISMRDIRYLLLQPEVFSNFRQLTVKSFATKIATAGEEYGLAIPAITCRPDSTLGSVINSLASRSVHRVYVAAGDENELYGVITLRDVISCFVSEPPNYFENCLGFSVKEMLNR

SEQ ID NO: 88602 - protein, 298 aa, Arabidopsis thaliana
  peptide (1)..(298): Ceres Seq. ID no. 12711143
  misc_feature (1)..(298): Homolog of NCBI NO: 25404839 NR Description: hypothetical protein T17F3.17 [imported] -
  misc_feature (1)..(295): Homolog of NCBI NO: 34912162 NR Description: P0712E02.24 [Oryza sativa (japonica
  misc_feature (59)..(298): Homolog of NCBI NO: 18409372 NR Description: expressed protein; protein id: At1g69800.1, by cDNA: gi_15450969 [Arabidopsis thaliana]
  misc_feature (4)..(284): Homolog of NCBI NO: 32364482 NR Description: AKIN gamma [Medicago truncatula]
  misc_feature (1)..(284): Homolog of NCBI NO: 38346640 NR Description: OSJNBa0072D21.10 [Oryza sativa (japonica
  misc_feature (23)..(284): Homolog of NCBI NO: 15228397 NR Description: putative protein; protein id: At3g48530.1, by cDNA: 34151., supported by cDNA: gi_14596102, supported by
  misc_feature (23)..(284): Homolog of NCBI NO: 21592917 NR Description: unknown [Arabidopsis thaliana]
  misc_feature (12)..(284): Homolog of NCBI NO: 19386799 NR Description: OJ1485_B09.7 [Oryza sativa (japonica
  misc_feature (1)..(17): Homolog of NCBI NO: 19386799 NR Description: OJ1485_B09.7 [Oryza sativa (japonica
  misc_feature (29)..(208): Homolog of NCBI NO: 20502802 NR Description: YZ1 [Zea mays]
MTGPVAAAGLAAAAVGAAVAGGVAAERGIGKDAPTAADKLGKDFYEVILQEEPFKSTTVRTILKSFRWAPFLPVSTESSMLSVMLLLSKYRLRNVPVIKTGEPDIKNYVTQSAVVHGLEGCKGRDWFDHISALPISDLGLPFMSPNEVISIESEELILEAFKRMRDNNIGGLPVVEGLNKKIVGNISMRDIRYLLLQPEVFSNFRQLTVKSFATKIATAGEEYGLAIPAITCRPDSTLGSVINSLASRSVHRVYVAAGDENELYGVITLRDVISCFVSEPPNYFENCLGFSVKEMLNR

SEQ ID NO: 88603 - DNA, 1812 bp, Arabidopsis thaliana
  misc_feature (1)..(1812): Ceres Seq. ID no. 12711144
  misc_feature: MA Experiment ID: 20000171 Result: Up-regulated in Transcription
  misc_feature: MA Experiment 20000171 PARAMETER Experiment Name: At_42deg_Heat_P Parameter: Age (day) Value: 14
  misc_feature: MA Experiment 20000171 PARAMETER Experiment Name: At_42deg_Heat_P Parameter: Organism Value: A. thaliana
  misc_feature: MA Experiment 20000171 PARAMETER Experiment Name: At_42deg_Heat_P Parameter: Plant Line Value: WS
  misc_feature: MA Experiment 20000171 PARAMETER Experiment Name: At_42deg_Heat_P Parameter: Temperature (deg C) Value: 42 vs. 22
  misc_feature: MA Experiment 20000171 PARAMETER Experiment Name: At_42deg_Heat_P Parameter: Timepoint (hr) Value: 1
  misc_feature: MA Experiment 20000171 PARAMETER Experiment Name: At_42deg_Heat_P Parameter: Tissue Value: Aerial
  misc_feature: MA Experiment ID: 20000173 Result: Up-regulated in Transcription
  misc_feature: MA Experiment 20000173 PARAMETER Experiment Name: At_42deg_Heat_P Parameter: Age (day) Value: 14
  misc_feature: MA Experiment 20000173 PARAMETER Experiment Name: At_42deg_Heat_P Parameter: Organism Value: A. thaliana
  misc_feature: MA Experiment 20000173 PARAMETER Experiment Name: At_42deg_Heat_P Parameter: Plant Line Value: WS
  misc_feature: MA Experiment 20000173 PARAMETER Experiment Name: At_42deg_Heat_P Parameter: Temperature (deg C) Value: 42 vs. 22
  misc_feature: MA Experiment 20000173 PARAMETER Experiment Name: At_42deg_Heat_P Parameter: Timepoint (hr) Value: 6
  misc_feature: MA Experiment 20000173 PARAMETER Experiment Name: At_42deg_Heat_P Parameter: Tissue Value: Aerial
atgaaatatatgtctttttctcaaagtcttgttttgttctttgccatattattacaggaagtggaagaagaggtctcaagatgggaaggctacgccgattggagaaacagagcagccgtgaaaggccgtcacggtggcatgctcgccgcctctttcgtcttagtggtggagatattagagaatctagcgtatttggcgaatgcgagtaatcttgtgctatacctaagagaatacatgcacatgtctccatcaaaatcggcaaatgacgtcaccaatttcatgggcacagcttttctcctagctctcctcggtggtttcctctccgacgctttcttctccacttttcaaatcttcctcatctcagcttccatcgagtttttgggattgatcatactcacaattcaagctcggacaccatccttaatgcctccatcgtgcgatagtcccacatgtgaagaagtgagtggttcgaaggcagcgatgctattcgtggggttgtaccttgtagctttgggtgtgggagggatcaaaggttcattagcatctcacggagcagaacagtttgatgagagtacacctaaaggtcggaaacaaaggtcaacgttctttaactacttcgtgttttgtcttgcttgtggagcactagttgctgtcacgtttgtagtttggttagaagacaacaaaggatgggaatggggattcggtgtttctaccattgctatcttcgtctctattctcatctttctctctggatcaagattttataggaacaagattccatgtggaagtcctctcaccacaatcttgaaggttcttcttgcggcttcggttaagtgctgctcgagtggaagttcaagcaatgcggttgcgagtatgtccgtgagtccctcaaatcattgcgtatcaaaggggaaaaaagaagttgaatcacaaggagaattggaaaagccacgtcaagaagaagctttgcctcctcgggcacaactaactaacagtttgaaagtattaaatggagctgcggatgaaaaacctgtccatagattgttagaatgcacagtccaacaagtggaagatgtgaagattgtcttgaaaatgcttccgatatttgcttgcactatcatgcttaactgttgcttagctcagctctctacattctccgtccaacaagctgcttccatgaacacaaagataggaagcctaaagatacctccagcttccttaccgatcttccccgtcgttttcataatgatcctcgcacctatctacgaccatctcattatcccattcgctagaaaagctaccaagaccgaaacaggagtcactcatctacaaagaatcggagtaggtttagttctttcgatattagcaatggcggttgcagctctagttgagattaaacgaaagggagtggctaaagactccggcttgcttgactcgaaagaaaccttacccgtgactttcctatggatcgcacttcagtatcttttcctagggtcagccgatctattcacactagctggactactagagtatttcttcacggaagcaccttcctcaatgagatctctcgcaacatcgctctcgtgggcttctttggctatggggtattacctaagctcagtgatcgtgtccatagtaaacagcatcacaggaagctcagggaacacaccttggctcagaggaaaaagcataaaccgttacaaactagactacttctattggctaatgtgtgttcttagtgcagctaacttcttgcactacctcttttgggcaatgcgttacaagtatagatcaactggttcaagaagctaa

SEQ ID NO: 88604 - protein, 603 aa, Arabidopsis thaliana
  peptide (1)..(603): Ceres Seq. ID no. 12711145
  misc_feature (115)..(532): Pfam Name: POT family Pfam Description: POT family
  misc_feature (4)..(603): Homolog of NCBI NO: 25404844 NR Description: nitrate transporter (NTL1), 53025-56402 - Arabidopsis thaliana >gi|12325224|gb|AAG52554.1|AC010675_2
  misc_feature (20)..(603): Homolog of NCBI NO: 18409382 NR Description: nitrate transporter (NTL1); protein id: supported by cDNA: gi_17064753, supported by cDNA: gi_3377516 thaliana] >gi|23397158|gb|AAN31862.1| putative nitrate
  misc_feature (20)..(603): Homolog of NCBI NO: 17064754 NR Description: nitrate transporter (NTL1) [Arabidopsis thaliana]
  misc_feature (20)..(603): Homolog of NCBI NO: 11358579 NR Description: nitrate transporter NTL1 [validated] - thaliana >gi|3377517|gb|AAC28086.1| nitrate transporter NTL1
  misc_feature (285)..(603): Homolog of NCBI NO: 22329803 NR Description: nitrate transporter, putative; protein id: supported by cDNA: gi_18175947, supported by cDNA: gi_20465362 thaliana] >gi|18175948|gb|AAL59956.1| putative nitrate
  misc_feature (20)..(299): Homolog of NCBI NO: 22329803 NR Description: nitrate transporter, putative; protein id: supported by cDNA: gi_18175947, supported by cDNA: gi_20465362 thaliana] >gi|18175948|gb|AAL59956.1| putative nitrate
  misc_feature (285)..(603): Homolog of NCBI NO: 25403281 NR Description: protein T7N9.10 [imported] - Arabidopsis thaliana
  misc_feature (24)..(299): Homolog of NCBI NO: 25403281 NR Description: protein T7N9.10 [imported] - Arabidopsis thaliana
  misc_feature (1)..(598): Homolog of NCBI NO: 15241938 NR Description: nitrate transporter NTL1 - like protein; protein
  misc_feature (25)..(598): Homolog of NCBI NO: 10177451 NR Description: nitrate transporter NTL1 [Arabidopsis thaliana]
MKYMSFSQSLVLFFAILLQEVEEEVSRWEGYADWRNRAAVKGRHGGMLAASFVLVVEILENLAYLANASNLVLYLREYMHMSPSKSANDVTNFMGTAFLLALLGGFLSDAFFSTFQIFLISASIEFLGLIILTIQARTPSLMPPSCDSPTCEEVSGSKAAMLFVGLYLVALGVGGIKGSLASHGAEQFDESTPKGRKQRSTFFNYFVFCLACGALVAVTFVVWLEDNKGWEWGFGVSTIAIFVSILIFLSGSRFYRNKIPCGSPLTTILKVLLAASVKCCSSGSSSNAVASMSVSPSNHCVSKGKKEVESQGELEKPRQEEALPPRAQLTNSLKVLNGAADEKPVHRLLECTVQQVEDVKIVLKMLPIFACTIMLNCCLAQLSTFSVQQAASMNTKIGSLKIPPASLPIFPVVFIMILAPIYDHLIIPFARKATKTETGVTHLQRIGVGLVLSILAMAVAALVEIKRKGVAKDSGLLDSKETLPVTFLWIALQYLFLGSADLFTLAGLLEYFFTEAPSSMRSLATSLSWASLAMGYYLSSVIVSIVNSITGSSGNTPWLRGKSINRYKLDYFYWLMCVLSAANFLHYLFWAMRYKYRSTGSRS

SEQ ID NO: 88605 - protein, 600 aa, Arabidopsis thaliana
  peptide (1)..(600): Ceres Seq. ID no. 12711146
  misc_feature (112)..(529): Pfam Name: POT family Pfam Description: POT family
  misc_feature (1)..(600): Homolog of NCBI NO: 25404844 NR Description: nitrate transporter (NTL1), 53025-56402 - Arabidopsis thaliana >gi|12325224|gb|AAG52554.1|AC010675_2
  misc_feature (17)..(600): Homolog of NCBI NO: 18409382 NR Description: nitrate transporter (NTL1); protein id: supported by cDNA: gi_17064753, supported by cDNA: gi_3377516 thaliana] >gi|23397158|gb|AAN31862.1| putative nitrate
  misc_feature (17)..(600): Homolog of NCBI NO: 17064754 NR Description: nitrate transporter (NTL1) [Arabidopsis thaliana]
  misc_feature (17)..(600): Homolog of NCBI NO: 11358579 NR Description: nitrate transporter NTL1 [validated] - thaliana >gi|3377517|gb|AAC28086.1| nitrate transporter NTL1
  misc_feature (282)..(600): Homolog of NCBI NO: 22329803 NR Description: nitrate transporter, putative; protein id: supported by cDNA: gi_18175947, supported by cDNA: gi_20465362 thaliana] >gi|18175948|gb|AAL59956.1| putative nitrate
  misc_feature (17)..(296): Homolog of NCBI NO: 22329803 NR Description: nitrate transporter, putative; protein id: supported by cDNA: gi_18175947, supported by cDNA: gi_20465362 thaliana] >gi|18175948|gb|AAL59956.1| putative nitrate
  misc_feature (282)..(600): Homolog of NCBI NO: 25403281 NR Description: protein T7N9.10 [imported] - Arabidopsis thaliana
  misc_feature (21)..(296): Homolog of NCBI NO: 25403281 NR Description: protein T7N9.10 [imported] - Arabidopsis thaliana
  misc_feature (1)..(595): Homolog of NCBI NO: 15241938 NR Description: nitrate transporter NTL1 - like protein; protein
  misc_feature (22)..(595): Homolog of NCBI NO: 10177451 NR Description: nitrate transporter NTL1 [Arabidopsis thaliana]
MSFSQSLVLFFAILLQEVEEEVSRWEGYADWRNRAAVKGRHGGMLAASFVLVVEILENLAYLANASNLVLYLREYMHMSPSKSANDVTNFMGTAFLLALLGGFLSDAFFSTFQIFLISASIEFLGLIILTIQARTPSLMPPSCDSPTCEEVSGSKAAMLFVGLYLVALGVGGIKGSLASHGAEQFDESTPKGRKQRSTFFNYFVFCLACGALVAVTFVVWLEDNKGWEWGFGVSTIAIFVSILIFLSGSRFYRNKIPCGSPLTTILKVLLAASVKCCSSGSSSNAVASMSVSPSNHCVSKGKKEVESQGELEKPRQEEALPPRAQLTNSLKVLNGAADEKPVHRLLECTVQQVEDVKIVLKMLPIFACTIMLNCCLAQLSTFSVQQAASMNTKIGSLKIPPASLPIFPVVFIMILAPIYDHLIIPFARKATKTETGVTHLQRIGVGLVLSILAMAVAALVEIKRKGVAKDSGLLDSKETLPVTFLWIALQYLFLGSADLFTLAGLLEYFFTEAPSSMRSLATSLSWASLAMGYYLSSVIVSIVNSITGSSGNTPWLRGKSINRYKLDYFYWLMCVLSAANFLHYLFWAMRYKYRSTGSRS

SEQ ID NO: 88606 - protein, 557 aa, Arabidopsis thaliana
  peptide (1)..(557): Ceres Seq. ID no. 12711147
  misc_feature (69)..(486): Pfam Name: POT family Pfam Description: POT family
  misc_feature (1)..(557): Homolog of NCBI NO: 25404844 NR Description: nitrate transporter (NTL1), 53025-56402 - Arabidopsis thaliana >gi|12325224|gb|AAG52554.1|AC010675_2
  misc_feature (1)..(557): Homolog of NCBI NO: 18409382 NR Description: nitrate transporter (NTL1); protein id: supported by cDNA: gi_17064753, supported by cDNA: gi_3377516 thaliana] >gi|23397158|gb|AAN31862.1| putative nitrate
  misc_feature (1)..(557): Homolog of NCBI NO: 17064754 NR Description: nitrate transporter (NTL1) [Arabidopsis thaliana]
  misc_feature (1)..(557): Homolog of NCBI NO: 11358579 NR Description: nitrate transporter NTL1 [validated] - thaliana >gi|3377517|gb|AAC28086.1| nitrate transporter NTL1
  misc_feature (239)..(557): Homolog of NCBI NO: 22329803 NR Description: nitrate transporter, putative; protein id: supported by cDNA: gi_18175947, supported by cDNA: gi_20465362 thaliana] >gi|18175948|gb|AAL59956.1| putative nitrate
  misc_feature (1)..(253): Homolog of NCBI NO: 22329803 NR Description: nitrate transporter, putative; protein id: supported by cDNA: gi_18175947, supported by cDNA: gi_20465362 thaliana] >gi|18175948|gb|AAL59956.1| putative nitrate
  misc_feature (239)..(557): Homolog of NCBI NO: 25403281 NR Description: protein T7N9.10 [imported] - Arabidopsis thaliana
  misc_feature (1)..(253): Homolog of NCBI NO: 25403281 NR Description: protein T7N9.10 [imported] - Arabidopsis thaliana
  misc_feature (1)..(552): Homolog of NCBI NO: 15241938 NR Description: nitrate transporter NTL1 - like protein; protein
  misc_feature (1)..(552): Homolog of NCBI NO: 10177451 NR Description: nitrate transporter NTL1 [Arabidopsis thaliana]
MLAASFVLVVEILENLAYLANASNLVLYLREYMHMSPSKSANDVTNFMGTAFLLALLGGFLSDAFFSTFQIFLISASIEFLGLIILTIQARTPSLMPPSCDSPTCEEVSGSKAAMLFVGLYLVALGVGGIKGSLASHGAEQFDESTPKGRKQRSTFFNYFVFCLACGALVAVTFVVWLEDNKGWEWGFGVSTIAIFVSILIFLSGSRFYRNKIPCGSPLTTILKVLLAASVKCCSSGSSSNAVASMSVSPSNHCVSKGKKEVESQGELEKPRQEEALPPRAQLTNSLKVLNGAADEKPVHRLLECTVQQVEDVKIVLKMLPIFACTIMLNCCLAQLSTFSVQQAASMNTKIGSLKIPPASLPIFPVVFIMILAPIYDHLIIPFARKATKTETGVTHLQRIGVGLVLSILAMAVAALVEIKRKGVAKDSGLLDSKETLPVTFLWIALQYLFLGSADLFTLAGLLEYFFTEAPSSMRSLATSLSWASLAMGYYLSSVIVSIVNSITGSSGNTPWLRGKSINRYKLDYFYWLMCVLSAANFLHYLFWAMRYKYRSTGSRS

SEQ ID NO: 88607 - DNA, 1554 bp, Arabidopsis thaliana
  misc_feature (1)..(1554): Ceres Seq. ID no. 12711148
atggacaatgagaaagggacaagttcctcggatttaacgacgagacaaaggaagcctcttggttggaaagcgatgccttatatcatagggaatgaaacattggagaggcttgccacattcggtttgatggcgaatttcatggtgtatatggtaagagagtatcatatggaccaagttcaagctgtcactcttatcaacacttggtctgctctcaccaactttgctcctatcatcggagctttcatctccgactcctacaccggaaaatttaataccattgtcttcggttccatcgctgagttgttgtgtttggaacgacttttcttgttatcagttggaacaggtggaatccggtcatgcagtgttcctttcagtctcgatcagttcgatgattcgactgaagaaggaagagaaggaagtagaagcttctttagctggtactataccactcatacaatcgtccagttagtttcaatgacactagtgttgtacgtacagaacaacatcagttggggcattggattcgcaatcccgaccgttctcaatttttttgcgcttcttctgctttttgtgggtactcggtattatgtctttgtcaaacccgaaggaagtgtcttctctggagttttcaaggttcttgtggctgcttataagaaacgcaaggcacggtttacttctggaattgactaccatcaacccttactagagacagatttacaatcaaataaactcgtactcactgatcaattcagattcttgaacaaagctgtgatagtgatgaacaatgatgaagctggaaatgaggagtggagaacctgcacagtgagacagatagaggacatcaagtcaataatcagtattattccaatatttgcttcgagcattattggatttttggctatgaaccaacaacagacgtttacagtctcacaagcactaaaaatggacctccaatttccaggcacttcttacctaatccctcctgcttctataaccgtcatatcattattaaacataggtatatggcttcccttctatgaaaccgttttggtccgacacatcgaaaacattacaaaacaaaacggaggtatctcgttactacaaaaagtcggcattgggaatattttctccatctcgacgatgctcatatccggtattgtggagcgaaagagaagagatttatcgcttaatggagtaaaaatgtcggttttctggctaaccccgcaacaagtactaatgggattttatcaagtcttcacgattgttggtctcaccgagttcttcaacaaacaagttccaatcaacatgagaagcattgggaactcgttgctttacttaggtttgtctctagccagttatctaagcagtgccatggtgagcattgttcatagtgtgactgctcgtggaggacagagttggctaacggatgatattgacaaaagcaagttggattgtttctattactttattgccgctttaagcactcttaatttcatcttcttcttctggtgtgctcgaaggtatcgttacagaaactatagtaatgaacaataa

SEQ ID NO: 88608 - protein, 517 aa, Arabidopsis thaliana
  peptide (1)..(517): Ceres Seq. ID no. 12711149
  misc_feature (64)..(448): Pfam Name: POT family Pfam Description: POT family
  misc_feature (64)..(517): Homolog of NCBI NO: 15222484 NR Description: putative peptide transporter; protein id: [Arabidopsis thaliana] >gi|25404845|pir||H96720 probable peptide
  misc_feature (1)..(102): Homolog of NCBI NO: 15222484 NR Description: putative peptide transporter; protein id: [Arabidopsis thaliana] >gi|25404845|pir||H96720 probable peptide
  misc_feature (107)..(511): Homolog of NCBI NO: 25404847 NR Description: probable peptide transporter T17F3.10 [imported] Arabidopsis thaliana >gi|12325237|gb|AAG52567.1|AC010675_15
  misc_feature (16)..(104): Homolog of NCBI NO: 25404847 NR Description: probable peptide transporter T17F3.10 [imported] Arabidopsis thaliana >gi|12325237|gb|AAG52567.1|AC010675_15
  misc_feature (107)..(511): Homolog of NCBI NO: 18409391 NR Description: putative peptide transporter; protein id: supported by cDNA: 22243., supported by cDNA: gi_19699103 thaliana] >gi|19699104|gb|AAL90918.1| At1g69870/T17F3_10
  misc_feature (16)..(104): Homolog of NCBI NO: 18409391 NR Description: putative peptide transporter; protein id: supported by cDNA: 22243., supported by cDNA: gi_19699103 thaliana] >gi|19699104|gb|AAL90918.1| At1g69870/T17F3_10
  misc_feature (107)..(511): Homolog of NCBI NO: 25403285 NR Description: protein T7N9.14 [imported] - Arabidopsis thaliana
  misc_feature (28)..(104): Homolog of NCBI NO: 25403285 NR Description: protein T7N9.14 [imported] - Arabidopsis thaliana
  misc_feature (101)..(511): Homolog of NCBI NO: 34906908 NR Description: putative peptide transporter [Oryza sativa
  misc_feature (32)..(102): Homolog of NCBI NO: 34906908 NR Description: putative peptide transporter [Oryza sativa
MDNEKGTSSSDLTTRQRKPLGWKAMPYIIGNETLERLATFGLMANFMVYMVREYHMDQVQAVTLINTWSALTNFAPIIGAFISDSYTGKFNTIVFGSIAELLCLERLFLLSVGTGGIRSCSVPFSLDQFDDSTEEGREGSRSFFSWYYTTHTIVQLVSMTLVLYVQNNISWGIGFAIPTVLNFFALLLLFVGTRYYVFVKPEGSVFSGVFKVLVAAYKKRKARFTSGIDYHQPLLETDLQSNKLVLTDQFRFLNKAVIVMNNDEAGNEEWRTCTVRQIEDIKSIISIIPIFASSIIGFLAMNQQQTFTVSQALKMDLQFPGTSYLIPPASITVISLLNIGIWLPFYETVLVRHIENITKQNGGISLLQKVGIGNIFSISTMLISGIVERKRRDLSLNGVKMSVFWLTPQQVLMGFYQVFTIVGLTEFFNKQVPINMRSIGNSLLYLGLSLASYLSSAMVSIVHSVTARGGQSWLTDDIDKSKLDCFYYFIAALSTLNFIFFFWCARRYRYRNYSNEQ

SEQ ID NO: 88609 - protein, 493 aa, Arabidopsis thaliana
  peptide (1)..(493): Ceres Seq. ID no. 12711150
  misc_feature (40)..(424): Pfam Name: POT family Pfam Description: POT family
  misc_feature (40)..(493): Homolog of NCBI NO: 15222484 NR Description: putative peptide transporter; protein id: [Arabidopsis thaliana] >gi|25404845|pir||H96720 probable peptide
  misc_feature (1)..(78): Homolog of NCBI NO: 15222484 NR Description: putative peptide transporter; protein id: [Arabidopsis thaliana] >gi|25404845|pir||H96720 probable peptide
  misc_feature (83)..(487): Homolog of NCBI NO: 25404847 NR Description: probable peptide transporter T17F3.10 [imported] Arabidopsis thaliana >gi|12325237|gb|AAG52567.1|AC010675_15
  misc_feature (1)..(80): Homolog of NCBI NO: 25404847 NR Description: probable peptide transporter T17F3.10 [imported] Arabidopsis thaliana >gi|12325237|gb|AAG52567.1|AC010675_15
  misc_feature (83)..(487): Homolog of NCBI NO: 18409391 NR Description: putative peptide transporter; protein id: supported by cDNA: 22243., supported by cDNA: gi_19699103 thaliana] >gi|19699104|gb|AAL90918.1| At1g69870/T17F3_10
  misc_feature (1)..(80): Homolog of NCBI NO: 18409391 NR Description: putative peptide transporter; protein id: supported by cDNA: 22243., supported by cDNA: gi_19699103 thaliana] >gi|19699104|gb|AAL90918.1| At1g69870/T17F3_10
  misc_feature (83)..(487): Homolog of NCBI NO: 25403285 NR Description: protein T7N9.14 [imported] - Arabidopsis thaliana
  misc_feature (4)..(80): Homolog of NCBI NO: 25403285 NR Description: protein T7N9.14 [imported] - Arabidopsis thaliana
  misc_feature (77)..(487): Homolog of NCBI NO: 34906908 NR Description: putative peptide transporter [Oryza sativa
  misc_feature (8)..(78): Homolog of NCBI NO: 34906908 NR Description: putative peptide transporter [Oryza sativa
MPYIIGNETLERLATFGLMANFMVYMVREYHMDQVQAVTLINTWSALTNFAPIIGAFISDSYTGKFNTIVFGSIAELLCLERLFLLSVGTGGIRSCSVPFSLDQFDDSTEEGREGSRSFFSWYYTTHTIVQLVSMTLVLYVQNNISWGIGFAIPTVLNFFALLLLFVGTRYYVFVKPEGSVFSGVFKVLVAAYKKRKARFTSGIDYHQPLLETDLQSNKLVLTDQFRFLNKAVIVMNNDEAGNEEWRTCTVRQIEDIKSIISIIPIFASSIIGFLAMNQQQTFTVSQALKMDLQFPGTSYLIPPASITVISLLNIGIWLPFYETVLVRHIENITKQNGGISLLQKVGIGNIFSISTMLISGIVERKRRDLSLNGVKMSVFWLTPQQVLMGFYQVFTIVGLTEFFNKQVPINMRSIGNSLLYLGLSLASYLSSAMVSIVHSVTARGGQSWLTDDIDKSKLDCFYYFIAALSTLNFIFFFWCARRYRYRNYSNEQ

SEQ ID NO: 88610 - protein, 475 aa, Arabidopsis thaliana
  peptide (1)..(475): Ceres Seq. ID no. 12711151
  misc_feature (22)..(406): Pfam Name: POT family Pfam Description: POT family
  misc_feature (22)..(475): Homolog of NCBI NO: 15222484 NR Description: putative peptide transporter; protein id: [Arabidopsis thaliana] >gi|25404845|pir||H96720 probable peptide
  misc_feature (1)..(60): Homolog of NCBI NO: 15222484 NR Description: putative peptide transporter; protein id: [Arabidopsis thaliana] >gi|25404845|pir||H96720 probable peptide
  misc_feature (65)..(469): Homolog of NCBI NO: 25404847 NR Description: probable peptide transporter T17F3.10 [imported] Arabidopsis thaliana >gi|12325237|gb|AAG52567.1|AC010675_15
  misc_feature (1)..(62): Homolog of NCBI NO: 25404847 NR Description: probable peptide transporter T17F3.10 [imported] Arabidopsis thaliana >gi|12325237|gb|AAG52567.1|AC010675_15
  misc_feature (65)..(469): Homolog of NCBI NO: 18409391 NR Description: putative peptide transporter; protein id: supported by cDNA: 22243., supported by cDNA: gi_19699103 thaliana] >gi|19699104|gb|AAL90918.1| At1g69870/T17F3_10
  misc_feature (1)..(62): Homolog of NCBI NO: 18409391 NR Description: putative peptide transporter; protein id: supported by cDNA: 22243., supported by cDNA: gi_19699103 thaliana] >gi|19699104|gb|AAL90918.1| At1g69870/T17F3_10
  misc_feature (65)..(469): Homolog of NCBI NO: 25403285 NR Description: protein T7N9.14 [imported] - Arabidopsis thaliana
  misc_feature (1)..(62): Homolog of NCBI NO: 25403285 NR Description: protein T7N9.14 [imported] - Arabidopsis thaliana
  misc_feature (59)..(469): Homolog of NCBI NO: 34906908 NR Description: putative peptide transporter [Oryza sativa
  misc_feature (1)..(60): Homolog of NCBI NO: 34906908 NR Description: putative peptide transporter [Oryza sativa
MANFMVYMVREYHMDQVQAVTLINTWSALTNFAPIIGAFISDSYTGKFNTIVFGSIAELLCLERLFLLSVGTGGIRSCSVPFSLDQFDDSTEEGREGSRSFFSWYYTTHTIVQLVSMTLVLYVQNNISWGIGFAIPTVLNFFALLLLFVGTRYYVFVKPEGSVFSGVFKVLVAAYKKRKARFTSGIDYHQPLLETDLQSNKLVLTDQFRFLNKAVIVMNNDEAGNEEWRTCTVRQIEDIKSIISIIPIFASSIIGFLAMNQQQTFTVSQALKMDLQFPGTSYLIPPASITVISLLNIGIWLPFYETVLVRHIENITKQNGGISLLQKVGIGNIFSISTMLISGIVERKRRDLSLNGVKMSVFWLTPQQVLMGFYQVFTIVGLTEFFNKQVPINMRSIGNSLLYLGLSLASYLSSAMVSIVHSVTARGGQSWLTDDIDKSKLDCFYYFIAALSTLNFIFFFWCARRYRYRNYSNEQ

SEQ ID NO: 88611 - DNA, 1911 bp, Arabidopsis thaliana
  misc_feature (1)..(1911): Ceres Seq. ID no. 12711160
  misc_feature: MA Experiment ID: 20000171 Result: Up-regulated in Transcription
  misc_feature: MA Experiment 20000171 PARAMETER Experiment Name: At_42deg_Heat_P Parameter: Age (day) Value: 14
  misc_feature: MA Experiment 20000171 PARAMETER Experiment Name: At_42deg_Heat_P Parameter: Organism Value: A. thaliana
  misc_feature: MA Experiment 20000171 PARAMETER Experiment Name: At_42deg_Heat_P Parameter: Plant Line Value: WS
  misc_feature: MA Experiment 20000171 PARAMETER Experiment Name: At_42deg_Heat_P Parameter: Temperature (deg C) Value: 42 vs. 22
  misc_feature: MA Experiment 20000171 PARAMETER Experiment Name: At_42deg_Heat_P Parameter: Timepoint (hr) Value: 1
  misc_feature: MA Experiment 20000171 PARAMETER Experiment Name: At_42deg_Heat_P Parameter: Tissue Value: Aerial
  misc_feature: MA Experiment ID: 20000439 Result: Down-regulated in Transcription
  misc_feature: MA Experiment 20000439 PARAMETER Experiment Name: At_Roots__P Parameter: Age (day) Value: 14 vs. 21
  misc_feature: MA Experiment 20000439 PARAMETER Experiment Name: At_Roots__P Parameter: Organism Value: A. thaliana
  misc_feature: MA Experiment 20000439 PARAMETER Experiment Name: At_Roots__P Parameter: Tissue Value: Roots vs. Whole Plant
  misc_feature: MA Experiment ID: 20000495 Result: Up-regulated in Transcription
  misc_feature: MA Experiment 20000495 PARAMETER Experiment Name: At_Guard_Cells_P Parameter: Harvest Date Value: 8/2/2002
  misc_feature: MA Experiment 20000495 PARAMETER Experiment Name: At_Guard_Cells_P Parameter: Organism Value: A. thaliana
  misc_feature: MA Experiment 20000495 PARAMETER Experiment Name: At_Guard_Cells_P Parameter: Tissue Value: Guard Cells vs. Leaves
  misc_feature: MA Experiment ID: 20000794 Result: Down-regulated in Transcription
  misc_feature: MA Experiment 20000794 PARAMETER Experiment Name: At_Petals_P Parameter: Age (day) Value: 23-25 days
  misc_feature: MA Experiment 20000794 PARAMETER Experiment Name: At_Petals_P Parameter: Plant Line Value: WS
  misc_feature: MA Experiment 20000794 PARAMETER Experiment Name: At_Petals_P Parameter: Tissue Value: Petals vs. Whole plant
atgtctcaaccaccgtggagatgtttctctctactcatctttgttctcaccatttttagtactaaaccttcctctgcatctacttcatgttcttcttcatttcattgcccaccgttcaactcctcaccaccgtaccctttctcagcttctccgggatgtggccacccaaacttccagatccaatgctcatcttcacgcgccaccatcacaatcaaaaacctcactttctctatcctccattactcatcaatctcctcttctctaaccctctctcccattacaaacactaaccggaacacaaacaactgttcttctctccggttctcctcctcaccaaaccggttcatcgacttaaccggttcacctttcagagtctctgactcttcttgctctcgtctctctcttctccgtccttgctctccttttactctccccaactgttctcgttgtccttgggactgtaaactcctaaagaatccgggtcggatcctccacggttgtgaatcaacccacgggtcgttatctgaacaaggctgtcaaggagatcttcttggttttcttcaagatttcttcactagatttggatttgaagttgaatgggacgaatctcaagatccatacttcattaaatgcagagattgtcaaatcaagaatggtgtttgcgggtttaattcgacccacccgaatcaagatttcatctgtttccacaaatcaagatccgaattagtaactcaaagagataacaacaaaagagtcaatcatattgctgtgttgtctcttatcttcgctttgacttgtctcttacttgttttctccgtcgccgtagcgattttccgatcacgaagagctagctttttatcctcaatcaatgaagaagacccggctgctctgttcctccgtcaccaccgctccgccgctcttctcccaccagtcttcaccttcgaagaactcgaatccgccacaaacaaattcgaccccaagcgaaaaatcggagacggtggtttcggttctgtttacttaggccaactcagcgacggacaactcctcgccgttaaattcctccaccatcaccacggcgcaaccgccgcagccaccgagcattgcaaagctttctcaatgaagtctttttgcaatgagattttgatcctttcttcaatcaaccatcctaacctcgtcaagctccatggctattgctctgacccgagaggacttcttcttgttcacgattacgtcactaacggtactctcgctgatcatcttcacggcaggggaccgaagatgacgtggcgtgtaaggttagatattgcgttgcaaacggctttagctatggagtatcttcacttcgatattgttcctccggttgttcatagagatataacttcgtcgaatatctttgtggagaaggatatgaaaatcaaagtcggagactttggtctctctaggctcttggtgttttcagagacgactgtgaattcagctacttcgtctgattacgtttgtaccggaccacaaggtacgcccggttatttagacccggattatcaccggtcttttcggttaacggagaaaagtgacgtgtatagctacggtgtcgttttgatggagttgattacgggtatgaaagcggttgatcaacgacgtgagaagagggacatggctttagcggatcttgttgtatccaagattcaaatgggtcttttggatcaggtgattgaccccttgcttgcgttagacggcgatgatgtggctgcggtgagtgacggattcggtgttgcggcggttgctgagctggcgttccggtgtgttgcgacggataaggatgatcgtccggatgctaaagagattgttcaggagttgaggaggattaggagccatacacgtgtagcggatgatgacgtggcgaaaaattga

SEQ ID NO: 88612 - protein, 636 aa, Arabidopsis thaliana
  peptide (1)..(636): Ceres Seq. ID no. 12711161
  misc_feature (256)..(623): Homolog of NCBI NO: 29150383 NR Description: putative protein kinase [Oryza sativa (japonica
  misc_feature (24)..(628): Homolog of NCBI NO: 15408730 NR Description: P0443D08.12 [Oryza sativa (japonica
  misc_feature (194)..(623): Homolog of NCBI NO: 25404646 NR Description: probable wall-associated kinase T4O24.5
  misc_feature (5)..(226): Homolog of NCBI NO: 25404646 NR Description: probable wall-associated kinase T4O24.5
  misc_feature (194)..(623): Homolog of NCBI NO: 12597754 NR Description: protein kinase, putative [Arabidopsis thaliana]
  misc_feature (29)..(226): Homolog of NCBI NO: 12597754 NR Description: protein kinase, putative [Arabidopsis thaliana]
  misc_feature (194)..(623): Homolog of NCBI NO: 30697422 NR Description: serine/threonine protein kinase family
  misc_feature (29)..(226): Homolog of NCBI NO: 30697422 NR Description: serine/threonine protein kinase family
  misc_feature (310)..(623): Homolog of NCBI NO: 26450415 NR Description: unknown protein [Arabidopsis thaliana]
  misc_feature (310)..(623): Homolog of NCBI NO: 9758129 NR Description: contains similarity to protein
MSQPPWRCFSLLIFVLTIFSTKPSSASTSCSSSFHCPPFNSSPPYPFSASPGCGHPNFQIQCSSSRATITIKNLTFSILHYSSISSSLTLSPITNTNRNTNNCSSLRFSSSPNRFIDLTGSPFRVSDSSCSRLSLLRPCSPFTLPNCSRCPWDCKLLKNPGRILHGCESTHGSLSEQGCQGDLLGFLQDFFTRFGFEVEWDESQDPYFIKCRDCQIKNGVCGFNSTHPNQDFICFHKSRSELVTQRDNNKRVNHIAVLSLIFALTCLLLVFSVAVAIFRSRRASFLSSINEEDPAALFLRHHRSAALLPPVFTFEELESATNKFDPKRKIGDGGFGSVYLGQLSDGQLLAVKFLHHHHGATAAATEHCKAFSMKSFCNEILILSSINHPNLVKLHGYCSDPRGLLLVHDYVTNGTLADHLHGRGPKMTWRVRLDIALQTALAMEYLHFDIVPPVVHRDITSSNIFVEKDMKIKVGDFGLSRLLVFSETTVNSATSSDYVCTGPQGTPGYLDPDYHRSFRLTEKSDVYSYGVVLMELITGMKAVDQRREKRDMALADLVVSKIQMGLLDQVIDPLLALDGDDVAAVSDGFGVAAVAELAFRCVATDKDDRPDAKEIVQELRRIRSHTRVADDDVAKN

SEQ ID NO: 88613 - DNA, 1302 bp, Arabidopsis thaliana
  misc_feature (1)..(1302): Ceres Seq. ID no. 12711162
  misc_feature: MA Experiment ID: 20000306 Result: Down-regulated in Transcription
  misc_feature: MA Experiment 20000306 PARAMETER Experiment Name: At_Germinating_Seeds_Sub_P Parameter: Age (hr) Value: 6 vs. 0
  misc_feature: MA Experiment 20000306 PARAMETER Experiment Name: At_Germinating_Seeds_Sub_P Parameter: Organism Value: A. thaliana
  misc_feature: MA Experiment 20000306 PARAMETER Experiment Name: At_Germinating_Seeds_Sub_P Parameter: Plant Line Value: WS
  misc_feature: MA Experiment 20000306 PARAMETER Experiment Name: At_Germinating_Seeds_Sub_P Parameter: Tissue Value: Germinating Seeds
  misc_feature: MA Experiment ID: 20000307 Result: Down-regulated in Transcription
  misc_feature: MA Experiment 20000307 PARAMETER Experiment Name: At_Germinating_Seeds_Sub_P Parameter: Age (hr) Value: 24 vs. 0
  misc_feature: MA Experiment 20000307 PARAMETER Experiment Name: At_Germinating_Seeds_Sub_P Parameter: Organism Value: A. thaliana
  misc_feature: MA Experiment 20000307 PARAMETER Experiment Name: At_Germinating_Seeds_Sub_P Parameter: Plant Line Value: WS
  misc_feature: MA Experiment 20000307 PARAMETER Experiment Name: At_Germinating_Seeds_Sub_P Parameter: Tissue Value: Germinating Seeds
  misc_feature: MA Experiment ID: 20000315 Result: Down-regulated in Transcription
  misc_feature: MA Experiment 20000315 PARAMETER Experiment Name: At_14day_Shoots-Roots_Sub_P Parameter: Age (day) Value: 14
  misc_feature: MA Experiment 20000315 PARAMETER Experiment Name: At_14day_Shoots-Roots_Sub_P Parameter: Organism Value: A. thaliana
  misc_feature: MA Experiment 20000315 PARAMETER Experiment Name: At_14day_Shoots-Roots_Sub_P Parameter: Plant Line Value: WS
  misc_feature: MA Experiment 20000315 PARAMETER Experiment Name: At_14day_Shoots-Roots_Sub_P Parameter: Tissue Value: Shoots vs. Whole Plant
  misc_feature: MA Experiment ID: 20000327 Result: Up-regulated in Transcription
  misc_feature: MA Experiment 20000327 PARAMETER Experiment Name: At_42deg_Heat_Sub_P Parameter: Age (day) Value: 14
  misc_feature: MA Experiment 20000327 PARAMETER Experiment Name: At_42deg_Heat_Sub_P Parameter: Organism Value: A. thaliana
  misc_feature: MA Experiment 20000327 PARAMETER Experiment Name: At_42deg_Heat_Sub_P Parameter: Plant Line Value: WS
  misc_feature: MA Experiment 20000327 PARAMETER Experiment Name: At_42deg_Heat_Sub_P Parameter: Temperature (deg C) Value: 42 vs. 22
  misc_feature: MA Experiment 20000327 PARAMETER Experiment Name: At_42deg_Heat_Sub_P Parameter: Timepoint (hr) Value: 1
  misc_feature: MA Experiment 20000327 PARAMETER Experiment Name: At_42deg_Heat_Sub_P Parameter: Tissue Value: Aerial
  misc_feature: MA Experiment ID: 20000355 Result: Down-regulated in Transcription
  misc_feature: MA Experiment 20000355 PARAMETER Experiment Name: At_Siliques_Sub_P Parameter: Age (day) Value: 21
  misc_feature: MA Experiment 20000355 PARAMETER Experiment Name: At_Siliques_Sub_P Parameter: Organism Value: A. thaliana
  misc_feature: MA Experiment 20000355 PARAMETER Experiment Name: At_Siliques_Sub_P Parameter: Plant Line Value: WS
  misc_feature: MA Experiment 20000355 PARAMETER Experiment Name: At_Siliques_Sub_P Parameter: Tissue Value: Less Than 5mm Siliques vs. Whole Plant
  misc_feature: MA Experiment ID: 20000440 Result: Down-regulated in Transcription
  misc_feature: MA Experiment 20000440 PARAMETER Experiment Name: At_Closed-Flower__Sub_P Parameter: Tissue Value: Closed Flower vs. Whole Plant
atgggtctaatgaatcggtcaaagaatgatgagtacgtaaagctactaggagcatggcctagcccttttgtgctgagaactcggatcgcacttaacctaaagaacgtagcatacgagtatctagaagaagaagatactttgagttcggagagcgttttaaactataaccccgtccataaacagatccctatcctcattcatggcaacaaaccaatccgtgaatctctcaacatcgtcatgtatgttgatgagacttggctctccggtcctcccatccttccctctgatccatttgatcgcgctgtggctcgattttgggacgtctatatcgatgaacactgtttcacatcaatcaatggagtggcagtagcaaaaggtgaggagaacataaatgcggcgatagctaagctagagcagtgtatggctctattggaagaaacgtttcaagaatgcagcaaaggaagaggcttctttggaggagaaaacatcgggttcatcgacattggtttcggctcgatgttgggtcctcttacggttcttgagaaatttaccggcgtcaagttcatacatcctgaaaacacaccaggtcttttccattgggctgacagattctacgcccatgaagcggtcaagcctgtcatgcccgatatcgaaaaactggtccagttcgctaggctcaaggctcaagtggctctacacctcaagtcagtagagcacgagtatgtcgaagaaaccgatgttctgaaaggaaagagcgatcttcttattaaatccaaccctatacacaagaaagtccctgtcctcatccatggtgatgtatcaatctgtgaatctctcaacatcgtccaatacgtcgatgaatcttggccgtctgatctttccatcctcccaacacttccctcggaacgtgcctttgcccgtttttgggctcacttcgttgacggaaagttgtttgaatcgatcgatgcggtggcgggagcaaaagacgacgccgccaggatgacattggcggggaatctgatggagaatctagcggcacttgaagaggcgtttcaaaagagtagcaaaggcggggacttttttggaggggggaacattgggtttgtcgatataactgttggggccatagtaggtccaatctctgtcattgaagctttttcaggtgttaagtttttgcgtccagacacaacaccgggcctgattcagtgggctgagaaatttagggcccatgaagctgtaaaaccttacatgcctaccgttgccgagttcatcgagtttgccaaaaagaaattcagtgtttag

SEQ ID NO: 88614 - protein, 433 aa, Arabidopsis thaliana
  peptide (1)..(433): Ceres Seq. ID no. 12711163
  misc_feature (7)..(316): Homolog of NCBI NO: 25403291 NR Description: protein T7N9.20 [imported] - Arabidopsis thaliana
  misc_feature (318)..(430): Homolog of NCBI NO: 25403291 NR Description: protein T7N9.20 [imported] - Arabidopsis thaliana
  misc_feature (1)..(232): Homolog of NCBI NO: 15222499 NR Description: glutathione transferase, putative; protein id: [Arabidopsis thaliana] >gi|25313220|pir||G96721 probable
  misc_feature (223)..(433): Homolog of NCBI NO: 15222497 NR Description: glutathione transferase, putative; protein id: [Arabidopsis thaliana] >gi|25313218|pir||F96721 probable
  misc_feature (223)..(433): Homolog of NCBI NO: 38454100 NR Description: At1g69920 [Arabidopsis thaliana]
  misc_feature (226)..(433): Homolog of NCBI NO: 15223432 NR Description: glutathione transferase, putative; protein id: supported by cDNA: 2985., supported by cDNA: gi_11096019, by cDNA: gi_14994260, supported by cDNA: gi_15215629, supported
  misc_feature (226)..(433): Homolog of NCBI NO: 21592561 NR Description: glutathione transferase, putative [Arabidopsis
  misc_feature (226)..(433): Homolog of NCBI NO: 25403291 NR Description: protein T7N9.20 [imported] - Arabidopsis thaliana
  misc_feature (7)..(230): Homolog of NCBI NO: 15223432 NR Description: glutathione transferase, putative; protein id: supported by cDNA: 2985., supported by cDNA: gi_11096019, by cDNA: gi_14994260, supported by cDNA: gi_15215629, supported
  misc_feature (13)..(230): Homolog of NCBI NO: 21592561 NR Description: glutathione transferase, putative [Arabidopsis
MGLMNRSKNDEYVKLLGAWPSPFVLRTRIALNLKNVAYEYLEEEDTLSSESVLNYNPVHKQIPILIHGNKPIRESLNIVMYVDETWLSGPPILPSDPFDRAVARFWDVYIDEHCFTSINGVAVAKGEENINAAIAKLEQCMALLEETFQECSKGRGFFGGENIGFIDIGFGSMLGPLTVLEKFTGVKFIHPENTPGLFHWADRFYAHEAVKPVMPDIEKLVQFARLKAQVALHLKSVEHEYVEETDVLKGKSDLLIKSNPIHKKVPVLIHGDVSICESLNIVQYVDESWPSDLSILPTLPSERAFARFWAHFVDGKLFESIDAVAGAKDDAARMTLAGNLMENLAALEEAFQKSSKGGDFFGGGNIGFVDITVGAIVGPISVIEAFSGVKFLRPDTTPGLIQWAEKFRAHEAVKPYMPTVAEFIEFAKKKFSV

SEQ ID NO: 88615 - protein, 430 aa, Arabidopsis thaliana
  peptide (1)..(430): Ceres Seq. ID no. 12711164
  misc_feature (4)..(313): Homolog of NCBI NO: 25403291 NR Description: protein T7N9.20 [imported] - Arabidopsis thaliana
  misc_feature (315)..(427): Homolog of NCBI NO: 25403291 NR Description: protein T7N9.20 [imported] - Arabidopsis thaliana
  misc_feature (1)..(229): Homolog of NCBI NO: 15222499 NR Description: glutathione transferase, putative; protein id: [Arabidopsis thaliana] >gi|25313220|pir||G96721 probable
  misc_feature (220)..(430): Homolog of NCBI NO: 15222497 NR Description: glutathione transferase, putative; protein id: [Arabidopsis thaliana] >gi|25313218|pir||F96721 probable
  misc_feature (220)..(430): Homolog of NCBI NO: 38454100 NR Description: At1g69920 [Arabidopsis thaliana]
  misc_feature (223)..(430): Homolog of NCBI NO: 15223432 NR Description: glutathione transferase, putative; protein id: supported by cDNA: 2985., supported by cDNA: gi_11096019, by cDNA: gi_14994260, supported by cDNA: gi_15215629, supported
  misc_feature (223)..(430): Homolog of NCBI NO: 25403291 NR Description: protein T7N9.20 [imported] - Arabidopsis thaliana
  misc_feature (223)..(430): Homolog of NCBI NO: 21592561 NR Description: glutathione transferase, putative [Arabidopsis
  misc_feature (4)..(227): Homolog of NCBI NO: 15223432 NR Description: glutathione transferase, putative; protein id: supported by cDNA: 2985., supported by cDNA: gi_11096019, by cDNA: gi_14994260, supported by cDNA: gi_15215629, supported
  misc_feature (10)..(227): Homolog of NCBI NO: 21592561 NR Description: glutathione transferase, putative [Arabidopsis
MNRSKNDEYVKLLGAWPSPFVLRTRIALNLKNVAYEYLEEEDTLSSESVLNYNPVHKQIPILIHGNKPIRESLNIVMYVDETWLSGPPILPSDPFDRAVARFWDVYIDEHCFTSINGVAVAKGEENINAAIAKLEQCMALLEETFQECSKGRGFFGGENIGFIDIGFGSMLGPLTVLEKFTGVKFIHPENTPGLFHWADRFYAHEAVKPVMPDIEKLVQFARLKAQVALHLKSVEHEYVEETDVLKGKSDLLIKSNPIHKKVPVLIHGDVSICESLNIVQYVDESWPSDLSILPTLPSERAFARFWAHFVDGKLFESIDAVAGAKDDAARMTLAGNLMENLAALEEAFQKSSKGGDFFGGGNIGFVDITVGAIVGPISVIEAFSGVKFLRPDTTPGLIQWAEKFRAHEAVKPYMPTVAEFIEFAKKKFSV

SEQ ID NO: 88616 - protein, 354 aa, Arabidopsis thaliana
  peptide (1)..(354): Ceres Seq. ID no. 12711165
  misc_feature (1)..(237): Homolog of NCBI NO: 25403291 NR Description: protein T7N9.20 [imported] - Arabidopsis thaliana
  misc_feature (239)..(351): Homolog of NCBI NO: 25403291 NR Description: protein T7N9.20 [imported] - Arabidopsis thaliana
  misc_feature (1)..(153): Homolog of NCBI NO: 15222499 NR Description: glutathione transferase, putative; protein id: [Arabidopsis thaliana] >gi|25313220|pir||G96721 probable
  misc_feature (144)..(354): Homolog of NCBI NO: 15222497 NR Description: glutathione transferase, putative; protein id: [Arabidopsis thaliana] >gi|25313218|pir||F96721 probable
  misc_feature (144)..(354): Homolog of NCBI NO: 38454100 NR Description: At1g69920 [Arabidopsis thaliana]
  misc_feature (147)..(354): Homolog of NCBI NO: 15223432 NR Description: glutathione transferase, putative; protein id: supported by cDNA: 2985., supported by cDNA: gi_11096019, by cDNA: gi_14994260, supported by cDNA: gi_15215629, supported
  misc_feature (147)..(354): Homolog of NCBI NO: 25403291 NR Description: protein T7N9.20 [imported] - Arabidopsis thaliana
  misc_feature (147)..(354): Homolog of NCBI NO: 21592561 NR Description: glutathione transferase, putative [Arabidopsis
  misc_feature (1)..(151): Homolog of NCBI NO: 15223432 NR Description: glutathione transferase, putative; protein id: supported by cDNA: 2985., supported by cDNA: gi_11096019, by cDNA: gi_14994260, supported by cDNA: gi_15215629, supported
  misc_feature (1)..(151): Homolog of NCBI NO: 21592561 NR Description: glutathione transferase, putative [Arabidopsis
MYVDETWLSGPPILPSDPFDRAVARFWDVYIDEHCFTSINGVAVAKGEENINAAIAKLEQCMALLEETFQECSKGRGFFGGENIGFIDIGFGSMLGPLTVLEKFTGVKFIHPENTPGLFHWADRFYAHEAVKPVMPDIEKLVQFARLKAQVALHLKSVEHEYVEETDVLKGKSDLLIKSNPIHKKVPVLIHGDVSICESLNIVQYVDESWPSDLSILPTLPSERAFARFWAHFVDGKLFESIDAVAGAKDDAARMTLAGNLMENLAALEEAFQKSSKGGDFFGGGNIGFVDITVGAIVGPISVIEAFSGVKFLRPDTTPGLIQWAEKFRAHEAVKPYMPTVAEFIEFAKKKFSV

SEQ ID NO: 88617 - DNA, 2358 bp, Arabidopsis thaliana
  misc_feature (1)..(2358): Ceres Seq. ID no. 12711168
  misc_feature: MA Experiment ID: 20000180 Result: Down-regulated in Transcription
  misc_feature: MA Experiment 20000180 PARAMETER Experiment Name: At_Germinating_Seeds_P Parameter: Age (hr) Value: 24 vs. 0
  misc_feature: MA Experiment 20000180 PARAMETER Experiment Name: At_Germinating_Seeds_P Parameter: Tissue Value: Germinating Seeds
  misc_feature: MA Experiment ID: 20001451 Result: Down-regulated in Transcription
  misc_feature: MA Experiment 20001451 PARAMETER Experiment Name: At_Far-red-induction_P Parameter: Age (day) Value: 7
  misc_feature: MA Experiment 20001451 PARAMETER Experiment Name: At_Far-red-induction_P Parameter: Light Value: Far-red vs. White
  misc_feature: MA Experiment 20001451 PARAMETER Experiment Name: At_Far-red-induction_P Parameter: Organism Value: A. thaliana
  misc_feature: MA Experiment 20001451 PARAMETER Experiment Name: At_Far-red-induction_P Parameter: Plant Line Value: Columbia
  misc_feature: MA Experiment 20001451 PARAMETER Experiment Name: At_Far-red-induction_P Parameter: Timepoint (hr) Value: 24
  misc_feature: MA Experiment 20001451 PARAMETER Experiment Name: At_Far-red-induction_P Parameter: Tissue Value: Whole Plant
atgtcgagagacacatccgaggagatcgagattttcatttttgaagagcaattcttagagaagtatgtccaacttcattctgagcctcaatatcggctccacaattcaaaagcagctgagtcatacaactctagttacttaaacaacgcggagaggggtttcaaagcagtgactgcgagcttccaaagcggctctatgttcgacaagatgaacaacatatcgcagacgttcaggctcaaaccttgcgacgtggagagaaacaaaaacattagaaaccagttaaggacaacaaggagagggagttgtgagaaatacaaaggcgggatccaaacgtggagacagaagaaactgatgataaacaatgagatggatttgtcagatgcagtgattgtaaaatctggtagattgaaatcagtagtgtggaatgatttcgatagagttagaaaaggtgagacatacattgcaatctgcaggcattgtaagaagcgacttagcggctcaagcgcgagcgggacttcgcatttgaggaaccatttgattagatgtaggaggagaactaatggtaacaacaacggtgttgctcagtatttcgttaaggggaagaagaaagagttagctaatgagcggataaaggatgaagaagtgcttagtgtagtgaatgttagatatgaacatgagaaagaagaacatgaagatgttaatgttgtgagtatgggtttggatcagaggcggtgtcgattcgatttagccaggatgattatcttacatggttatccgttgagtatggttgaagatgttggattcagaatgtttattggaaatttacagcctttgtttgagcttgttgcttttgaaagagttgaatctgattgtatggagatttatgcgaaagagaagcataagattttcgaagcgttggataagttacctgggaagattagtattagtgttgatgtgtggagtggttcgggtgattctgatgaattcttgtgtttggcagcgcattatattgatgaaggatgggaattgaaaaagagagttttgaacttctttatggttgatccatctcatagtggtgagatgcttgctgaagttataatgacgtgtttgatggagtgggatattgaccggaagttgttttctatggcgtcgagtcatgctcctccgtttagtgagaacgtagctagtaaaatcagagaccggttatcgcagaataagttcctttactgttacggccaattgtttgatgtgagctgtggagttaatgtcattaacgagatggttcaagattccctggaagcttgttgtgacacaataaacattattcgagagagtattagatatgttaaaagctcagaatctattcaagatagattcaaccagtggatagttgaaacgggagctgtaagtgaaaggaacctatgcatcgatgacccaatgagatgggactcaacatgcaccatgctggagaatgctttagagcaaaagagcgcgttttcgctcatgaatgaacatgatcctgattccgtgttatgtccatctgatttggaatgggagagattaggaacaattgttgagttcttgaaagtctttgttgaagtgataaatgcattcacaaagagcagttgtttacccgccaatatgtacttcccagaggtatgcgacatacacctccggttaattgagtggagcaagaacccggatgatttcattagctctctagttgtaaacatgagaaagaaatttgacgatttctgggataaaaactacctggttctagccatcgctaccatattagacccgcggttcaaaatgaagctggttgaatactattaccctctgttttatggtactagtgcttcagagctcattgaagatatttctgagtgcatcaaactgctgtacgatgagcattctgtaggatcgctattagcgtcgtcaaatcaagctcttgactggcagaatcatcatcatcggtcaaacggtgttgcccatgggaaagagcctgacgatagactcacagaattcgataggtacattaacgaaacaactactacaccgggtcaagactctaaatcagatctagaaaagtatctagaagagccactttttccccggaattcagatttcgacatcctgaactggtggaaagttcacacacctaagtacccaattctctccatgatggcacgtaacgtgttagcagttccaatgttgaatgtatcatcagaagaagacgcctttgaaacttgtcaaaggagacgggttagtgaaacatggcgttcgcttagaccgagtaccgtgcaagccttgatgtgtgcacaagattggatccaaagcgaactagaaagctcttga

SEQ ID NO: 88618 - protein, 785 aa, Arabidopsis thaliana
  peptide (1)..(785): Ceres Seq. ID no. 12711169
  misc_feature (694)..(778): Pfam Name: hAT family dimerisation domain Pfam Description: hAT family dimerisation domain
  misc_feature (123)..(785): Homolog of NCBI NO: 22331085 NR Description: hypothetical protein; protein id: At3g14800.1, by cDNA: gi_18176329, supported by cDNA: gi_20465374 [Arabidopsis
  misc_feature (123)..(783): Homolog of NCBI NO: 30683310 NR Description: expressed protein [Arabidopsis thaliana]
  misc_feature (132)..(783): Homolog of NCBI NO: 22535576 NR Description: Ac transposase-like protein [Oryza sativa
  misc_feature (120)..(684): Homolog of NCBI NO: 15228474 NR Description: putative transposase; protein id: At3g42170.1
  misc_feature (661)..(785): Homolog of NCBI NO: 15228474 NR Description: putative transposase; protein id: At3g42170.1
  misc_feature (240)..(665): Homolog of NCBI NO: 15220044 NR Description: hypothetical protein; protein id: At1g80020.1
  misc_feature (671)..(785): Homolog of NCBI NO: 15220044 NR Description: hypothetical protein; protein id: At1g80020.1
  misc_feature (159)..(704): Homolog of NCBI NO: 15218119 NR Description: hypothetical protein; protein id: At1g15300.1, by cDNA: gi_20260645 [Arabidopsis thaliana]
  misc_feature (690)..(780): Homolog of NCBI NO: 15218119 NR Description: hypothetical protein; protein id: At1g15300.1, by cDNA: gi_20260645 [Arabidopsis thaliana]
  misc_feature (241)..(779): Homolog of NCBI NO: 20521440 NR Description: B1003B09.3 [Oryza sativa (japonica
MSRDTSEEIEIFIFEEQFLEKYVQLHSEPQYRLHNSKAAESYNSSYLNNAERGFKAVTASFQSGSMFDKMNNISQTFRLKPCDVERNKNIRNQLRTTRRGSCEKYKGGIQTWRQKKLMINNEMDLSDAVIVKSGRLKSVVWNDFDRVRKGETYIAICRHCKKRLSGSSASGTSHLRNHLIRCRRRTNGNNNGVAQYFVKGKKKELANERIKDEEVLSVVNVRYEHEKEEHEDVNVVSMGLDQRRCRFDLARMIILHGYPLSMVEDVGFRMFIGNLQPLFELVAFERVESDCMEIYAKEKHKIFEALDKLPGKISISVDVWSGSGDSDEFLCLAAHYIDEGWELKKRVLNFFMVDPSHSGEMLAEVIMTCLMEWDIDRKLFSMASSHAPPFSENVASKIRDRLSQNKFLYCYGQLFDVSCGVNVINEMVQDSLEACCDTINIIRESIRYVKSSESIQDRFNQWIVETGAVSERNLCIDDPMRWDSTCTMLENALEQKSAFSLMNEHDPDSVLCPSDLEWERLGTIVEFLKVFVEVINAFTKSSCLPANMYFPEVCDIHLRLIEWSKNPDDFISSLVVNMRKKFDDFWDKNYLVLAIATILDPRFKMKLVEYYYPLFYGTSASELIEDISECIKLLYDEHSVGSLLASSNQALDWQNHHHRSNGVAHGKEPDDRLTEFDRYINETTTTPGQDSKSDLEKYLEEPLFPRNSDFDILNWWKVHTPKYPILSMMARNVLAVPMLNVSSEEDAFETCQRRRVSETWRSLRPSTVQALMCAQDWIQSELESS

SEQ ID NO: 88619 - protein, 720 aa, Arabidopsis thaliana
  peptide (1)..(720): Ceres Seq. ID no. 12711170
  misc_feature (629)..(713): Pfam Name: hAT family dimerisation domain Pfam Description: hAT family dimerisation domain
  misc_feature (58)..(720): Homolog of NCBI NO: 22331085 NR Description: hypothetical protein; protein id: At3g14800.1, by cDNA: gi_18176329, supported by cDNA: gi_20465374 [Arabidopsis
  misc_feature (58)..(718): Homolog of NCBI NO: 30683310 NR Description: expressed protein [Arabidopsis thaliana]
  misc_feature (67)..(718): Homolog of NCBI NO: 22535576 NR Description: Ac transposase-like protein [Oryza sativa
  misc_feature (55)..(619): Homolog of NCBI NO: 15228474 NR Description: putative transposase; protein id: At3g42170.1
  misc_feature (596)..(720): Homolog of NCBI NO: 15228474 NR Description: putative transposase; protein id: At3g42170.1
  misc_feature (175)..(600): Homolog of NCBI NO: 15220044 NR Description: hypothetical protein; protein id: At1g80020.1
  misc_feature (606)..(720): Homolog of NCBI NO: 15220044 NR Description: hypothetical protein; protein id: At1g80020.1
  misc_feature (94)..(639): Homolog of NCBI NO: 15218119 NR Description: hypothetical protein; protein id: At1g15300.1, by cDNA: gi_20260645 [Arabidopsis thaliana]
  misc_feature (625)..(715): Homolog of NCBI NO: 15218119 NR Description: hypothetical protein; protein id: At1g15300.1, by cDNA: gi_20260645 [Arabidopsis thaliana]
  misc_feature (176)..(714): Homolog of NCBI NO: 20521440 NR Description: B1003B09.3 [Oryza sativa (japonica
MFDKMNNISQTFRLKPCDVERNKNIRNQLRTTRRGSCEKYKGGIQTWRQKKLMINNEMDLSDAVIVKSGRLKSVVWNDFDRVRKGETYIAICRHCKKRLSGSSASGTSHLRNHLIRCRRRTNGNNNGVAQYFVKGKKKELANERIKDEEVLSVVNVRYEHEKEEHEDVNVVSMGLDQRRCRFDLARMIILHGYPLSMVEDVGFRMFIGNLQPLFELVAFERVESDCMEIYAKEKHKIFEALDKLPGKISISVDVWSGSGDSDEFLCLAAHYIDEGWELKKRVLNFFMVDPSHSGEMLAEVIMTCLMEWDIDRKLFSMASSHAPPFSENVASKIRDRLSQNKFLYCYGQLFDVSCGVNVINEMVQDSLEACCDTINIIRESIRYVKSSESIQDRFNQWIVETGAVSERNLCIDDPMRWDSTCTMLENALEQKSAFSLMNEHDPDSVLCPSDLEWERLGTIVEFLKVFVEVINAFTKSSCLPANMYFPEVCDIHLRLIEWSKNPDDFISSLVVNMRKKFDDFWDKNYLVLAIATILDPRFKMKLVEYYYPLFYGTSASELIEDISECIKLLYDEHSVGSLLASSNQALDWQNHHHRSNGVAHGKEPDDRLTEFDRYINETTTTPGQDSKSDLEKYLEEPLFPRNSDFDILNWWKVHTPKYPILSMMARNVLAVPMLNVSSEEDAFETCQRRRVSETWRSLRPSTVQALMCAQDWIQSELESS

SEQ ID NO: 88620 - protein, 716 aa, Arabidopsis thaliana
  peptide (1)..(716): Ceres Seq. ID no. 12711171
  misc_feature (625)..(709): Pfam Name: hAT family dimerisation domain Pfam Description: hAT family dimerisation domain
  misc_feature (54)..(716): Homolog of NCBI NO: 22331085 NR Description: hypothetical protein; protein id: At3g14800.1, by cDNA: gi_18176329, supported by cDNA: gi_20465374 [Arabidopsis
  misc_feature (54)..(714): Homolog of NCBI NO: 30683310 NR Description: expressed protein [Arabidopsis thaliana]
  misc_feature (63)..(714): Homolog of NCBI NO: 22535576 NR Description: Ac transposase-like protein [Oryza sativa
  misc_feature (51)..(615): Homolog of NCBI NO: 15228474 NR Description: putative transposase; protein id: At3g42170.1
  misc_feature (592)..(716): Homolog of NCBI NO: 15228474 NR Description: putative transposase; protein id: At3g42170.1
  misc_feature (171)..(596): Homolog of NCBI NO: 15220044 NR Description: hypothetical protein; protein id: At1g80020.1
  misc_feature (602)..(716): Homolog of NCBI NO: 15220044 NR Description: hypothetical protein; protein id: At1g80020.1
  misc_feature (90)..(635): Homolog of NCBI NO: 15218119 NR Description: hypothetical protein; protein id: At1g15300.1, by cDNA: gi_20260645 [Arabidopsis thaliana]
  misc_feature (621)..(711): Homolog of NCBI NO: 15218119 NR Description: hypothetical protein; protein id: At1g15300.1, by cDNA: gi_20260645 [Arabidopsis thaliana]
  misc_feature (172)..(710): Homolog of NCBI NO: 20521440 NR Description: B1003B09.3 [Oryza sativa (japonica
MNNISQTFRLKPCDVERNKNIRNQLRTTRRGSCEKYKGGIQTWRQKKLMINNEMDLSDAVIVKSGRLKSVVWNDFDRVRKGETYIAICRHCKKRLSGSSASGTSHLRNHLIRCRRRTNGNNNGVAQYFVKGKKKELANERIKDEEVLSVVNVRYEHEKEEHEDVNVVSMGLDQRRCRFDLARMIILHGYPLSMVEDVGFRMFIGNLQPLFELVAFERVESDCMEIYAKEKHKIFEALDKLPGKISISVDVWSGSGDSDEFLCLAAHYIDEGWELKKRVLNFFMVDPSHSGEMLAEVIMTCLMEWDIDRKLFSMASSHAPPFSENVASKIRDRLSQNKFLYCYGQLFDVSCGVNVINEMVQDSLEACCDTINIIRESIRYVKSSESIQDRFNQWIVETGAVSERNLCIDDPMRWDSTCTMLENALEQKSAFSLMNEHDPDSVLCPSDLEWERLGTIVEFLKVFVEVINAFTKSSCLPANMYFPEVCDIHLRLIEWSKNPDDFISSLVVNMRKKFDDFWDKNYLVLAIATILDPRFKMKLVEYYYPLFYGTSASELIEDISECIKLLYDEHSVGSLLASSNQALDWQNHHHRSNGVAHGKEPDDRLTEFDRYINETTTTPGQDSKSDLEKYLEEPLFPRNSDFDILNWWKVHTPKYPILSMMARNVLAVPMLNVSSEEDAFETCQRRRVSETWRSLRPSTVQALMCAQDWIQSELESS

SEQ ID NO: 88621 - DNA, 3798 bp, Arabidopsis thaliana
  misc_feature (1)..(3798): Ceres Seq. ID no. 12711186
  misc_feature: MA Experiment ID: 20000171 Result: Up-regulated in Transcription
  misc_feature: MA Experiment 20000171 PARAMETER Experiment Name: At_42deg_Heat_P Parameter: Age (day) Value: 14
  misc_feature: MA Experiment 20000171 PARAMETER Experiment Name: At_42deg_Heat_P Parameter: Organism Value: A. thaliana
  misc_feature: MA Experiment 20000171 PARAMETER Experiment Name: At_42deg_Heat_P Parameter: Plant Line Value: WS
  misc_feature: MA Experiment 20000171 PARAMETER Experiment Name: At_42deg_Heat_P Parameter: Temperature (deg C) Value: 42 vs. 22
  misc_feature: MA Experiment 20000171 PARAMETER Experiment Name: At_42deg_Heat_P Parameter: Timepoint (hr) Value: 1
  misc_feature: MA Experiment 20000171 PARAMETER Experiment Name: At_42deg_Heat_P Parameter: Tissue Value: Aerial
  misc_feature: MA Experiment ID: 20000184 Result: Down-regulated in Transcription
  misc_feature: MA Experiment 20000184 PARAMETER Experiment Name: At_Shoots__P Parameter: Age (day) Value: 7
  misc_feature: MA Experiment 20000184 PARAMETER Experiment Name: At_Shoots__P Parameter: Tissue Value: Shoots vs. Whole Plant
  misc_feature: MA Experiment ID: 20000286 Result: Up-regulated in Transcription
  misc_feature: MA Experiment 20000286 PARAMETER Experiment Name: At_Open_Flower_P Parameter: Age (day) Value: 21
  misc_feature: MA Experiment 20000286 PARAMETER Experiment Name: At_Open_Flower_P Parameter: Plant Line Value: WS
  misc_feature: MA Experiment 20000286 PARAMETER Experiment Name: At_Open_Flower_P Parameter: Tissue Value: Half Open vs. Whole Plant
  misc_feature: MA Experiment ID: 20000495 Result: Down-regulated in Transcription
  misc_feature: MA Experiment 20000495 PARAMETER Experiment Name: At_Guard_Cells_P Parameter: Harvest Date Value: 8/2/2002
  misc_feature: MA Experiment 20000495 PARAMETER Experiment Name: At_Guard_Cells_P Parameter: Organism Value: A. thaliana
  misc_feature: MA Experiment 20000495 PARAMETER Experiment Name: At_Guard_Cells_P Parameter: Tissue Value: Guard Cells vs. Leaves
  misc_feature: MA Experiment ID: 20000794 Result: Up-regulated in Transcription
  misc_feature: MA Experiment 20000794 PARAMETER Experiment Name: At_Petals_P Parameter: Age (day) Value: 23-25 days
  misc_feature: MA Experiment 20000794 PARAMETER Experiment Name: At_Petals_P Parameter: Plant Line Value: WS
  misc_feature: MA Experiment 20000794 PARAMETER Experiment Name: At_Petals_P Parameter: Tissue Value: Petals vs. Whole plant
  misc_feature: MA Experiment ID: 20001247 Result: Up-regulated in Transcription
  misc_feature: MA Experiment 20001247 PARAMETER Experiment Name: At_Far-red-induction_P Parameter: Age (day) Value: 7
  misc_feature: MA Experiment 20001247 PARAMETER Experiment Name: At_Far-red-induction_P Parameter: Light Value: Far-red vs. White
  misc_feature: MA Experiment 20001247 PARAMETER Experiment Name: At_Far-red-induction_P Parameter: Organism Value: A. thaliana
  misc_feature: MA Experiment 20001247 PARAMETER Experiment Name: At_Far-red-induction_P Parameter: Plant Line Value: Columbia
  misc_feature: MA Experiment 20001247 PARAMETER Experiment Name: At_Far-red-induction_P Parameter: Timepoint (hr) Value: 1
  misc_feature: MA Experiment 20001247 PARAMETER Experiment Name: At_Far-red-induction_P Parameter: Tissue Value: Whole Plant
atggttggaggaagtagtgcacagaagctaactacaaatgatgcacttgcatatcttaaagctgtcaaggataaatttcaagataaacgtgacaaatacgatgagtttcttgaggttatgaaagattttaaagctcagagagttgatactactggtgttatcttaagggtgaaagaactttttaaagggaacagagaattgattttggggtttaatactttcttaccaaagggtttcgagataactctccgacccgaggatgaccaacccgctgcaccaaagaagcctgttgagtttgaggaagctattagttttgttaacaagattaagacaaggtttcaaggcgatgatcgtgtatacaaatcgtttttagacattttgaacatgtatagaaaggaaaacaagtctattactgaggtctaccatgaggtggctatcctttttcgggaccatcacgatttgcttggagagttcactcactttctccctgatacttcagcaactgcatctactaatgattctgtaaaagttccagtacgtgatagaggcattaagtctcttcccaccatgcgtcaaatagatcttgataagaaggaccggattattacttcgcatcctaaccgtgccctcaaaaccgaaaatatggacgtagaccatgagaggtctttgttgaaagatagtaaagaagaagtgagacgcattgacaaaaagaatgatttcatggatgatagagacaggaaagattacagaggtcttgaccacgatagccataaagaacatttcttcaacagcaaaaagaaattgatacgtaaggatgatgattctgctgaaatgtcagatcaagccagggaaggagacaagttttctggagccattccgagttcatctacttatgatgaaaaaggtcatagccaagaacttgcttttgttgatagagtgaaggcaaagcttgataccgcggataaccaagagttcttacgatgtcttaatctctattcaaaggagataatcagccaaccagaattgcagtctttggtgagtgatttaattggtgtatatccagaccttatggacgccttcaaagtctttttggctcagtgtgacaagaatgatggattactctctggtatcgtgtctaagaaatccttgtggagtgaaggcaaatgtcctcaacctactaagtcacttgacaaagatacagaccgagaacgtgagaagattgaaaggtatagagaaagagaccgtgagaaggagaggcttgaaaaggtggcagcgagtcagaaatgggctaaacctatcagtgaactagatctctcgaactgtgaacagtgcacacctagttatcggagacttccaaagaattatccaattcctatagcaagccaaaaaatggagattggtagccaagtgcttaatgatcattgggtctctgtcacttcaggaagtgaagactattcattcaaacacatgcgcaagaaccaatacgaagagagcctattcaaatgtgaagatgacaggttcgagctagacatgttattagagtctgtgatctcggctactaatcgagttgaagagttattggcaaagattaacagtaatgaattgaaaaccgatactcccatctgtatcgaggatcacctcacagctctaaacctaagatgcatagaacggttatacagtgaccatgggctcgatgtgttggatttgttaaagaagaatgcatatcttgctttaccggtaatactaacccgtttgaaacaaaagcaagaagaatgggcaaggtgtcgtactgagtttaacaaagtctgggctgacatatatacaaagaactaccacaggtcgcttgatcatcgcagtttttatttcaaacagcaggattcaaagaatctgagcacaaaagcattgctggcagagataaaagagatctctgaaaagaagcgaggcgaagatgatgcacttcttgctcttgcggctggaaatagacgaactatttcttccaatatgagttttgattatccggatcctgatcttcacgaagatctgtatcagctgatcaagtattcatgtggagaaatgtgttcaacagaacagttagataaggtaatgaaggtatggacagaatttttggaaccaatatttggtgttccttctcgccctcaaggtgccgaagaccgagaagatgctgtcaagtctacaaaccatgaccgagaagaccaagaagatgctgtcagtcctcaaaatggagctagtattgccaactctatgcggtcaaatggccctcgaaaagtcaatgaaagtaatcaagtgcggcaagctagtgagttggataaagatgttacttctagtaagacctcagatgccttgttatcatgtgacaacactcagaatgataaaatgccgaagaatctgaccacacctgacgaaagagccgaaaccaaacaaattggcgacaaccctgtaattccaaatgggacagtagcagaatggttcgctggggaagccaaagtcgaaagagaggagggtgaactttctccaacaggagattttgaagaagataattatgcagttcatggagagaatgacatggaggctctcagcaaaagtaaggagaatgatgcaactgcagatgatgcaagtgctccaagatcatcagatggtagcggaaacacatctcacaacggtgatgtttctggaactgactctggtgatggtgaagattgttatcgcgaagatgatatagaccataataaggtagaaagtgaaggtgaggctgaagaaggtatgtctgatggccatgatgatactgaaggagatatgcctgtgttgtccatctcagtaaaaaacctgctacatgtgaaacctcttgcaaagtatgtccctccagctttgtacgataaggacaacgatgattctcggaagaactcacaagtcttttatgggaatgattctttttatgttctattcaggcttcatcagattttgtatgacagaatattatcagcaaaaatcaattcatcatctccagatagaaagtggaagacctcaaatccaacaaaccccgctgattcgtacgccagaatcatggatgctctctacaatttgctcgatggcacatccgataattcaaagttcgaagatgattgccgagcaattatcgggacccagtcatatgttctcttcacattagacaaactgatctataagctcatcaagcatctccaagcagtagcagctgatgagatggacaacaaattacaacagctttatgcttatgagaaatccagaaagcctgagaagtttctggatgctgtttattacgaaaatgctcttgtgcttcttcccgatgaggatatataccgcattgaatgtgaacaatcgacaccaagcaaactctctattcagcttctggactatggacatgataagcctgatgtgacatccatatccatggacccaacttttgcagcttacctccacaatgtattcctttcttatcaacctaatgcgaaagagaatcctcgaatctatttgaaacggaataagcgtaaaaatggtggtgacgatgaactctgcaccacggatgaagttaagattattaatggtttggaatgtaagataacctgcagttcttcaaaggtctcctatgtattagacaccgaggatgtgttgcatcgtgctaagaggaggaaacttttaaaccaaagcggtttacccctcgcacatgattctgtttgcagtggttctttaattaggcaaaggagaacacaaagatatcaaaaacttctcaccggtcaatga

SEQ ID NO: 88622 - protein, 1265 aa, Arabidopsis thaliana
  peptide (1)..(1265): Ceres Seq. ID no. 12711187
  misc_feature (117)..(163): Pfam Name: Paired amphipathic helix repeat Pfam Description: Paired amphipathic helix repeat
  misc_feature (3)..(933): Homolog of NCBI NO: 6094552 NR Description: unknown protein [Arabidopsis thaliana]
  misc_feature (828)..(1234): Homolog of NCBI NO: 6094552 NR Description: unknown protein [Arabidopsis thaliana]
  misc_feature (323)..(1262): Homolog of NCBI NO: 15218938 NR Description: hypothetical protein; protein id: At1g59890.1
  misc_feature (3)..(198): Homolog of NCBI NO: 15218938 NR Description: hypothetical protein; protein id: At1g59890.1
  misc_feature (432)..(1262): Homolog of NCBI NO: 15218525 NR Description: unknown protein; protein id: At1g10450.1
  misc_feature (12)..(200): Homolog of NCBI NO: 15218525 NR Description: unknown protein; protein id: At1g10450.1
  misc_feature (373)..(1217): Homolog of NCBI NO: 25402600 NR Description: protein T10O24.5 [imported] - Arabidopsis >gi|5091536|gb|AAD39565.1|AC007067_5 T10O24.5 [Arabidopsis
  misc_feature (12)..(200): Homolog of NCBI NO: 25402600 NR Description: protein T10O24.5 [imported] - Arabidopsis >gi|5091536|gb|AAD39565.1|AC007067_5 T10O24.5 [Arabidopsis
  misc_feature (307)..(1262): Homolog of NCBI NO: 25404243 NR Description: hypothetical protein F23H11.20 [imported] - thaliana >gi|5080821|gb|AAD39330.1|AC007258_19 Hypothetical
  misc_feature (3)..(198): Homolog of NCBI NO: 25404243 NR Description: hypothetical protein F23H11.20 [imported] - thaliana >gi|5080821|gb|AAD39330.1|AC007258_19 Hypothetical
MVGGSSAQKLTTNDALAYLKAVKDKFQDKRDKYDEFLEVMKDFKAQRVDTTGVILRVKELFKGNRELILGFNTFLPKGFEITLRPEDDQPAAPKKPVEFEEAISFVNKIKTRFQGDDRVYKSFLDILNMYRKENKSITEVYHEVAILFRDHHDLLGEFTHFLPDTSATASTNDSVKVPVRDRGIKSLPTMRQIDLDKKDRIITSHPNRALKTENMDVDHERSLLKDSKEEVRRIDKKNDFMDDRDRKDYRGLDHDSHKEHFFNSKKKLIRKDDDSAEMSDQAREGDKFSGAIPSSSTYDEKGHSQELAFVDRVKAKLDTADNQEFLRCLNLYSKEIISQPELQSLVSDLIGVYPDLMDAFKVFLAQCDKNDGLLSGIVSKKSLWSEGKCPQPTKSLDKDTDREREKIERYRERDREKERLEKVAASQKWAKPISELDLSNCEQCTPSYRRLPKNYPIPIASQKMEIGSQVLNDHWVSVTSGSEDYSFKHMRKNQYEESLFKCEDDRFELDMLLESVISATNRVEELLAKINSNELKTDTPICIEDHLTALNLRCIERLYSDHGLDVLDLLKKNAYLALPVILTRLKQKQEEWARCRTEFNKVWADIYTKNYHRSLDHRSFYFKQQDSKNLSTKALLAEIKEISEKKRGEDDALLALAAGNRRTISSNMSFDYPDPDLHEDLYQLIKYSCGEMCSTEQLDKVMKVWTEFLEPIFGVPSRPQGAEDREDAVKSTNHDREDQEDAVSPQNGASIANSMRSNGPRKVNESNQVRQASELDKDVTSSKTSDALLSCDNTQNDKMPKNLTTPDERAETKQIGDNPVIPNGTVAEWFAGEAKVEREEGELSPTGDFEEDNYAVHGENDMEALSKSKENDATADDASAPRSSDGSGNTSHNGDVSGTDSGDGEDCYREDDIDHNKVESEGEAEEGMSDGHDDTEGDMPVLSISVKNLLHVKPLAKYVPPALYDKDNDDSRKNSQVFYGNDSFYVLFRLHQILYDRILSAKINSSSPDRKWKTSNPTNPADSYARIMDALYNLLDGTSDNSKFEDDCRAIIGTQSYVLFTLDKLIYKLIKHLQAVAADEMDNKLQQLYAYEKSRKPEKFLDAVYYENALVLLPDEDIYRIECEQSTPSKLSIQLLDYGHDKPDVTSISMDPTFAAYLHNVFLSYQPNAKENPRIYLKRNKRKNGGDDELCTTDEVKIINGLECKITCSSSKVSYVLDTEDVLHRAKRRKLLNQSGLPLAHDSVCSGSLIRQRRTQRYQKLLTGQ

SEQ ID NO: 88623 - protein, 1226 aa, Arabidopsis thaliana
  peptide (1)..(1226): Ceres Seq. ID no. 12711188
  misc_feature (78)..(124): Pfam Name: Paired amphipathic helix repeat Pfam Description: Paired amphipathic helix repeat
  misc_feature (1)..(894): Homolog of NCBI NO: 6094552 NR Description: unknown protein [Arabidopsis thaliana]
  misc_feature (789)..(1195): Homolog of NCBI NO: 6094552 NR Description: unknown protein [Arabidopsis thaliana]
  misc_feature (284)..(1223): Homolog of NCBI NO: 15218938 NR Description: hypothetical protein; protein id: At1g59890.1
  misc_feature (1)..(159): Homolog of NCBI NO: 15218938 NR Description: hypothetical protein; protein id: At1g59890.1
  misc_feature (393)..(1223): Homolog of NCBI NO: 15218525 NR Description: unknown protein; protein id: At1g10450.1
  misc_feature (1)..(161): Homolog of NCBI NO: 15218525 NR Description: unknown protein; protein id: At1g10450.1
  misc_feature (334)..(1178): Homolog of NCBI NO: 25402600 NR Description: protein T10O24.5 [imported] - Arabidopsis >gi|5091536|gb|AAD39565.1|AC007067_5 T10O24.5 [Arabidopsis
  misc_feature (1)..(161): Homolog of NCBI NO: 25402600 NR Description: protein T10O24.5 [imported] - Arabidopsis >gi|5091536|gb|AAD39565.1|AC007067_5 T10O24.5 [Arabidopsis
  misc_feature (268)..(1223): Homolog of NCBI NO: 25404243 NR Description: hypothetical protein F23H11.20 [imported] - thaliana >gi|5080821|gb|AAD39330.1|AC007258_19 Hypothetical
  misc_feature (1)..(159): Homolog of NCBI NO: 25404243 NR Description: hypothetical protein F23H11.20 [imported] - thaliana >gi|5080821|gb|AAD39330.1|AC007258_19 Hypothetical
MKDFKAQRVDTTGVILRVKELFKGNRELILGFNTFLPKGFEITLRPEDDQPAAPKKPVEFEEAISFVNKIKTRFQGDDRVYKSFLDILNMYRKENKSITEVYHEVAILFRDHHDLLGEFTHFLPDTSATASTNDSVKVPVRDRGIKSLPTMRQIDLDKKDRIITSHPNRALKTENMDVDHERSLLKDSKEEVRRIDKKNDFMDDRDRKDYRGLDHDSHKEHFFNSKKKLIRKDDDSAEMSDQAREGDKFSGAIPSSSTYDEKGHSQELAFVDRVKAKLDTADNQEFLRCLNLYSKEIISQPELQSLVSDLIGVYPDLMDAFKVFLAQCDKNDGLLSGIVSKKSLWSEGKCPQPTKSLDKDTDREREKIERYRERDREKERLEKVAASQKWAKPISELDLSNCEQCTPSYRRLPKNYPIPIASQKMEIGSQVLNDHWVSVTSGSEDYSFKHMRKNQYEESLFKCEDDRFELDMLLESVISATNRVEELLAKINSNELKTDTPICIEDHLTALNLRCIERLYSDHGLDVLDLLKKNAYLALPVILTRLKQKQEEWARCRTEFNKVWADIYTKNYHRSLDHRSFYFKQQDSKNLSTKALLAEIKEISEKKRGEDDALLALAAGNRRTISSNMSFDYPDPDLHEDLYQLIKYSCGEMCSTEQLDKVMKVWTEFLEPIFGVPSRPQGAEDREDAVKSTNHDREDQEDAVSPQNGASIANSMRSNGPRKVNESNQVRQASELDKDVTSSKTSDALLSCDNTQNDKMPKNLTTPDERAETKQIGDNPVIPNGTVAEWFAGEAKVEREEGELSPTGDFEEDNYAVHGENDMEALSKSKENDATADDASAPRSSDGSGNTSHNGDVSGTDSGDGEDCYREDDIDHNKVESEGEAEEGMSDGHDDTEGDMPVLSISVKNLLHVKPLAKYVPPALYDKDNDDSRKNSQVFYGNDSFYVLFRLHQILYDRILSAKINSSSPDRKWKTSNPTNPADSYARIMDALYNLLDGTSDNSKFEDDCRAIIGTQSYVLFTLDKLIYKLIKHLQAVAADEMDNKLQQLYAYEKSRKPEKFLDAVYYENALVLLPDEDIYRIECEQSTPSKLSIQLLDYGHDKPDVTSISMDPTFAAYLHNVFLSYQPNAKENPRIYLKRNKRKNGGDDELCTTDEVKIINGLECKITCSSSKVSYVLDTEDVLHRAKRRKLLNQSGLPLAHDSVCSGSLIRQRRTQRYQKLLTGQ

SEQ ID NO: 88624 - protein, 1137 aa, Arabidopsis thaliana
  peptide (1)..(1137): Ceres Seq. ID no. 12711189
  misc_feature (1)..(35): Pfam Name: Paired amphipathic helix repeat Pfam Description: Paired amphipathic helix repeat
  misc_feature (1)..(805): Homolog of NCBI NO: 6094552 NR Description: unknown protein [Arabidopsis thaliana]
  misc_feature (700)..(1106): Homolog of NCBI NO: 6094552 NR Description: unknown protein [Arabidopsis thaliana]
  misc_feature (195)..(1134): Homolog of NCBI NO: 15218938 NR Description: hypothetical protein; protein id: At1g59890.1
  misc_feature (1)..(70): Homolog of NCBI NO: 15218938 NR Description: hypothetical protein; protein id: At1g59890.1
  misc_feature (304)..(1134): Homolog of NCBI NO: 15218525 NR Description: unknown protein; protein id: At1g10450.1
  misc_feature (1)..(72): Homolog of NCBI NO: 15218525 NR Description: unknown protein; protein id: At1g10450.1
  misc_feature (245)..(1089): Homolog of NCBI NO: 25402600 NR Description: protein T10O24.5 [imported] - Arabidopsis >gi|5091536|gb|AAD39565.1|AC007067_5 T10O24.5 [Arabidopsis
  misc_feature (1)..(72): Homolog of NCBI NO: 25402600 NR Description: protein T10O24.5 [imported] - Arabidopsis >gi|5091536|gb|AAD39565.1|AC007067_5 T10O24.5 [Arabidopsis
  misc_feature (179)..(1134): Homolog of NCBI NO: 25404243 NR Description: hypothetical protein F23H11.20 [imported] - thaliana >gi|5080821|gb|AAD39330.1|AC007258_19 Hypothetical
  misc_feature (1)..(70): Homolog of NCBI NO: 25404243 NR Description: hypothetical protein F23H11.20 [imported] - thaliana >gi|5080821|gb|AAD39330.1|AC007258_19 Hypothetical
MYRKENKSITEVYHEVAILFRDHHDLLGEFTHFLPDTSATASTNDSVKVPVRDRGIKSLPTMRQIDLDKKDRIITSHPNRALKTENMDVDHERSLLKDSKEEVRRIDKKNDFMDDRDRKDYRGLDHDSHKEHFFNSKKKLIRKDDDSAEMSDQAREGDKFSGAIPSSSTYDEKGHSQELAFVDRVKAKLDTADNQEFLRCLNLYSKEIISQPELQSLVSDLIGVYPDLMDAFKVFLAQCDKNDGLLSGIVSKKSLWSEGKCPQPTKSLDKDTDREREKIERYRERDREKERLEKVAASQKWAKPISELDLSNCEQCTPSYRRLPKNYPIPIASQKMEIGSQVLNDHWVSVTSGSEDYSFKHMRKNQYEESLFKCEDDRFELDMLLESVISATNRVEELLAKINSNELKTDTPICIEDHLTALNLRCIERLYSDHGLDVLDLLKKNAYLALPVILTRLKQKQEEWARCRTEFNKVWADIYTKNYHRSLDHRSFYFKQQDSKNLSTKALLAEIKEISEKKRGEDDALLALAAGNRRTISSNMSFDYPDPDLHEDLYQLIKYSCGEMCSTEQLDKVMKVWTEFLEPIFGVPSRPQGAEDREDAVKSTNHDREDQEDAVSPQNGASIANSMRSNGPRKVNESNQVRQASELDKDVTSSKTSDALLSCDNTQNDKMPKNLTTPDERAETKQIGDNPVIPNGTVAEWFAGEAKVEREEGELSPTGDFEEDNYAVHGENDMEALSKSKENDATADDASAPRSSDGSGNTSHNGDVSGTDSGDGEDCYREDDIDHNKVESEGEAEEGMSDGHDDTEGDMPVLSISVKNLLHVKPLAKYVPPALYDKDNDDSRKNSQVFYGNDSFYVLFRLHQILYDRILSAKINSSSPDRKWKTSNPTNPADSYARIMDALYNLLDGTSDNSKFEDDCRAIIGTQSYVLFTLDKLIYKLIKHLQAVAADEMDNKLQQLYAYEKSRKPEKFLDAVYYENALVLLPDEDIYRIECEQSTPSKLSIQLLDYGHDKPDVTSISMDPTFAAYLHNVFLSYQPNAKENPRIYLKRNKRKNGGDDELCTTDEVKIINGLECKITCSSSKVSYVLDTEDVLHRAKRRKLLNQSGLPLAHDSVCSGSLIRQRRTQRYQKLLTGQ

SEQ ID NO: 88625 - DNA, 1282 bp, Arabidopsis thaliana
  misc_feature (1)..(1282): Ceres Seq. ID no. 12711202
  misc_feature: MA Experiment ID: 108461 Result: Up-regulated in Transcription
  misc_feature: MA Experiment 108461 PARAMETER Experiment Name: At_Germinating_Seeds_cDNA_P Parameter: Age (day) Value: 1 vs. 0
  misc_feature: MA Experiment 108461 PARAMETER Experiment Name: At_Germinating_Seeds_cDNA_P Parameter: Tissue Value: Germinating Seeds
  misc_feature: MA Experiment ID: 108462 Result: Up-regulated in Transcription
  misc_feature: MA Experiment 108462 PARAMETER Experiment Name: At_Germinating_Seeds_cDNA_P Parameter: Age (day) Value: 2 vs. 0
  misc_feature: MA Experiment 108462 PARAMETER Experiment Name: At_Germinating_Seeds_cDNA_P Parameter: Tissue Value: Germinating Seeds
  misc_feature: MA Experiment ID: 108463 Result: Up-regulated in Transcription
  misc_feature: MA Experiment 108463 PARAMETER Experiment Name: At_Germinating_Seeds_cDNA_P Parameter: Age (day) Value: 3 vs. 0
  misc_feature: MA Experiment 108463 PARAMETER Experiment Name: At_Germinating_Seeds_cDNA_P Parameter: Tissue Value: Germinating Seeds
  misc_feature: MA Experiment ID: 108464 Result: Up-regulated in Transcription
  misc_feature: MA Experiment 108464 PARAMETER Experiment Name: At_Germinating_Seeds_cDNA_P Parameter: Age (day) Value: 4 vs. 0
  misc_feature: MA Experiment 108464 PARAMETER Experiment Name: At_Germinating_Seeds_cDNA_P Parameter: Tissue Value: Germinating Seeds
  misc_feature: MA Experiment ID: 108488 Result: Up-regulated in Transcription
  misc_feature: MA Experiment ID: 108585 Result: Down-regulated in Transcription
  misc_feature: MA Experiment 108585 PARAMETER Experiment Name: At_5mM_NaNP_cDNA_P Parameter: Timepoint (hr) Value: 6
  misc_feature: MA Experiment 108585 PARAMETER Experiment Name: At_5mM_NaNP_cDNA_P Parameter: Tissue Value: Aerial
  misc_feature: MA Experiment 108585 PARAMETER Experiment Name: At_5mM_NaNP_cDNA_P Parameter: Treatment Value: null
  misc_feature: MA Experiment ID: 108595 Result: Down-regulated in Transcription
  misc_feature: MA Experiment 108595 PARAMETER Experiment Name: At_Ler-pi_Ovule_cDNA_P Parameter: Plant Line Value: null
  misc_feature: MA Experiment ID: 20000089 Result: Down-regulated in Transcription
  misc_feature: MA Experiment ID: 20000090 Result: Down-regulated in Transcription
  misc_feature: MA Experiment ID: 20000111 Result: Down-regulated in Transcription
  misc_feature: MA Experiment 20000111 PARAMETER Experiment Name: At_42deg_Heat_cDNA_P Parameter: Temperature (deg C) Value: 42 vs. 22
  misc_feature: MA Experiment 20000111 PARAMETER Experiment Name: At_42deg_Heat_cDNA_P Parameter: Timepoint (hr) Value: 6
  misc_feature: MA Experiment 20000111 PARAMETER Experiment Name: At_42deg_Heat_cDNA_P Parameter: Tissue Value: Aerial
  misc_feature: MA Experiment ID: 20000113 Result: Down-regulated in Transcription
  misc_feature: MA Experiment 20000113 PARAMETER Experiment Name: At_42deg_Heat_cDNA_P Parameter: Temperature (deg C) Value: 42 vs. 22
  misc_feature: MA Experiment 20000113 PARAMETER Experiment Name: At_42deg_Heat_cDNA_P Parameter: Timepoint (hr) Value: 8
  misc_feature: MA Experiment 20000113 PARAMETER Experiment Name: At_42deg_Heat_cDNA_P Parameter: Tissue Value: Aerial
atgggattaaacgagcaacaaaatgttccaagtcagaggaagatcatagtttttatagtcttagcttttataccaatagctctgtttcgactctgttttaataatccattctcctccattaaagacacctctcttcaagactctgcagctaacgttgtgatcactagcttctcttcatcttctcaagaagaagaaagccaagagagttttgatcatatacaagatgaacctttatgcgattatacgcaagggaactgggtcagagacgagattggtccactctacaatggttcaacatgtggaacaatcaaggatggtcagaattgtttccgccatggtagacctgattccggttatctttactggaaatggaaaccaaacgaatgcgatataccgagattcgactcgaaccggtttcttgatcttatgagagataagcatctagcttttatcggtgattccatggctagaaatcagcttgagtctcttttatgcttgctctctaccgtctctagccctgatctcgtctatagaaacggagaagacaataaattcagaagatggcgtttcgagtcacacaacgtcactgtctcggtttactggtccccgtttttggtggccggtttagagaaatcgggaaacttggaccacaatgtattgcacatagaccgcgtggatgagagatggggcaatgatttagaacgttttgatacggtcgtagtctctgtgggacattggtttctgcatccagcggtttactacgagtctggttcggttttgggatgtcattcttgtgaaacaagtaactgtaccgaggtagggttttatgatgtatttagaaaagcgataagaacaacgttgagagcggttgctggaagtggtcgtgaggtgatcttgacgacattttcgccatcacattttgaaggacggccttgggacagtctcggcgcatgtaacatgaccaagccgtacgaagggaaggttttagaaggtctggacttggacatgcgcaaaatagaaattgaggaatatacggcggctgcggctgaggtgaggttagaggtgttggacgtgacggctatgtcggtactgagaccagacggacatcctggtccgtacatgtacgcggacccgttcaagaacggtgtaccggagagaattcctaatgattgtttgcattggtgtctacctggtcctgtcgacacgtggaacgagatcatgatcgagatgttgcggcgatggaaggtttaaatgatgaacattgattgttgaagatcctatg

SEQ ID NO: 88626 - protein, 416 aa, Arabidopsis thaliana; identical to SEQ ID NO: 24155
  peptide (1)..(416): Ceres Seq. ID no. 12711203
  misc_feature (247)..(411): Pfam Name: Arabidopsis proteins of unknown function Pfam Description: Arabidopsis proteins of unknown function
  misc_feature (1)..(416): Homolog of NCBI NO: 15223079 NR Description: unknown protein; protein id: At1g70230.1, by cDNA: gi_19310588 [Arabidopsis thaliana]
  misc_feature (2)..(411): Homolog of NCBI NO: 30678135 NR Description: expressed protein [Arabidopsis thaliana] unknown protein [Arabidopsis thaliana]
  misc_feature (79)..(311): Homolog of NCBI NO: 34900856 NR Description: P0458G06.13 [Oryza sativa (japonica
  misc_feature (279)..(413): Homolog of NCBI NO: 34900856 NR Description: P0458G06.13 [Oryza sativa (japonica
  misc_feature (4)..(411): Homolog of NCBI NO: 15237044 NR Description: putative protein; protein id: At4g11090.1
  misc_feature (89)..(411): Homolog of NCBI NO: 25518737 NR Description: hypothetical protein F6F3.23 [imported] - thaliana >gi|9665154|gb|AAF97338.1|AC023628_19 Unknown protein
  misc_feature (44)..(409): Homolog of NCBI NO: 28393189 NR Description: unknown protein [Arabidopsis thaliana]
  misc_feature (79)..(409): Homolog of NCBI NO: 15234058 NR Description: hypothetical protein; protein id: At4g01080.1
  misc_feature (14)..(411): Homolog of NCBI NO: 7486743 NR Description: hypothetical protein F9D16.260 - Arabidopsis >gi|4454048|emb|CAA23045.1| putative protein [Arabidopsis >gi|7269228|emb|CAB81297.1| putative protein [Arabidopsis
  misc_feature (14)..(411): Homolog of NCBI NO: 30686312 NR Description: expressed protein [Arabidopsis thaliana]

SEQ ID NO: 88627 - protein, 274 aa, Arabidopsis thaliana; identical to SEQ ID NO: 24156
  peptide (1)..(274): Ceres Seq. ID no. 12711204
  misc_feature (105)..(269): Pfam Name: Arabidopsis proteins of unknown function Pfam Description: Arabidopsis proteins of unknown function
  misc_feature (1)..(274): Homolog of NCBI NO: 15223079 NR Description: unknown protein; protein id: At1g70230.1, by cDNA: gi_19310588 [Arabidopsis thaliana]
  misc_feature (1)..(269): Homolog of NCBI NO: 30678135 NR Description: expressed protein [Arabidopsis thaliana] unknown protein [Arabidopsis thaliana]
  misc_feature (1)..(169): Homolog of NCBI NO: 34900856 NR Description: P0458G06.13 [Oryza sativa (japonica
  misc_feature (137)..(271): Homolog of NCBI NO: 34900856 NR Description: P0458G06.13 [Oryza sativa (japonica
  misc_feature (1)..(269): Homolog of NCBI NO: 15237044 NR Description: putative protein; protein id: At4g11090.1
  misc_feature (1)..(269): Homolog of NCBI NO: 25518737 NR Description: hypothetical protein F6F3.23 [imported] - thaliana >gi|9665154|gb|AAF97338.1|AC023628_19 Unknown protein
  misc_feature (1)..(267): Homolog of NCBI NO: 28393189 NR Description: unknown protein [Arabidopsis thaliana]
  misc_feature (1)..(267): Homolog of NCBI NO: 15234058 NR Description: hypothetical protein; protein id: At4g01080.1
  misc_feature (1)..(269): Homolog of NCBI NO: 7486743 NR Description: hypothetical protein F9D16.260 - Arabidopsis >gi|4454048|emb|CAA23045.1| putative protein [Arabidopsis >gi|7269228|emb|CAB81297.1| putative protein [Arabidopsis
  misc_feature (1)..(269): Homolog of NCBI NO: 30686312 NR Description: expressed protein [Arabidopsis thaliana]

SEQ ID NO: 88628 - protein, 262 aa, Arabidopsis thaliana; identical to SEQ ID NO: 24157
  peptide (1)..(262): Ceres Seq. ID no. 12711205
  misc_feature (93)..(257): Pfam Name: Arabidopsis proteins of unknown function Pfam Description: Arabidopsis proteins of unknown function
  misc_feature (1)..(262): Homolog of NCBI NO: 15223079 NR Description: unknown protein; protein id: At1g70230.1, by cDNA: gi_19310588 [Arabidopsis thaliana]
  misc_feature (1)..(257): Homolog of NCBI NO: 30678135 NR Description: expressed protein [Arabidopsis thaliana] unknown protein [Arabidopsis thaliana]
  misc_feature (1)..(157): Homolog of NCBI NO: 34900856 NR Description: P0458G06.13 [Oryza sativa (japonica
  misc_feature (125)..(259): Homolog of NCBI NO: 34900856 NR Description: P0458G06.13 [Oryza sativa (japonica
  misc_feature (1)..(257): Homolog of NCBI NO: 15237044 NR Description: putative protein; protein id: At4g11090.1
  misc_feature (1)..(257): Homolog of NCBI NO: 25518737 NR Description: hypothetical protein F6F3.23 [imported] - thaliana >gi|9665154|gb|AAF97338.1|AC023628_19 Unknown protein
  misc_feature (1)..(255): Homolog of NCBI NO: 28393189 NR Description: unknown protein [Arabidopsis thaliana]
  misc_feature (1)..(255): Homolog of NCBI NO: 15234058 NR Description: hypothetical protein; protein id: At4g01080.1
  misc_feature (1)..(257): Homolog of NCBI NO: 7486743 NR Description: hypothetical protein F9D16.260 - Arabidopsis >gi|4454048|emb|CAA23045.1| putative protein [Arabidopsis >gi|7269228|emb|CAB81297.1| putative protein [Arabidopsis
  misc_feature (1)..(257): Homolog of NCBI NO: 30686312 NR Description: expressed protein [Arabidopsis thaliana]

SEQ ID NO: 88629 - DNA, 1083 bp, Arabidopsis thaliana
  misc_feature (1)..(1083): Ceres Seq. ID no. 12711206
  misc_feature: MA Experiment ID: 20001554 Result: Up-regulated in Transcription
  misc_feature: MA Experiment 20001554 PARAMETER Experiment Name: At_Drought_Soil_Dry_P Parameter: Age (day) Value: 21
  misc_feature: MA Experiment 20001554 PARAMETER Experiment Name: At_Drought_Soil_Dry_P Parameter: Organism Value: A. thaliana
  misc_feature: MA Experiment 20001554 PARAMETER Experiment Name: At_Drought_Soil_Dry_P Parameter: Plant Line Value: WS
  misc_feature: MA Experiment 20001554 PARAMETER Experiment Name: At_Drought_Soil_Dry_P Parameter: Post Timepoint (hr) Value: None
  misc_feature: MA Experiment 20001554 PARAMETER Experiment Name: At_Drought_Soil_Dry_P Parameter: Post-Treatment Value: None
  misc_feature: MA Experiment 20001554 PARAMETER Experiment Name: At_Drought_Soil_Dry_P Parameter: Timepoint (day) Value: 7
  misc_feature: MA Experiment 20001554 PARAMETER Experiment Name: At_Drought_Soil_Dry_P Parameter: Treatment Value: Drought vs. No Drought
  misc_feature: MA Experiment ID: 20001556 Result: Down-regulated in Transcription
  misc_feature: MA Experiment 20001556 PARAMETER Experiment Name: At_Drought_Soil_Dry_P Parameter: Age (day) Value: 26
  misc_feature: MA Experiment 20001556 PARAMETER Experiment Name: At_Drought_Soil_Dry_P Parameter: Organism Value: A. thaliana
  misc_feature: MA Experiment 20001556 PARAMETER Experiment Name: At_Drought_Soil_Dry_P Parameter: Plant Line Value: WS
  misc_feature: MA Experiment 20001556 PARAMETER Experiment Name: At_Drought_Soil_Dry_P Parameter: Post Timepoint (hr) Value: None
  misc_feature: MA Experiment 20001556 PARAMETER Experiment Name: At_Drought_Soil_Dry_P Parameter: Post-Treatment Value: None
  misc_feature: MA Experiment 20001556 PARAMETER Experiment Name: At_Drought_Soil_Dry_P Parameter: Timepoint (day) Value: 12
  misc_feature: MA Experiment 20001556 PARAMETER Experiment Name: At_Drought_Soil_Dry_P Parameter: Treatment Value: Drought vs. No Drought
  misc_feature: MA Experiment ID: 20001558 Result: Down-regulated in Transcription
  misc_feature: MA Experiment 20001558 PARAMETER Experiment Name: At_Drought_Soil_Dry_P Parameter: Age (day) Value: 27
  misc_feature: MA Experiment 20001558 PARAMETER Experiment Name: At_Drought_Soil_Dry_P Parameter: Organism Value: A. thaliana
  misc_feature: MA Experiment 20001558 PARAMETER Experiment Name: At_Drought_Soil_Dry_P Parameter: Plant Line Value: WS
  misc_feature: MA Experiment 20001558 PARAMETER Experiment Name: At_Drought_Soil_Dry_P Parameter: Post Timepoint (hr) Value: 6
  misc_feature: MA Experiment 20001558 PARAMETER Experiment Name: At_Drought_Soil_Dry_P Parameter: Post-Treatment Value: Re-Water vs. No Drought
  misc_feature: MA Experiment 20001558 PARAMETER Experiment Name: At_Drought_Soil_Dry_P Parameter: Timepoint (day) Value: 13
  misc_feature: MA Experiment 20001558 PARAMETER Experiment Name: At_Drought_Soil_Dry_P Parameter: Treatment Value: Drought vs. No Drought
  misc_feature: MA Experiment ID: 20001560 Result: Down-regulated in Transcription
  misc_feature: MA Experiment 20001560 PARAMETER Experiment Name: At_Drought_Soil_Dry_P Parameter: Age (day) Value: 28
  misc_feature: MA Experiment 20001560 PARAMETER Experiment Name: At_Drought_Soil_Dry_P Parameter: Organism Value: A. thaliana
  misc_feature: MA Experiment 20001560 PARAMETER Experiment Name: At_Drought_Soil_Dry_P Parameter: Plant Line Value: WS
  misc_feature: MA Experiment 20001560 PARAMETER Experiment Name: At_Drought_Soil_Dry_P Parameter: Post Timepoint (hr) Value: None
  misc_feature: MA Experiment 20001560 PARAMETER Experiment Name: At_Drought_Soil_Dry_P Parameter: Post-Treatment Value: None
  misc_feature: MA Experiment 20001560 PARAMETER Experiment Name: At_Drought_Soil_Dry_P Parameter: Timepoint (day) Value: 14
  misc_feature: MA Experiment 20001560 PARAMETER Experiment Name: At_Drought_Soil_Dry_P Parameter: Treatment Value: Drought vs. No Drought
  misc_feature: MA Experiment ID: 20001757 Result: Up-regulated in Transcription
  misc_feature: MA Experiment 20001757 PARAMETER Experiment Name: At_50mM_NH4NO3_L-to-H_P Parameter: Timepoint (hr) Value: 6
  misc_feature: MA Experiment 20001757 PARAMETER Experiment Name: At_50mM_NH4NO3_L-to-H_P Parameter: Tissue Value: Leaf
  misc_feature: MA Experiment 20001757 PARAMETER Experiment Name: At_50mM_NH4NO3_L-to-H_P Parameter: Treatment Value: 50mM NH4NO3 vs 100mM Mannitol
  misc_feature: MA Experiment ID: 20001904 Result: Down-regulated in Transcription
  misc_feature: MA Experiment 20001904 PARAMETER Experiment Name: At_Drought_Reproduction_P Parameter: Age (day) Value: 37
  misc_feature: MA Experiment 20001904 PARAMETER Experiment Name: At_Drought_Reproduction_P Parameter: Organism Value: A. thaliana
  misc_feature: MA Experiment 20001904 PARAMETER Experiment Name: At_Drought_Reproduction_P Parameter: Plant Line Value: WS
  misc_feature: MA Experiment 20001904 PARAMETER Experiment Name: At_Drought_Reproduction_P Parameter: Timepoint (day) Value: 7
  misc_feature: MA Experiment 20001904 PARAMETER Experiment Name: At_Drought_Reproduction_P Parameter: Tissue Value: Rosettes
  misc_feature: MA Experiment 20001904 PARAMETER Experiment Name: At_Drought_Reproduction_P Parameter: Treatment Value: Drought vs. No Drought
atggctataatggaagcatgcacgattgctcttacgataatggcgaaaacggcgttgacgggagggatgagtccttttgtgttcgttgtttacacaaacgcttttggatctattcttcttcttccattttctttcttatttcacaggaatgagagaacagaacaatctatcttctcttggccactcctcgttcgcgttttctttctaggtttcaccgggatatttatgttccaaaacttggcatttgtgggactacgcttcagctcaccaatagtagtatgtgcaatgggattgcaaatcccgtccttctccttcctgctctctattattctcggaaggagcaaattggattggagaaacacgagtacgagggctaaactgatgggaacaatagtctcgttaagcggagcttttgttgaagagttgtacaaaggtccattcataagaccagcttcgtctgcttccccaaatcgttttcttaaatcagtccctaaacttttggtctactacaacctccccgacaattggtttctcggctgtatctttttggccgtcgctgttttttctgtctccctgttcaatgttgttcagacagggacggtaaaaaagtatccacatgtgatgaaagtggcttcgttttacagcatagtcgggacgatccaatgtctactattctcgttatttatggaaagagaccttagtgcatggaagatccaacctaacttcgatctttatctcattatcgccacgggaacattcggaagtgtaatacgaacaagtgtacacgtaaagtgcacccaaatgaaaggaccttattacgtgccattgttcaaaccctttggtatcttttgggcaacactctttggtaccagcttcttcgtcaacagtcttcactacggcagtgtgttaggagcagccatagctggtgtgggatatttcacagtgtcttggggacaattgaaggaaagcgaagaaaaacaaagttcaaatgaagaaagaaaatccatcaaaactattcatcatcgcgatgaagatgaatacaaagttccattacttattaaccaggaagaaagtcctgtatga

SEQ ID NO: 88630 - protein, 360 aa, Arabidopsis thaliana
  peptide (1)..(360): Ceres Seq. ID no. 12711207
  misc_feature (6)..(140): Pfam Name: Integral membrane protein DUF6 Pfam Description: Integral membrane protein DUF6
  misc_feature (1)..(250): Homolog of NCBI NO: 15223106 NR Description: hypothetical protein; protein id: At1g70260.1
  misc_feature (1)..(353): Homolog of NCBI NO: 15218979 NR Description: hypothetical protein; protein id: At1g60050.1
  misc_feature (96)..(250): Homolog of NCBI NO: 25406046 NR Description: hypothetical protein F20P5.2 [imported] - thaliana >gi|2194115|gb|AAB61090.1| F20P5.2 gene product
  misc_feature (1)..(352): Homolog of NCBI NO: 18405635 NR Description: expressed protein; protein id: At3g28050.1, by cDNA: 6530., supported by cDNA: gi_13937164 [Arabidopsis >gi|13937165|gb|AAK50076.1|AF372936_1 AT3g28050/MMG15_6
  misc_feature (1)..(332): Homolog of NCBI NO: 21594034 NR Description: nodulin MtN21-like protein [Arabidopsis thaliana]
  misc_feature (1)..(340): Homolog of NCBI NO: 10177511 NR Description: nodulin-like protein [Arabidopsis thaliana]
  misc_feature (1)..(251): Homolog of NCBI NO: 15242614 NR Description: putative protein; protein id: At5g40240.1
  misc_feature (256)..(340): Homolog of NCBI NO: 15242614 NR Description: putative protein; protein id: At5g40240.1
  misc_feature (1)..(345): Homolog of NCBI NO: 10177510 NR Description: nodulin-like protein [Arabidopsis thaliana]
  misc_feature (1)..(345): Homolog of NCBI NO: 15242612 NR Description: putative protein; protein id: At5g40230.1
MAIMEACTIALTIMAKTALTGGMSPFVFVVYTNAFGSILLLPFSFLFHRNERTEQSIFSWPLLVRVFFLGFTGIFMFQNLAFVGLRFSSPIVVCAMGLQIPSFSFLLSIILGRSKLDWRNTSTRAKLMGTIVSLSGAFVEELYKGPFIRPASSASPNRFLKSVPKLLVYYNLPDNWFLGCIFLAVAVFSVSLFNVVQTGTVKKYPHVMKVASFYSIVGTIQCLLFSLFMERDLSAWKIQPNFDLYLIIATGTFGSVIRTSVHVKCTQMKGPYYVPLFKPFGIFWATLFGTSFFVNSLHYGSVLGAAIAGVGYFTVSWGQLKESEEKQSSNEERKSIKTIHHRDEDEYKVPLLINQEESPV

SEQ ID NO: 88631 - protein, 357 aa, Arabidopsis thaliana
  peptide (1)..(357): Ceres Seq. ID no. 12711208
  misc_feature (3)..(137): Pfam Name: Integral membrane protein DUF6 Pfam Description: Integral membrane protein DUF6
  misc_feature (1)..(247): Homolog of NCBI NO: 15223106 NR Description: hypothetical protein; protein id: At1g70260.1
  misc_feature (1)..(350): Homolog of NCBI NO: 15218979 NR Description: hypothetical protein; protein id: At1g60050.1
  misc_feature (93)..(247): Homolog of NCBI NO: 25406046 NR Description: hypothetical protein F20P5.2 [imported] - thaliana >gi|2194115|gb|AAB61090.1| F20P5.2 gene product
  misc_feature (1)..(349): Homolog of NCBI NO: 18405635 NR Description: expressed protein; protein id: At3g28050.1, by cDNA: 6530., supported by cDNA: gi_13937164 [Arabidopsis >gi|13937165|gb|AAK50076.1|AF372936_1 AT3g28050/MMG15_6
  misc_feature (1)..(329): Homolog of NCBI NO: 21594034 NR Description: nodulin MtN21-like protein [Arabidopsis thaliana]
  misc_feature (1)..(337): Homolog of NCBI NO: 10177511 NR Description: nodulin-like protein [Arabidopsis thaliana]
  misc_feature (1)..(248): Homolog of NCBI NO: 15242614 NR Description: putative protein; protein id: At5g40240.1
  misc_feature (253)..(337): Homolog of NCBI NO: 15242614 NR Description: putative protein; protein id: At5g40240.1
  misc_feature (1)..(342): Homolog of NCBI NO: 10177510 NR Description: nodulin-like protein [Arabidopsis thaliana]
  misc_feature (1)..(342): Homolog of NCBI NO: 15242612 NR Description: putative protein; protein id: At5g40230.1
MEACTIALTIMAKTALTGGMSPFVFVVYTNAFGSILLLPFSFLFHRNERTEQSIFSWPLLVRVFFLGFTGIFMFQNLAFVGLRFSSPIVVCAMGLQIPSFSFLLSIILGRSKLDWRNTSTRAKLMGTIVSLSGAFVEELYKGPFIRPASSASPNRFLKSVPKLLVYYNLPDNWFLGCIFLAVAVFSVSLFNVVQTGTVKKYPHVMKVASFYSIVGTIQCLLFSLFMERDLSAWKIQPNFDLYLIIATGTFGSVIRTSVHVKCTQMKGPYYVPLFKPFGIFWATLFGTSFFVNSLHYGSVLGAAIAGVGYFTVSWGQLKESEEKQSSNEERKSIKTIHHRDEDEYKVPLLINQEESPV

SEQ ID NO: 88632 - protein, 347 aa, Arabidopsis thaliana
  peptide (1)..(347): Ceres Seq. ID no. 12711209
  misc_feature (1)..(127): Pfam Name: Integral membrane protein DUF6 Pfam Description: Integral membrane protein DUF6
  misc_feature (1)..(237): Homolog of NCBI NO: 15223106 NR Description: hypothetical protein; protein id: At1g70260.1
  misc_feature (1)..(340): Homolog of NCBI NO: 15218979 NR Description: hypothetical protein; protein id: At1g60050.1
  misc_feature (83)..(237): Homolog of NCBI NO: 25406046 NR Description: hypothetical protein F20P5.2 [imported] - thaliana >gi|2194115|gb|AAB61090.1| F20P5.2 gene product
  misc_feature (1)..(339): Homolog of NCBI NO: 18405635 NR Description: expressed protein; protein id: At3g28050.1, by cDNA: 6530., supported by cDNA: gi_13937164 [Arabidopsis >gi|13937165|gb|AAK50076.1|AF372936_1 AT3g28050/MMG15_6
  misc_feature (1)..(319): Homolog of NCBI NO: 21594034 NR Description: nodulin MtN21-like protein [Arabidopsis thaliana]
  misc_feature (1)..(327): Homolog of NCBI NO: 10177511 NR Description: nodulin-like protein [Arabidopsis thaliana]
  misc_feature (1)..(238): Homolog of NCBI NO: 15242614 NR Description: putative protein; protein id: At5g40240.1
  misc_feature (243)..(327): Homolog of NCBI NO: 15242614 NR Description: putative protein; protein id: At5g40240.1
  misc_feature (1)..(332): Homolog of NCBI NO: 10177510 NR Description: nodulin-like protein [Arabidopsis thaliana]
  misc_feature (1)..(332): Homolog of NCBI NO: 15242612 NR Description: putative protein; protein id: At5g40230.1
MAKTALTGGMSPFVFVVYTNAFGSILLLPFSFLFHRNERTEQSIFSWPLLVRVFFLGFTGIFMFQNLAFVGLRFSSPIVVCAMGLQIPSFSFLLSIILGRSKLDWRNTSTRAKLMGTIVSLSGAFVEELYKGPFIRPASSASPNRFLKSVPKLLVYYNLPDNWFLGCIFLAVAVFSVSLFNVVQTGTVKKYPHVMKVASFYSIVGTIQCLLFSLFMERDLSAWKIQPNFDLYLIIATGTFGSVIRTSVHVKCTQMKGPYYVPLFKPFGIFWATLFGTSFFVNSLHYGSVLGAAIAGVGYFTVSWGQLKESEEKQSSNEERKSIKTIHHRDEDEYKVPLLINQEESPV

SEQ ID NO: 88633 - DNA, 1815 bp, Arabidopsis thaliana
  misc_feature (1)..(1815): Ceres Seq. ID no. 12711231
  misc_feature: MA Experiment ID: 20000436 Result: Down-regulated in Transcription
  misc_feature: MA Experiment 20000436 PARAMETER Experiment Name: At_Drought_P Parameter: Age (day) Value: 7
  misc_feature: MA Experiment 20000436 PARAMETER Experiment Name: At_Drought_P Parameter: Organism Value: A. thaliana
  misc_feature: MA Experiment 20000436 PARAMETER Experiment Name: At_Drought_P Parameter: Plant Line Value: WS
  misc_feature: MA Experiment 20000436 PARAMETER Experiment Name: At_Drought_P Parameter: Timepoint (hr) Value: 12
  misc_feature: MA Experiment 20000436 PARAMETER Experiment Name: At_Drought_P Parameter: Tissue Value: Whole Plant
  misc_feature: MA Experiment 20000436 PARAMETER Experiment Name: At_Drought_P Parameter: Treatment Value: Drought vs. No Drought
  misc_feature: MA Experiment ID: 20000453 Result: Down-regulated in Transcription
  misc_feature: MA Experiment 20000453 PARAMETER Experiment Name: At_100uM_ABA_P Parameter: Age (day) Value: 15
  misc_feature: MA Experiment 20000453 PARAMETER Experiment Name: At_100uM_ABA_P Parameter: Organism Value: A. thaliana
  misc_feature: MA Experiment 20000453 PARAMETER Experiment Name: At_100uM_ABA_P Parameter: Plant Line Value: WS
  misc_feature: MA Experiment 20000453 PARAMETER Experiment Name: At_100uM_ABA_P Parameter: Timepoint (hr) Value: 24
  misc_feature: MA Experiment 20000453 PARAMETER Experiment Name: At_100uM_ABA_P Parameter: Tissue Value: Aerial
  misc_feature: MA Experiment 20000453 PARAMETER Experiment Name: At_100uM_ABA_P Parameter: Treatment Value: 100uM ABA vs. No Treatment
  misc_feature: MA Experiment ID: 20000794 Result: Up-regulated in Transcription
  misc_feature: MA Experiment 20000794 PARAMETER Experiment Name: At_Petals_P Parameter: Age (day) Value: 23-25 days
  misc_feature: MA Experiment 20000794 PARAMETER Experiment Name: At_Petals_P Parameter: Plant Line Value: WS
  misc_feature: MA Experiment 20000794 PARAMETER Experiment Name: At_Petals_P Parameter: Tissue Value: Petals vs. Whole plant
  misc_feature: MA Experiment ID: 20001451 Result: Down-regulated in Transcription
  misc_feature: MA Experiment 20001451 PARAMETER Experiment Name: At_Far-red-induction_P Parameter: Age (day) Value: 7
  misc_feature: MA Experiment 20001451 PARAMETER Experiment Name: At_Far-red-induction_P Parameter: Light Value: Far-red vs. White
  misc_feature: MA Experiment 20001451 PARAMETER Experiment Name: At_Far-red-induction_P Parameter: Organism Value: A. thaliana
  misc_feature: MA Experiment 20001451 PARAMETER Experiment Name: At_Far-red-induction_P Parameter: Plant Line Value: Columbia
  misc_feature: MA Experiment 20001451 PARAMETER Experiment Name: At_Far-red-induction_P Parameter: Timepoint (hr) Value: 24
  misc_feature: MA Experiment 20001451 PARAMETER Experiment Name: At_Far-red-induction_P Parameter: Tissue Value: Whole Plant
atggctggttcatcaacgaaacgatttcctctatatgctaaagattatgagctctttgaagaggtaggagaaggtgttagtgctactgtgtatagagctcgttgcattgctcttaacgagattgtcgctgttaaaatcttggatctcgaaaaatgcaggaatgatttggaaacaatacgcaaggaagttcatataatgagtttgattgatcatccgaatttattgaaagcgcattgttcgtttatcgacagtagtagtttgtggattgtaatgccttatatgtcgggtggttcttgttttcatttaatgaaatctgtatatccggaaggtcttgagcaacctataattgctactttgttgagggaagtgcttaaagctcttgtttatcttcatagacaaggtcacatccatagagatgttaaggctgggaatatattgattcactcaaaaggcgtagttaaacttggagactttggagtttcagcatgtatgtttgatagtggagaaagaatgcaaacaaggaatacattcgttgggactccttgttggatggcacctgaggttatgcagcaactagatggatatgatttcaagtatcttgctcatggtcatgccccattttccaaatatccacctatgaaggtgctactaatgacattacaaaatgcacctcctcgtctagactatgacagagataagaaattctcaaagtcatttagagagttaatcgcagcgtgcttagttaaagatccgaaaaagcgtccaactgcagcaaaacttctgaaacatcctttcttcaaacatgctcggtctacagattatttgtcccgtaaaattcttcatggtctttctccacttggtgaacgttttaaaaagctcaaggaggcagaggctgagttgttcaaaggcataaatggtgacaaagaacagttgtctcagcatgagtatatgagaggaattagtgcttggaactttgatcttgaagcattgagaaggcaggcatcacttgtaattattccaaatgaagaaatctataattcagagatacaggaactgaacagaaatggagatgtaccaaaaggaaaaccagtgatacaaaggtcacagactatgcctttggaatatttctcagaaaaggcaagtgatatggtgagtgagagtagcagtcaattaaccggttcattacttccttcgtttcatcgcaaattcctcccggctcttggcaatgcatgtaactcgagcgatagagcagcagagaagctcgcttttgaagagccacgtcaagtactacacccattagcggatacaaagaaaattagaaaagcaggaagtgatcagcaggagaaaccaaaaaatggttacgcagatagtcctgtgaaccgtgaatcttccacattatcaaaggaaccattagcggatacaaagcaagttagaaaaccaggaaatgagcaggagaaaccaaaaaacggctatatagttagtcatgtgaaccgtgaatcttccacatcagaggaaatcctcccactgttgcagagtctcctggttcagaatgacattcaaagggcgcaagtaatcaggttaattagattttttgatcgaactgcgaaaacggaaaatccaatctcaaaaaccgaaggagtgcagcataaagacccacagatatatccatcaaaggagaaagatctgcaatctcaagttcagtttttggagcaaagtgttgagaagcttgtagaggaagttcagagaagaaaagatataaatagtcagctagagcaacagatcagctctctgattagcagcaacaacatctcttaa

SEQ ID NO: 88634 - protein, 604 aa, Arabidopsis thaliana
  peptide (1)..(604): Ceres Seq. ID no. 12711232
  misc_feature (16)..(266): Pfam Name: Protein kinase domain Pfam Description: Protein kinase domain
  misc_feature (1)..(604): Homolog of NCBI NO: 15223145 NR Description: Ste-20 related kinase SPAK, putative; protein id:
  misc_feature (1)..(525): Homolog of NCBI NO: 7485682 NR Description: hypothetical protein F17O7.3 - Arabidopsis
  misc_feature (1)..(354): Homolog of NCBI NO: 17529280 NR Description: putative protein kinase [Arabidopsis thaliana]
  misc_feature (500)..(602): Homolog of NCBI NO: 17529280 NR Description: putative protein kinase [Arabidopsis thaliana]
  misc_feature (1)..(354): Homolog of NCBI NO: 30685021 NR Description: protein kinase family [Arabidopsis thaliana]
  misc_feature (500)..(602): Homolog of NCBI NO: 30685021 NR Description: protein kinase family [Arabidopsis thaliana]
  misc_feature (1)..(313): Homolog of NCBI NO: 11358725 NR Description: protein kinase-like protein - Arabidopsis thaliana
  misc_feature (1)..(313): Homolog of NCBI NO: 15220847 NR Description: putative Ser/Thr protein kinase; protein id:
  misc_feature (496)..(535): Homolog of NCBI NO: 15220847 NR Description: putative Ser/Thr protein kinase; protein id:
  misc_feature (494)..(542): Homolog of NCBI NO: 15220847 NR Description: putative Ser/Thr protein kinase; protein id:
MAGSSTKRFPLYAKDYELFEEVGEGVSATVYRARCIALNEIVAVKILDLEKCRNDLETIRKEVHIMSLIDHPNLLKAHCSFIDSSSLWIVMPYMSGGSCFHLMKSVYPEGLEQPIIATLLREVLKALVYLHRQGHIHRDVKAGNILIHSKGVVKLGDFGVSACMFDSGERMQTRNTFVGTPCWMAPEVMQQLDGYDFKYLAHGHAPFSKYPPMKVLLMTLQNAPPRLDYDRDKKFSKSFRELIAACLVKDPKKRPTAAKLLKHPFFKHARSTDYLSRKILHGLSPLGERFKKLKEAEAELFKGINGDKEQLSQHEYMRGISAWNFDLEALRRQASLVIIPNEEIYNSEIQELNRNGDVPKGKPVIQRSQTMPLEYFSEKASDMVSESSSQLTGSLLPSFHRKFLPALGNACNSSDRAAEKLAFEEPRQVLHPLADTKKIRKAGSDQQEKPKNGYADSPVNRESSTLSKEPLADTKQVRKPGNEQEKPKNGYIVSHVNRESSTSEEILPLLQSLLVQNDIQRAQVIRLIRFFDRTAKTENPISKTEGVQHKDPQIYPSKEKDLQSQVQFLEQSVEKLVEEVQRRKDINSQLEQQISSLISSNNIS

SEQ ID NO: 88635 - protein, 539 aa, Arabidopsis thaliana
  peptide (1)..(539): Ceres Seq. ID no. 12711233
  misc_feature (1)..(201): Pfam Name: Protein kinase domain Pfam Description: Protein kinase domain
  misc_feature (1)..(539): Homolog of NCBI NO: 15223145 NR Description: Ste-20 related kinase SPAK, putative; protein id:
  misc_feature (1)..(460): Homolog of NCBI NO: 7485682 NR Description: hypothetical protein F17O7.3 - Arabidopsis
  misc_feature (1)..(289): Homolog of NCBI NO: 17529280 NR Description: putative protein kinase [Arabidopsis thaliana]
  misc_feature (435)..(537): Homolog of NCBI NO: 17529280 NR Description: putative protein kinase [Arabidopsis thaliana]
  misc_feature (1)..(289): Homolog of NCBI NO: 30685021 NR Description: protein kinase family [Arabidopsis thaliana]
  misc_feature (435)..(537): Homolog of NCBI NO: 30685021 NR Description: protein kinase family [Arabidopsis thaliana]
  misc_feature (1)..(248): Homolog of NCBI NO: 11358725 NR Description: protein kinase-like protein - Arabidopsis thaliana
  misc_feature (1)..(248): Homolog of NCBI NO: 15220847 NR Description: putative Ser/Thr protein kinase; protein id:
  misc_feature (431)..(470): Homolog of NCBI NO: 15220847 NR Description: putative Ser/Thr protein kinase; protein id:
  misc_feature (429)..(477): Homolog of NCBI NO: 15220847 NR Description: putative Ser/Thr protein kinase; protein id:
MSLIDHPNLLKAHCSFIDSSSLWIVMPYMSGGSCFHLMKSVYPEGLEQPIIATLLREVLKALVYLHRQGHIHRDVKAGNILIHSKGVVKLGDFGVSACMFDSGERMQTRNTFVGTPCWMAPEVMQQLDGYDFKYLAHGHAPFSKYPPMKVLLMTLQNAPPRLDYDRDKKFSKSFRELIAACLVKDPKKRPTAAKLLKHPFFKHARSTDYLSRKILHGLSPLGERFKKLKEAEAELFKGINGDKEQLSQHEYMRGISAWNFDLEALRRQASLVIIPNEEIYNSEIQELNRNGDVPKGKPVIQRSQTMPLEYFSEKASDMVSESSSQLTGSLLPSFHRKFLPALGNACNSSDRAAEKLAFEEPRQVLHPLADTKKIRKAGSDQQEKPKNGYADSPVNRESSTLSKEPLADTKQVRKPGNEQEKPKNGYIVSHVNRESSTSEEILPLLQSLLVQNDIQRAQVIRLIRFFDRTAKTENPISKTEGVQHKDPQIYPSKEKDLQSQVQFLEQSVEKLVEEVQRRKDINSQLEQQISSLISSNNIS

SEQ ID NO: 88636 - protein, 514 aa, Arabidopsis thaliana
  peptide (1)..(514): Ceres Seq. ID no. 12711234
  misc_feature (1)..(176): Pfam Name: Protein kinase domain Pfam Description: Protein kinase domain
  misc_feature (1)..(514): Homolog of NCBI NO: 15223145 NR Description: Ste-20 related kinase SPAK, putative; protein id:
  misc_feature (1)..(435): Homolog of NCBI NO: 7485682 NR Description: hypothetical protein F17O7.3 - Arabidopsis
  misc_feature (1)..(264): Homolog of NCBI NO: 17529280 NR Description: putative protein kinase [Arabidopsis thaliana]
  misc_feature (410)..(512): Homolog of NCBI NO: 17529280 NR Description: putative protein kinase [Arabidopsis thaliana]
  misc_feature (1)..(264): Homolog of NCBI NO: 30685021 NR Description: protein kinase family [Arabidopsis thaliana]
  misc_feature (410)..(512): Homolog of NCBI NO: 30685021 NR Description: protein kinase family [Arabidopsis thaliana]
  misc_feature (1)..(223): Homolog of NCBI NO: 11358725 NR Description: protein kinase-like protein - Arabidopsis thaliana
  misc_feature (1)..(223): Homolog of NCBI NO: 15220847 NR Description: putative Ser/Thr protein kinase; protein id:
  misc_feature (406)..(445): Homolog of NCBI NO: 15220847 NR Description: putative Ser/Thr protein kinase; protein id:
  misc_feature (404)..(452): Homolog of NCBI NO: 15220847 NR Description: putative Ser/Thr protein kinase; protein id:
MPYMSGGSCFHLMKSVYPEGLEQPIIATLLREVLKALVYLHRQGHIHRDVKAGNILIHSKGVVKLGDFGVSACMFDSGERMQTRNTFVGTPCWMAPEVMQQLDGYDFKYLAHGHAPFSKYPPMKVLLMTLQNAPPRLDYDRDKKFSKSFRELIAACLVKDPKKRPTAAKLLKHPFFKHARSTDYLSRKILHGLSPLGERFKKLKEAEAELFKGINGDKEQLSQHEYMRGISAWNFDLEALRRQASLVIIPNEEIYNSEIQELNRNGDVPKGKPVIQRSQTMPLEYFSEKASDMVSESSSQLTGSLLPSFHRKFLPALGNACNSSDRAAEKLAFEEPRQVLHPLADTKKIRKAGSDQQEKPKNGYADSPVNRESSTLSKEPLADTKQVRKPGNEQEKPKNGYIVSHVNRESSTSEEILPLLQSLLVQNDIQRAQVIRLIRFFDRTAKTENPISKTEGVQHKDPQIYPSKEKDLQSQVQFLEQSVEKLVEEVQRRKDINSQLEQQISSLISSNNIS

SEQ ID NO: 88637 - DNA, 2931 bp, Arabidopsis thaliana
  misc_feature (1)..(2931): Ceres Seq. ID no. 12711235
  misc_feature: MA Experiment ID: 20000180 Result: Up-regulated in Transcription
  misc_feature: MA Experiment 20000180 PARAMETER Experiment Name: At_Germinating_Seeds_P Parameter: Age (hr) Value: 24 vs. 0
  misc_feature: MA Experiment 20000180 PARAMETER Experiment Name: At_Germinating_Seeds_P Parameter: Tissue Value: Germinating Seeds
  misc_feature: MA Experiment ID: 20000227 Result: Up-regulated in Transcription
  misc_feature: MA Experiment 20000227 PARAMETER Experiment Name: At_Root-Tips-vs-Tops_P Parameter: Tissue Value: Root Tips vs. Root Tops
  misc_feature: MA Experiment ID: 20000439 Result: Up-regulated in Transcription
  misc_feature: MA Experiment 20000439 PARAMETER Experiment Name: At_Roots__P Parameter: Age (day) Value: 14 vs. 21
  misc_feature: MA Experiment 20000439 PARAMETER Experiment Name: At_Roots__P Parameter: Organism Value: A. thaliana
  misc_feature: MA Experiment 20000439 PARAMETER Experiment Name: At_Roots__P Parameter: Tissue Value: Roots vs. Whole Plant
atgtggagattaaagaatcagaagaagaaagaaacggcagattcgccgagttcttctccaacagcaccgtcagtcgattcagcggtgatgggaagtggtcagactcattttacctatgaagagctagaggacataacagaagggttttctaagcaaaacatacttggagaaggaggttttggttgtgtctacaaaggtaaactaaaagatggaaaacttgttgctgttaagcagcttaaggttggtagcggacaaggagaccgtgagtttaaggcggaggttgagattattagccgtgttcatcatcgccatttggtatcgcttgttggatactgcattgcggattcagagagattgcttatctatgagtatgttcctaaccaaacattggagcatcatttgcatgggaagggtaggccagtgcttgaatgggctaggagagtcagaatcgctatagttctgccaaaggtttggcgtatttgcacgaagacttttcaaatagaagctgaatcaaagcgactttatttatcttgttttgcaggtcacccaaaaatcattcacagggacataaagtccgctaacatcttgctggacgatgagtttgaagttcaggttgctgactttggacttgccaaagtcaatgatacaacacaaactcatgtctcaactcgcgttatgggaaccttcgggtacttggcaccagaatatgcacaaagtggacaacttactgatagatcagatgttttctcgtttggagttgttctcttagagcttataactggacgcaaacctgttgaccggaaccagcctttgggagaagagagtttggttggatgggtccaaaacgtccacgcatggttcagaaacaaattcaaacaaggcaaaaaaatgtcggactcgccaacttcttctccaccagcaccatccgctgattccgctccgccgccggatacctcatccgacggatctgctgctcctccacctacggattcagcaccacctcctagtccaccggctgattcatctccgcctccagctcttccatctcttccgccagctgtcttttctcctccgccaactgtctcatcccctcctcctccgccgcttgattcatctcctcctccgccgcctgatttaaccccgccgccaagttctccccctcccccagatgctccgccgccgattcccatcgtgttccctccaccgatagactcaccgccgcccgagtccaccaactcccctccacctccagaggtgtttgaaccaccaccgcctccggccgatgaagacgaaagccctcctgctcctccacctccggaacaattacctcctccagcgtcttcaccgcaaggaggacccaaaaaaccaaaaaaacaccatccaggaccagccacatctcctcctgctccttcagcaccagccacatctcctcctgctcctccaaacgcgccgccacgtaacagttcccacgcactaccacctaagtctaccgctgcaggtggacctctcacctcgccatctcgcggagtccccagcagcggaaactctgtcccgccacctgcaaatagcggtggcggctatcaagggaagactatggccggttttgcaatagccggtttcgcagtcatcgccttgatggccgttgtgttcttagtcagaagaaagaagaagagaaacattgatgcctacagtgactcacaatacttgcctccttcaaacttctccatcaaatcagatggattcttatacggtcaaaatcctacaaagggatactctggtcctggtggttacaattcacaacaacaatcaaattccggaaacagcttcggcagccaacgaggaggaggaggttatacacggtcagggagcgcacctgattcagcagtgatgggaagtggtcaaacacatttcacatatgaagagctaacggacataacagaaggattttctaagcataacatacttggagaaggaggttttggttgtgtgtataaaggtaaattaaatgatggaaaacttgttgctgttaagcagcttaaggttggtagcggacaaggtgaccgtgagtttaaggcggaggttgagattattagccgtgttcatcatcgccatttggtttctcttgttggatactgcattgcggattcagagagattgcttatctatgaatatgttcctaaccaaacattggaacatcatttgcatgggaagggaaggccagtacttgaatgggctaggagagtcagaattgctataggttctgccaaaggtttggcgtatttacacgaagactgtcacccaaaaatcattcacagggacataaagtccgctaacatcttgctggacgatgagtacttggcaccagaatatgcacaaagtggaaagctgactgatagatcagatgttttctcgtttggggttgttctcttagagcttataacaggacgcaaacctgttgaccaataccagcctttgggagaagagagtttggttgaatgggctcgtcctctgcttcacaaagccattgagaccggtgatttcagtgaactagttgatagacggctcgaaaagcattatgtggagaatgaagttttcagaatgattgaaacagctgctgcttgtgttaggcattcaggtccaaaacgtccacgtatggttcaggttgtgagagcattggatagtgaaggggacatgggagatatcagcaatggtaacaaagtgggacaaagcagtgcttatgactctggtcagtataataatgacaccatgaagttcaggaaaatggcatttggttttgacgatagctcggattccgggatgtacagtggagactactctgtccaagactcccggaaaggatccaacggagcttcctctgagttcacaaggaatgaaaccgagaaccgaaacttcaataaccggcgctactga

SEQ ID NO: 88638 - protein, 976 aa, Arabidopsis thaliana
  peptide (1)..(976): Ceres Seq. ID no. 12711236
  misc_feature (298)..(526): Pfam Name: Formin Homology 2 Domain Pfam Description: Formin Homology 2 Domain
  misc_feature (297)..(793): Homolog of NCBI NO: 15220786 NR Description: Pto kinase interactor, putative; protein id:
  misc_feature (782)..(976): Homolog of NCBI NO: 15220786 NR Description: Pto kinase interactor, putative; protein id:
  misc_feature (297)..(793): Homolog of NCBI NO: 25518375 NR Description: hypothetical protein F5O8.10 - Arabidopsis
  misc_feature (785)..(976): Homolog of NCBI NO: 25518375 NR Description: hypothetical protein F5O8.10 - Arabidopsis
  misc_feature (297)..(724): Homolog of NCBI NO: 8778584 NR Description: F28C11.17 [Arabidopsis thaliana]
  misc_feature (782)..(976): Homolog of NCBI NO: 8778584 NR Description: F28C11.17 [Arabidopsis thaliana]
  misc_feature (291)..(970): Homolog of NCBI NO: 15218591 NR Description: protein kinase, putative; protein id: At1g10620.1
  misc_feature (291)..(970): Homolog of NCBI NO: 25402610 NR Description: protein F20B24.6 [imported] - Arabidopsis >gi|6573752|gb|AAF17672.1|AC009398_21 F20B24.6 [Arabidopsis
  misc_feature (26)..(204): Homolog of NCBI NO: 15220786 NR Description: Pto kinase interactor, putative; protein id:
  misc_feature (297)..(515): Homolog of NCBI NO: 15221470 NR Description: protein kinase, putative; protein id: supported by cDNA: gi_21280864 [Arabidopsis thaliana]
MWRLKNQKKKETADSPSSSPTAPSVDSAVMGSGQTHFTYEELEDITEGFSKQNILGEGGFGCVYKGKLKDGKLVAVKQLKVGSGQGDREFKAEVEIISRVHHRHLVSLVGYCIADSERLLIYEYVPNQTLEHHLHGKGRPVLEWARRVRIAIVLPKVWRICTKTFQIEAESKRLYLSCFAGHPKIIHRDIKSANILLDDEFEVQVADFGLAKVNDTTQTHVSTRVMGTFGYLAPEYAQSGQLTDRSDVFSFGVVLLELITGRKPVDRNQPLGEESLVGWVQNVHAWFRNKFKQGKKMSDSPTSSPPAPSADSAPPPDTSSDGSAAPPPTDSAPPPSPPADSSPPPALPSLPPAVFSPPPTVSSPPPPPLDSSPPPPPDLTPPPSSPPPPDAPPPIPIVFPPPIDSPPPESTNSPPPPEVFEPPPPPADEDESPPAPPPPEQLPPPASSPQGGPKKPKKHHPGPATSPPAPSAPATSPPAPPNAPPRNSSHALPPKSTAAGGPLTSPSRGVPSSGNSVPPPANSGGGYQGKTMAGFAIAGFAVIALMAVVFLVRRKKKRNIDAYSDSQYLPPSNFSIKSDGFLYGQNPTKGYSGPGGYNSQQQSNSGNSFGSQRGGGGYTRSGSAPDSAVMGSGQTHFTYEELTDITEGFSKHNILGEGGFGCVYKGKLNDGKLVAVKQLKVGSGQGDREFKAEVEIISRVHHRHLVSLVGYCIADSERLLIYEYVPNQTLEHHLHGKGRPVLEWARRVRIAIGSAKGLAYLHEDCHPKIIHRDIKSANILLDDEYLAPEYAQSGKLTDRSDVFSFGVVLLELITGRKPVDQYQPLGEESLVEWARPLLHKAIETGDFSELVDRRLEKHYVENEVFRMIETAAACVRHSGPKRPRMVQVVRALDSEGDMGDISNGNKVGQSSAYDSGQYNNDTMKFRKMAFGFDDSSDSGMYSGDYSVQDSRKGSNGASSEFTRNETENRNFNNRRY

SEQ ID NO: 88639 - protein, 947 aa, Arabidopsis thaliana
  peptide (1)..(947): Ceres Seq. ID no. 12711237
  misc_feature (269)..(497): Pfam Name: Formin Homology 2 Domain Pfam Description: Formin Homology 2 Domain
  misc_feature (268)..(764): Homolog of NCBI NO: 15220786 NR Description: Pto kinase interactor, putative; protein id:
  misc_feature (753)..(947): Homolog of NCBI NO: 15220786 NR Description: Pto kinase interactor, putative; protein id:
  misc_feature (268)..(764): Homolog of NCBI NO: 25518375 NR Description: hypothetical protein F5O8.10 - Arabidopsis
  misc_feature (756)..(947): Homolog of NCBI NO: 25518375 NR Description: hypothetical protein F5O8.10 - Arabidopsis
  misc_feature (268)..(695): Homolog of NCBI NO: 8778584 NR Description: F28C11.17 [Arabidopsis thaliana]
  misc_feature (753)..(947): Homolog of NCBI NO: 8778584 NR Description: F28C11.17 [Arabidopsis thaliana]
  misc_feature (262)..(941): Homolog of NCBI NO: 15218591 NR Description: protein kinase, putative; protein id: At1g10620.1
  misc_feature (262)..(941): Homolog of NCBI NO: 25402610 NR Description: protein F20B24.6 [imported] - Arabidopsis >gi|6573752|gb|AAF17672.1|AC009398_21 F20B24.6 [Arabidopsis
  misc_feature (1)..(175): Homolog of NCBI NO: 15220786 NR Description: Pto kinase interactor, putative; protein id:
  misc_feature (268)..(486): Homolog of NCBI NO: 15221470 NR Description: protein kinase, putative; protein id: supported by cDNA: gi_21280864 [Arabidopsis thaliana]
MGSGQTHFTYEELEDITEGFSKQNILGEGGFGCVYKGKLKDGKLVAVKQLKVGSGQGDREFKAEVEIISRVHHRHLVSLVGYCIADSERLLIYEYVPNQTLEHHLHGKGRPVLEWARRVRIAIVLPKVWRICTKTFQIEAESKRLYLSCFAGHPKIIHRDIKSANILLDDEFEVQVADFGLAKVNDTTQTHVSTRVMGTFGYLAPEYAQSGQLTDRSDVFSFGVVLLELITGRKPVDRNQPLGEESLVGWVQNVHAWFRNKFKQGKKMSDSPTSSPPAPSADSAPPPDTSSDGSAAPPPTDSAPPPSPPADSSPPPALPSLPPAVFSPPPTVSSPPPPPLDSSPPPPPDLTPPPSSPPPPDAPPPIPIVFPPPIDSPPPESTNSPPPPEVFEPPPPPADEDESPPAPPPPEQLPPPASSPQGGPKKPKKHHPGPATSPPAPSAPATSPPAPPNAPPRNSSHALPPKSTAAGGPLTSPSRGVPSSGNSVPPPANSGGGYQGKTMAGFAIAGFAVIALMAVVFLVRRKKKRNIDAYSDSQYLPPSNFSIKSDGFLYGQNPTKGYSGPGGYNSQQQSNSGNSFGSQRGGGGYTRSGSAPDSAVMGSGQTHFTYEELTDITEGFSKHNILGEGGFGCVYKGKLNDGKLVAVKQLKVGSGQGDREFKAEVEIISRVHHRHLVSLVGYCIADSERLLIYEYVPNQTLEHHLHGKGRPVLEWARRVRIAIGSAKGLAYLHEDCHPKIIHRDIKSANILLDDEYLAPEYAQSGKLTDRSDVFSFGVVLLELITGRKPVDQYQPLGEESLVEWARPLLHKAIETGDFSELVDRRLEKHYVENEVFRMIETAAACVRHSGPKRPRMVQVVRALDSEGDMGDISNGNKVGQSSAYDSGQYNNDTMKFRKMAFGFDDSSDSGMYSGDYSVQDSRKGSNGASSEFTRNETENRNFNNRRY

SEQ ID NO: 88640 - protein, 751 aa, Arabidopsis thaliana
  peptide (1)..(751): Ceres Seq. ID no. 12711238
  misc_feature (73)..(301): Pfam Name: Formin Homology 2 Domain Pfam Description: Formin Homology 2 Domain
  misc_feature (72)..(568): Homolog of NCBI NO: 15220786 NR Description: Pto kinase interactor, putative; protein id:
  misc_feature (557)..(751): Homolog of NCBI NO: 15220786 NR Description: Pto kinase interactor, putative; protein id:
  misc_feature (72)..(568): Homolog of NCBI NO: 25518375 NR Description: hypothetical protein F5O8.10 - Arabidopsis
  misc_feature (560)..(751): Homolog of NCBI NO: 25518375 NR Description: hypothetical protein F5O8.10 - Arabidopsis
  misc_feature (72)..(499): Homolog of NCBI NO: 8778584 NR Description: F28C11.17 [Arabidopsis thaliana]
  misc_feature (557)..(751): Homolog of NCBI NO: 8778584 NR Description: F28C11.17 [Arabidopsis thaliana]
  misc_feature (66)..(745): Homolog of NCBI NO: 15218591 NR Description: protein kinase, putative; protein id: At1g10620.1
  misc_feature (66)..(745): Homolog of NCBI NO: 25402610 NR Description: protein F20B24.6 [imported] - Arabidopsis >gi|6573752|gb|AAF17672.1|AC009398_21 F20B24.6 [Arabidopsis
  misc_feature (72)..(290): Homolog of NCBI NO: 15221470 NR Description: protein kinase, putative; protein id: supported by cDNA: gi_21280864 [Arabidopsis thaliana]
  misc_feature (369)..(560): Homolog of NCBI NO: 15221470 NR Description: protein kinase, putative; protein id: supported by cDNA: gi_21280864 [Arabidopsis thaliana]
MGTFGYLAPEYAQSGQLTDRSDVFSFGVVLLELITGRKPVDRNQPLGEESLVGWVQNVHAWFRNKFKQGKKMSDSPTSSPPAPSADSAPPPDTSSDGSAAPPPTDSAPPPSPPADSSPPPALPSLPPAVFSPPPTVSSPPPPPLDSSPPPPPDLTPPPSSPPPPDAPPPIPIVFPPPIDSPPPESTNSPPPPEVFEPPPPPADEDESPPAPPPPEQLPPPASSPQGGPKKPKKHHPGPATSPPAPSAPATSPPAPPNAPPRNSSHALPPKSTAAGGPLTSPSRGVPSSGNSVPPPANSGGGYQGKTMAGFAIAGFAVIALMAVVFLVRRKKKRNIDAYSDSQYLPPSNFSIKSDGFLYGQNPTKGYSGPGGYNSQQQSNSGNSFGSQRGGGGYTRSGSAPDSAVMGSGQTHFTYEELTDITEGFSKHNILGEGGFGCVYKGKLNDGKLVAVKQLKVGSGQGDREFKAEVEIISRVHHRHLVSLVGYCIADSERLLIYEYVPNQTLEHHLHGKGRPVLEWARRVRIAIGSAKGLAYLHEDCHPKIIHRDIKSANILLDDEYLAPEYAQSGKLTDRSDVFSFGVVLLELITGRKPVDQYQPLGEESLVEWARPLLHKAIETGDFSELVDRRLEKHYVENEVFRMIETAAACVRHSGPKRPRMVQVVRALDSEGDMGDISNGNKVGQSSAYDSGQYNNDTMKFRKMAFGFDDSSDSGMYSGDYSVQDSRKGSNGASSEFTRNETENRNFNNRRY

SEQ ID NO: 88641 - DNA, 2886 bp, Arabidopsis thaliana
  misc_feature (1)..(2886): Ceres Seq. ID no. 12711239
  misc_feature: MA Experiment ID: 20000180 Result: Up-regulated in Transcription
  misc_feature: MA Experiment 20000180 PARAMETER Experiment Name: At_Germinating_Seeds_P Parameter: Age (hr) Value: 24 vs. 0
  misc_feature: MA Experiment 20000180 PARAMETER Experiment Name: At_Germinating_Seeds_P Parameter: Tissue Value: Germinating Seeds
  misc_feature: MA Experiment ID: 20000227 Result: Up-regulated in Transcription
  misc_feature: MA Experiment 20000227 PARAMETER Experiment Name: At_Root-Tips-vs-Tops_P Parameter: Tissue Value: Root Tips vs. Root Tops
  misc_feature: MA Experiment ID: 20000439 Result: Up-regulated in Transcription
  misc_feature: MA Experiment 20000439 PARAMETER Experiment Name: At_Roots__P Parameter: Age (day) Value: 14 vs. 21
  misc_feature: MA Experiment 20000439 PARAMETER Experiment Name: At_Roots__P Parameter: Organism Value: A. thaliana
  misc_feature: MA Experiment 20000439 PARAMETER Experiment Name: At_Roots__P Parameter: Tissue Value: Roots vs. Whole Plant
atgtggagattaaagaatcagaagaagaaagaaacggcagattcgccgagttcttctccaacagcaccgtcagtcgattcagcggtgatgggaagtggtcagactcattttacctatgaagagctagaggacataacagaagggttttctaagcaaaacatacttggagaaggaggttttggttgtgtctacaaaggtaaactaaaagatggaaaacttgttgctgttaagcagcttaaggttggtagcggacaaggagaccgtgagtttaaggcggaggttgagattattagccgtgttcatcatcgccatttggtatcgcttgttggatactgcattgcggattcagagagattgcttatctatgagtatgttcctaaccaaacattggagcatcatttgcatgggaagggtaggccagtgcttgaatgggctaggagagtcagaatcgctatagttctgccaaaggtttggcgtatttgcacgaagactgtaagtcacccaaaaatcattcacagggacataaagtccgctaacatcttgctggacgatgagtttgaagttcaggttgctgactttggacttgccaaagtcaatgatacaacacaaactcatgtctcaactcgcgttatgggaaccttcgggtacttggcaccagaatatgcacaaagtggacaacttactgatagatcagatgttttctcgtttggagttgttctcttagagcttataactggacgcaaacctgttgaccggaaccagcctttgggagaagagagtttggttggatgggtccaaaacgtccacgcatggttcagaaacaaattcaaacaaggcaaaaaaatgtcggactcgccaacttcttctccaccagcaccatccgctgattccgctccgccgccggatacctcatccgacggatctgctgctcctccacctacggattcagcaccacctcctagtccaccggctgattcatctccgcctccagctcttccatctcttccgccagctgtcttttctcctccgccaactgtctcatcccctcctcctccgccgcttgattcatctcctcctccgccgcctgatttaaccccgccgccaagttctccccctcccccagatgctccgccgccgattcccatcgtgttccctccaccgatagactcaccgccgcccgagtccaccaactcccctccacctccagaggtgtttgaaccaccaccgcctccggccgatgaagacgaaagccctcctgctcctccacctccggaacaattacctcctccagcgtcttcaccgcaaggaggacccaaaaaaccaaaaaaacaccatccaggaccagccacatctcctcctgctccttcagcaccagccacatctcctcctgctcctccaaacgcgccgccacgtaacagttcccacgcactaccacctaagtctaccgctgcaggtggacctctcacctcgccatctcgcggagtccccagcagcggaaactctgtcccgccacctgcaaatagcggtggcggctatcaagggaagactatggccggttttgcaatagccggtttcgcagtcatcgccttgatggccgttgtgttcttagtcagaagaaagaagaagagaaacattgatgcctacagtgactcacaatacttgcctccttcaaacttctccatcaaatcagatggattcttatacggtcaaaatcctacaaagggatactctggtcctggtggttacaattcacaacaacaatcaaattccggaaacagcttcggcagccaacgaggaggaggaggttatacacggtcagggagcgcacctgattcagcagtgatgggaagtggtcaaacacatttcacatatgaagagctaacggacataacagaaggattttctaagcataacatacttggagaaggaggttttggttgtgtgtataaaggtaaattaaatgatggaaaacttgttgctgttaagcagcttaaggttggtagcggacaaggtgaccgtgagtttaaggcggaggttgagattattagccgtgttcatcatcgccatttggtttctcttgttggatactgcattgcggattcagagagattgcttatctatgaatatgttcctaaccaaacattggaacatcatttgcatgggaagggaaggccagtacttgaatgggctaggagagtcagaattgctataggttctgccaaaggtttggcgtatttacacgaagactgtcacccaaaaatcattcacagggacataaagtccgctaacatcttgctggacgatgagtacttggcaccagaatatgcacaaagtggaaagctgactgatagatcagatgttttctcgtttggggttgttctcttagagcttataacaggacgcaaacctgttgaccaataccagcctttgggagaagagagtttggttgaatgggctcgtcctctgcttcacaaagccattgagaccggtgatttcagtgaactagttgatagacggctcgaaaagcattatgtggagaatgaagttttcagaatgattgaaacagctgctgcttgtgttaggcattcaggtccaaaacgtccacgtatggttcaggttgtgagagcattggatagtgaaggggacatgggagatatcagcaatggtaacaaagtgggacaaagcagtgcttatgactctggtcagtataataatgacaccatgaagttcaggaaaatggcatttggttttgacgatagctcggattccgggatgtacagtggagactactctgtccaagactcccggaaaggatccaacggagcttcctctgagttcacaaggaatgaaaccgagaaccgaaacttcaataaccggcgctactga

SEQ ID NO: 88642 - protein, 961 aa, Arabidopsis thaliana
  peptide (1)..(961): Ceres Seq. ID no. 12711240
  misc_feature (283)..(511): Pfam Name: Formin Homology 2 Domain Pfam Description: Formin Homology 2 Domain
  misc_feature (282)..(778): Homolog of NCBI NO: 15220786 NR Description: Pto kinase interactor, putative; protein id:
  misc_feature (767)..(961): Homolog of NCBI NO: 15220786 NR Description: Pto kinase interactor, putative; protein id:
  misc_feature (282)..(778): Homolog of NCBI NO: 25518375 NR Description: hypothetical protein F5O8.10 - Arabidopsis
  misc_feature (770)..(961): Homolog of NCBI NO: 25518375 NR Description: hypothetical protein F5O8.10 - Arabidopsis
  misc_feature (282)..(709): Homolog of NCBI NO: 8778584 NR Description: F28C11.17 [Arabidopsis thaliana]
  misc_feature (767)..(961): Homolog of NCBI NO: 8778584 NR Description: F28C11.17 [Arabidopsis thaliana]
  misc_feature (276)..(955): Homolog of NCBI NO: 15218591 NR Description: protein kinase, putative; protein id: At1g10620.1
  misc_feature (276)..(955): Homolog of NCBI NO: 25402610 NR Description: protein F20B24.6 [imported] - Arabidopsis >gi|6573752|gb|AAF17672.1|AC009398_21 F20B24.6 [Arabidopsis
  misc_feature (26)..(189): Homolog of NCBI NO: 15220786 NR Description: Pto kinase interactor, putative; protein id:
  misc_feature (282)..(500): Homolog of NCBI NO: 15221470 NR Description: protein kinase, putative; protein id: supported by cDNA: gi_21280864 [Arabidopsis thaliana]
MWRLKNQKKKETADSPSSSPTAPSVDSAVMGSGQTHFTYEELEDITEGFSKQNILGEGGFGCVYKGKLKDGKLVAVKQLKVGSGQGDREFKAEVEIISRVHHRHLVSLVGYCIADSERLLIYEYVPNQTLEHHLHGKGRPVLEWARRVRIAIVLPKVWRICTKTVSHPKIIHRDIKSANILLDDEFEVQVADFGLAKVNDTTQTHVSTRVMGTFGYLAPEYAQSGQLTDRSDVFSFGVVLLELITGRKPVDRNQPLGEESLVGWVQNVHAWFRNKFKQGKKMSDSPTSSPPAPSADSAPPPDTSSDGSAAPPPTDSAPPPSPPADSSPPPALPSLPPAVFSPPPTVSSPPPPPLDSSPPPPPDLTPPPSSPPPPDAPPPIPIVFPPPIDSPPPESTNSPPPPEVFEPPPPPADEDESPPAPPPPEQLPPPASSPQGGPKKPKKHHPGPATSPPAPSAPATSPPAPPNAPPRNSSHALPPKSTAAGGPLTSPSRGVPSSGNSVPPPANSGGGYQGKTMAGFAIAGFAVIALMAVVFLVRRKKKRNIDAYSDSQYLPPSNFSIKSDGFLYGQNPTKGYSGPGGYNSQQQSNSGNSFGSQRGGGGYTRSGSAPDSAVMGSGQTHFTYEELTDITEGFSKHNILGEGGFGCVYKGKLNDGKLVAVKQLKVGSGQGDREFKAEVEIISRVHHRHLVSLVGYCIADSERLLIYEYVPNQTLEHHLHGKGRPVLEWARRVRIAIGSAKGLAYLHEDCHPKIIHRDIKSANILLDDEYLAPEYAQSGKLTDRSDVFSFGVVLLELITGRKPVDQYQPLGEESLVEWARPLLHKAIETGDFSELVDRRLEKHYVENEVFRMIETAAACVRHSGPKRPRMVQVVRALDSEGDMGDISNGNKVGQSSAYDSGQYNNDTMKFRKMAFGFDDSSDSGMYSGDYSVQDSRKGSNGASSEFTRNETENRNFNNRRY

SEQ ID NO: 88643 - protein, 932 aa, Arabidopsis thaliana
  peptide (1)..(932): Ceres Seq. ID no. 12711241
  misc_feature (254)..(482): Pfam Name: Formin Homology 2 Domain Pfam Description: Formin Homology 2 Domain
  misc_feature (253)..(749): Homolog of NCBI NO: 15220786 NR Description: Pto kinase interactor, putative; protein id:
  misc_feature (738)..(932): Homolog of NCBI NO: 15220786 NR Description: Pto kinase interactor, putative; protein id:
  misc_feature (253)..(749): Homolog of NCBI NO: 25518375 NR Description: hypothetical protein F5O8.10 - Arabidopsis
  misc_feature (741)..(932): Homolog of NCBI NO: 25518375 NR Description: hypothetical protein F5O8.10 - Arabidopsis
  misc_feature (253)..(680): Homolog of NCBI NO: 8778584 NR Description: F28C11.17 [Arabidopsis thaliana]
  misc_feature (738)..(932): Homolog of NCBI NO: 8778584 NR Description: F28C11.17 [Arabidopsis thaliana]
  misc_feature (247)..(926): Homolog of NCBI NO: 15218591 NR Description: protein kinase, putative; protein id: At1g10620.1
  misc_feature (247)..(926): Homolog of NCBI NO: 25402610 NR Description: protein F20B24.6 [imported] - Arabidopsis >gi|6573752|gb|AAF17672.1|AC009398_21 F20B24.6 [Arabidopsis
  misc_feature (1)..(160): Homolog of NCBI NO: 15220786 NR Description: Pto kinase interactor, putative; protein id:
  misc_feature (253)..(471): Homolog of NCBI NO: 15221470 NR Description: protein kinase, putative; protein id: supported by cDNA: gi_21280864 [Arabidopsis thaliana]
MGSGQTHFTYEELEDITEGFSKQNILGEGGFGCVYKGKLKDGKLVAVKQLKVGSGQGDREFKAEVEIISRVHHRHLVSLVGYCIADSERLLIYEYVPNQTLEHHLHGKGRPVLEWARRVRIAIVLPKVWRICTKTVSHPKIIHRDIKSANILLDDEFEVQVADFGLAKVNDTTQTHVSTRVMGTFGYLAPEYAQSGQLTDRSDVFSFGVVLLELITGRKPVDRNQPLGEESLVGWVQNVHAWFRNKFKQGKKMSDSPTSSPPAPSADSAPPPDTSSDGSAAPPPTDSAPPPSPPADSSPPPALPSLPPAVFSPPPTVSSPPPPPLDSSPPPPPDLTPPPSSPPPPDAPPPIPIVFPPPIDSPPPESTNSPPPPEVFEPPPPPADEDESPPAPPPPEQLPPPASSPQGGPKKPKKHHPGPATSPPAPSAPATSPPAPPNAPPRNSSHALPPKSTAAGGPLTSPSRGVPSSGNSVPPPANSGGGYQGKTMAGFAIAGFAVIALMAVVFLVRRKKKRNIDAYSDSQYLPPSNFSIKSDGFLYGQNPTKGYSGPGGYNSQQQSNSGNSFGSQRGGGGYTRSGSAPDSAVMGSGQTHFTYEELTDITEGFSKHNILGEGGFGCVYKGKLNDGKLVAVKQLKVGSGQGDREFKAEVEIISRVHHRHLVSLVGYCIADSERLLIYEYVPNQTLEHHLHGKGRPVLEWARRVRIAIGSAKGLAYLHEDCHPKIIHRDIKSANILLDDEYLAPEYAQSGKLTDRSDVFSFGVVLLELITGRKPVDQYQPLGEESLVEWARPLLHKAIETGDFSELVDRRLEKHYVENEVFRMIETAAACVRHSGPKRPRMVQVVRALDSEGDMGDISNGNKVGQSSAYDSGQYNNDTMKFRKMAFGFDDSSDSGMYSGDYSVQDSRKGSNGASSEFTRNETENRNFNNRRY

SEQ ID NO: 88644 - protein, 751 aa, Arabidopsis thaliana; identical to SEQ ID NO: 88640
  peptide (1)..(751): Ceres Seq. ID no. 12711242
  misc_feature (73)..(301): Pfam Name: Formin Homology 2 Domain Pfam Description: Formin Homology 2 Domain
  misc_feature (72)..(568): Homolog of NCBI NO: 15220786 NR Description: Pto kinase interactor, putative; protein id:
  misc_feature (557)..(751): Homolog of NCBI NO: 15220786 NR Description: Pto kinase interactor, putative; protein id:
  misc_feature (72)..(568): Homolog of NCBI NO: 25518375 NR Description: hypothetical protein F5O8.10 - Arabidopsis
  misc_feature (560)..(751): Homolog of NCBI NO: 25518375 NR Description: hypothetical protein F5O8.10 - Arabidopsis
  misc_feature (72)..(499): Homolog of NCBI NO: 8778584 NR Description: F28C11.17 [Arabidopsis thaliana]
  misc_feature (557)..(751): Homolog of NCBI NO: 8778584 NR Description: F28C11.17 [Arabidopsis thaliana]
  misc_feature (66)..(745): Homolog of NCBI NO: 15218591 NR Description: protein kinase, putative; protein id: At1g10620.1
  misc_feature (66)..(745): Homolog of NCBI NO: 25402610 NR Description: protein F20B24.6 [imported] - Arabidopsis >gi|6573752|gb|AAF17672.1|AC009398_21 F20B24.6 [Arabidopsis
  misc_feature (72)..(290): Homolog of NCBI NO: 15221470 NR Description: protein kinase, putative; protein id: supported by cDNA: gi_21280864 [Arabidopsis thaliana]
  misc_feature (369)..(560): Homolog of NCBI NO: 15221470 NR Description: protein kinase, putative; protein id: supported by cDNA: gi_21280864 [Arabidopsis thaliana]

SEQ ID NO: 88645 - DNA, 1201 bp, Arabidopsis thaliana
  misc_feature (1)..(1201): Ceres Seq. ID no. 12711274
  misc_feature: MA Experiment ID: 108434 Result: Down-regulated in Transcription
  misc_feature: MA Experiment 108434 PARAMETER Experiment Name: At_Root_Tips_cDNA_P Parameter: Tissue Value: Root Tips
  misc_feature: MA Experiment ID: 108435 Result: Down-regulated in Transcription
  misc_feature: MA Experiment 108435 PARAMETER Experiment Name: At_stm_Mutants_cDNA_P Parameter: Plant Line Value: wt Landsburg vs stm
  misc_feature: MA Experiment 108435 PARAMETER Experiment Name: At_stm_Mutants_cDNA_P Parameter: Tissue Value: Shoot Apical Meristem Region
  misc_feature: MA Experiment ID: 108462 Result: Up-regulated in Transcription
  misc_feature: MA Experiment 108462 PARAMETER Experiment Name: At_Germinating_Seeds_cDNA_P Parameter: Age (day) Value: 2 vs. 0
  misc_feature: MA Experiment 108462 PARAMETER Experiment Name: At_Germinating_Seeds_cDNA_P Parameter: Tissue Value: Germinating Seeds
  misc_feature: MA Experiment ID: 108463 Result: Up-regulated in Transcription
  misc_feature: MA Experiment 108463 PARAMETER Experiment Name: At_Germinating_Seeds_cDNA_P Parameter: Age (day) Value: 3 vs. 0
  misc_feature: MA Experiment 108463 PARAMETER Experiment Name: At_Germinating_Seeds_cDNA_P Parameter: Tissue Value: Germinating Seeds
  misc_feature: MA Experiment ID: 108464 Result: Up-regulated in Transcription
  misc_feature: MA Experiment 108464 PARAMETER Experiment Name: At_Germinating_Seeds_cDNA_P Parameter: Age (day) Value: 4 vs. 0
  misc_feature: MA Experiment 108464 PARAMETER Experiment Name: At_Germinating_Seeds_cDNA_P Parameter: Tissue Value: Germinating Seeds
  misc_feature: MA Experiment ID: 108489 Result: Down-regulated in Transcription
  misc_feature: MA Experiment ID: 108573 Result: Up-regulated in Transcription
  misc_feature: MA Experiment 108573 PARAMETER Experiment Name: At_Drought_cDNA_P Parameter: Timepoint (hr) Value: 6
  misc_feature: MA Experiment 108573 PARAMETER Experiment Name: At_Drought_cDNA_P Parameter: Tissue Value: Aerial
  misc_feature: MA Experiment 108573 PARAMETER Experiment Name: At_Drought_cDNA_P Parameter: Treatment Value: Drought vs. No Drought
  misc_feature: MA Experiment ID: 108595 Result: Down-regulated in Transcription
  misc_feature: MA Experiment 108595 PARAMETER Experiment Name: At_Ler-pi_Ovule_cDNA_P Parameter: Plant Line Value: null
  misc_feature: MA Experiment ID: 20000087 Result: Down-regulated in Transcription
  misc_feature: MA Experiment 20000087 PARAMETER Experiment Name: At_100uM_ABA_Mutants_cDNA_P Parameter: Plant Line Value: WS
  misc_feature: MA Experiment 20000087 PARAMETER Experiment Name: At_100uM_ABA_Mutants_cDNA_P Parameter: Timepoint (hr) Value: 6
  misc_feature: MA Experiment 20000087 PARAMETER Experiment Name: At_100uM_ABA_Mutants_cDNA_P Parameter: Tissue Value: Aerial
  misc_feature: MA Experiment 20000087 PARAMETER Experiment Name: At_100uM_ABA_Mutants_cDNA_P Parameter: Treatment Value: 100uM ABA vs. No Treatment
  misc_feature: MA Experiment ID: 20000185 Result: Down-regulated in Transcription
  misc_feature: MA Experiment 20000185 PARAMETER Experiment Name: At_Roots__P Parameter: Age (day) Value: 7 vs. 21
  misc_feature: MA Experiment 20000185 PARAMETER Experiment Name: At_Roots__P Parameter: Organism Value: A. thaliana
  misc_feature: MA Experiment 20000185 PARAMETER Experiment Name: At_Roots__P Parameter: Tissue Value: Roots vs. Whole Plant
  misc_feature: MA Experiment ID: 20000227 Result: Down-regulated in Transcription
  misc_feature: MA Experiment 20000227 PARAMETER Experiment Name: At_Root-Tips-vs-Tops_P Parameter: Tissue Value: Root Tips vs. Root Tops
  misc_feature: MA Experiment ID: 20000439 Result: Down-regulated in Transcription
  misc_feature: MA Experiment 20000439 PARAMETER Experiment Name: At_Roots__P Parameter: Age (day) Value: 14 vs. 21
  misc_feature: MA Experiment 20000439 PARAMETER Experiment Name: At_Roots__P Parameter: Organism Value: A. thaliana
  misc_feature: MA Experiment 20000439 PARAMETER Experiment Name: At_Roots__P Parameter: Tissue Value: Roots vs. Whole Plant
  misc_feature: MA Experiment ID: 20001451 Result: Down-regulated in Transcription
  misc_feature: MA Experiment 20001451 PARAMETER Experiment Name: At_Far-red-induction_P Parameter: Age (day) Value: 7
  misc_feature: MA Experiment 20001451 PARAMETER Experiment Name: At_Far-red-induction_P Parameter: Light Value: Far-red vs. White
  misc_feature: MA Experiment 20001451 PARAMETER Experiment Name: At_Far-red-induction_P Parameter: Organism Value: A. thaliana
  misc_feature: MA Experiment 20001451 PARAMETER Experiment Name: At_Far-red-induction_P Parameter: Plant Line Value: Columbia
  misc_feature: MA Experiment 20001451 PARAMETER Experiment Name: At_Far-red-induction_P Parameter: Timepoint (hr) Value: 24
  misc_feature: MA Experiment 20001451 PARAMETER Experiment Name: At_Far-red-induction_P Parameter: Tissue Value: Whole Plant
  misc_feature: MA Experiment ID: 20001557 Result: Down-regulated in Transcription
  misc_feature: MA Experiment 20001557 PARAMETER Experiment Name: At_Drought_Soil_Dry_P Parameter: Age (day) Value: 27
  misc_feature: MA Experiment 20001557 PARAMETER Experiment Name: At_Drought_Soil_Dry_P Parameter: Organism Value: A. thaliana
  misc_feature: MA Experiment 20001557 PARAMETER Experiment Name: At_Drought_Soil_Dry_P Parameter: Plant Line Value: WS
  misc_feature: MA Experiment 20001557 PARAMETER Experiment Name: At_Drought_Soil_Dry_P Parameter: Post Timepoint (hr) Value: 3
  misc_feature: MA Experiment 20001557 PARAMETER Experiment Name: At_Drought_Soil_Dry_P Parameter: Post-Treatment Value: Re-Water vs. No Drought
  misc_feature: MA Experiment 20001557 PARAMETER Experiment Name: At_Drought_Soil_Dry_P Parameter: Timepoint (day) Value: 13
  misc_feature: MA Experiment 20001557 PARAMETER Experiment Name: At_Drought_Soil_Dry_P Parameter: Treatment Value: Drought vs. No Drought
  misc_feature: MA Experiment ID: 20001558 Result: Down-regulated in Transcription
  misc_feature: MA Experiment 20001558 PARAMETER Experiment Name: At_Drought_Soil_Dry_P Parameter: Age (day) Value: 27
  misc_feature: MA Experiment 20001558 PARAMETER Experiment Name: At_Drought_Soil_Dry_P Parameter: Organism Value: A. thaliana
  misc_feature: MA Experiment 20001558 PARAMETER Experiment Name: At_Drought_Soil_Dry_P Parameter: Plant Line Value: WS
  misc_feature: MA Experiment 20001558 PARAMETER Experiment Name: At_Drought_Soil_Dry_P Parameter: Post Timepoint (hr) Value: 6
  misc_feature: MA Experiment 20001558 PARAMETER Experiment Name: At_Drought_Soil_Dry_P Parameter: Post-Treatment Value: Re-Water vs. No Drought
  misc_feature: MA Experiment 20001558 PARAMETER Experiment Name: At_Drought_Soil_Dry_P Parameter: Timepoint (day) Value: 13
  misc_feature: MA Experiment 20001558 PARAMETER Experiment Name: At_Drought_Soil_Dry_P Parameter: Treatment Value: Drought vs. No Drought
  misc_feature: MA Experiment ID: 20001560 Result: Down-regulated in Transcription
  misc_feature: MA Experiment 20001560 PARAMETER Experiment Name: At_Drought_Soil_Dry_P Parameter: Age (day) Value: 28
  misc_feature: MA Experiment 20001560 PARAMETER Experiment Name: At_Drought_Soil_Dry_P Parameter: Organism Value: A. thaliana
  misc_feature: MA Experiment 20001560 PARAMETER Experiment Name: At_Drought_Soil_Dry_P Parameter: Plant Line Value: WS
  misc_feature: MA Experiment 20001560 PARAMETER Experiment Name: At_Drought_Soil_Dry_P Parameter: Post Timepoint (hr) Value: None
  misc_feature: MA Experiment 20001560 PARAMETER Experiment Name: At_Drought_Soil_Dry_P Parameter: Post-Treatment Value: None
  misc_feature: MA Experiment 20001560 PARAMETER Experiment Name: At_Drought_Soil_Dry_P Parameter: Timepoint (day) Value: 14
  misc_feature: MA Experiment 20001560 PARAMETER Experiment Name: At_Drought_Soil_Dry_P Parameter: Treatment Value: Drought vs. No Drought
  misc_feature: MA Experiment ID: 20001905 Result: Down-regulated in Transcription
  misc_feature: MA Experiment 20001905 PARAMETER Experiment Name: At_Drought_Reproduction_P Parameter: Age (day) Value: 40
  misc_feature: MA Experiment 20001905 PARAMETER Experiment Name: At_Drought_Reproduction_P Parameter: Organism Value: A. thaliana
  misc_feature: MA Experiment 20001905 PARAMETER Experiment Name: At_Drought_Reproduction_P Parameter: Plant Line Value: WS
  misc_feature: MA Experiment 20001905 PARAMETER Experiment Name: At_Drought_Reproduction_P Parameter: Timepoint (day) Value: 10
  misc_feature: MA Experiment 20001905 PARAMETER Experiment Name: At_Drought_Reproduction_P Parameter: Tissue Value: Rosettes
  misc_feature: MA Experiment 20001905 PARAMETER Experiment Name: At_Drought_Reproduction_P Parameter: Treatment Value: Drought vs. No Drought
aaaaacaaattagaagaagaaaaatcgatggcggggatactagtgaacaatatcctccctcaacctccgattctccgatcgctttcttcttcttcgcgaagaagttcaattcgaaccctagttatggtcaaagcttcttcctctgaaccttccgagtctgtttcagtctccacgaagaccagtgacgacactggagctgttgttgtgttcactgctcctcctggtttcaagccaccggagccaaaacggttcgccgtcaaatccggaaaactcttcgatgtcttgggtgcagcaattggattgtttttccgattcggcactggtgttttcgtttctgggtactctgcatcttttgtgtctaaggaagagattccagctgatcagtatgcgttgcgtttaggcgggatcacggtaaaggaaactgctaaggtcgggcctcgtcctgagaaacccattgagatatatgagtttgaaggctgtcccttctgccggaaggtcagggaaatggttgcagtgttggatcttgatattctctactatccttgtccaagagggagtccaaatttccgcccgaaggttaaacagatgggcgggaaacaacagtttccgtacatggttgatcccaataccggagtgtccatgtatgaatcagatggaatcatcaaatatctatccgagaaatatggagatggaacagttcctttaagtctgtcacttggtgctttaacggctataacagcaggctttgcaatgattggtcgtatgggaaagggtaacttgtacacaccagcgaaactaccacctaagccactcgaattctgggcatatgagggttctccgttttgtaagcttgtacgcgaagttcttgtagaactggagttaccacacattcagcgcagttgtgctcgtggtagccccaaacggcaggtattgcttgagaaagctggtcactttcaggtgccttacctggaagatccaaacactggagtcgcgatgtttgagagtgcagaaattgttgagtatctcaagcaaacttatgctgcctaagtgttcgtcttcctcactttataccgtatagatatatgttaattgttgtgtgtatgttcagcctactttctgttcccccaataaaatgaacgcagttatctgtagaggttttaaatgaagacatgtacttatatataagtaaaggaattgtgac

SEQ ID NO: 88646 - protein, 348 aa, Arabidopsis thaliana; identical to SEQ ID NO: 24112
  peptide (1)..(348): Ceres Seq. ID no. 12711275
  misc_feature (10)..(348): Homolog of NCBI NO: 18414386 NR Description: auxin-regulated protein; protein id: At5g03880.1, by cDNA: 37668., supported by cDNA: gi_15451053, supported by gi_20148314 [Arabidopsis thaliana] >gi|15451054|gb|AAK96798.1|
  misc_feature (10)..(348): Homolog of NCBI NO: 21593275 NR Description: unknown [Arabidopsis thaliana]
  misc_feature (10)..(348): Homolog of NCBI NO: 11282317 NR Description: hypothetical protein F8F6.90 - Arabidopsis >gi|7406398|emb|CAB85508.1| putative protein [Arabidopsis >gi|9758017|dbj|BAB08614.1|
  misc_feature (144)..(348): Homolog of NCBI NO: 18413285 NR Description: putative protein; protein id: At4g10000.1,
  misc_feature (144)..(348): Homolog of NCBI NO: 21593568 NR Description: unknown [Arabidopsis thaliana]
  misc_feature (144)..(348): Homolog of NCBI NO: 7487730 NR Description: hypothetical protein T5L19.130 - Arabidopsis >gi|4539003|emb|CAB39624.1| putative protein [Arabidopsis >gi|7267696|emb|CAB78123.1| putative protein [Arabidopsis
  misc_feature (142)..(258): Homolog of NCBI NO: 15488040 NR Description: unknown [Photobacterium profundum]

SEQ ID NO: 88647 - protein, 339 aa, Arabidopsis thaliana; identical to SEQ ID NO: 24113
  peptide (1)..(339): Ceres Seq. ID no. 12711276
  misc_feature (1)..(339): Homolog of NCBI NO: 18414386 NR Description: auxin-regulated protein; protein id: At5g03880.1, by cDNA: 37668., supported by cDNA: gi_15451053, supported by gi_20148314 [Arabidopsis thaliana] >gi|15451054|gb|AAK96798.1|
  misc_feature (1)..(339): Homolog of NCBI NO: 21593275 NR Description: unknown [Arabidopsis thaliana]
  misc_feature (1)..(339): Homolog of NCBI NO: 11282317 NR Description: hypothetical protein F8F6.90 - Arabidopsis >gi|7406398|emb|CAB85508.1| putative protein [Arabidopsis >gi|9758017|dbj|BAB08614.1|
  misc_feature (135)..(339): Homolog of NCBI NO: 18413285 NR Description: putative protein; protein id: At4g10000.1,
  misc_feature (135)..(339): Homolog of NCBI NO: 21593568 NR Description: unknown [Arabidopsis thaliana]
  misc_feature (135)..(339): Homolog of NCBI NO: 7487730 NR Description: hypothetical protein T5L19.130 - Arabidopsis >gi|4539003|emb|CAB39624.1| putative protein [Arabidopsis >gi|7267696|emb|CAB78123.1| putative protein [Arabidopsis
  misc_feature (133)..(249): Homolog of NCBI NO: 15488040 NR Description: unknown [Photobacterium profundum]

SEQ ID NO: 88648 - protein, 307 aa, Arabidopsis thaliana; identical to SEQ ID NO: 24114
  peptide (1)..(307): Ceres Seq. ID no. 12711277
  misc_feature (1)..(307): Homolog of NCBI NO: 18414386 NR Description: auxin-regulated protein; protein id: At5g03880.1, by cDNA: 37668., supported by cDNA: gi_15451053, supported by gi_20148314 [Arabidopsis thaliana] >gi|15451054|gb|AAK96798.1|
  misc_feature (1)..(307): Homolog of NCBI NO: 21593275 NR Description: unknown [Arabidopsis thaliana]
  misc_feature (1)..(307): Homolog of NCBI NO: 11282317 NR Description: hypothetical protein F8F6.90 - Arabidopsis >gi|7406398|emb|CAB85508.1| putative protein [Arabidopsis >gi|9758017|dbj|BAB08614.1|
  misc_feature (103)..(307): Homolog of NCBI NO: 18413285 NR Description: putative protein; protein id: At4g10000.1,
  misc_feature (103)..(307): Homolog of NCBI NO: 21593568 NR Description: unknown [Arabidopsis thaliana]
  misc_feature (103)..(307): Homolog of NCBI NO: 7487730 NR Description: hypothetical protein T5L19.130 - Arabidopsis >gi|4539003|emb|CAB39624.1| putative protein [Arabidopsis >gi|7267696|emb|CAB78123.1| putative protein [Arabidopsis
  misc_feature (101)..(217): Homolog of NCBI NO: 15488040 NR Description: unknown [Photobacterium profundum]

SEQ ID NO: 88649 - DNA, 4056 bp, Arabidopsis thaliana
  misc_feature (1)..(4056): Ceres Seq. ID no. 12711320
  misc_feature: MA Experiment ID: 20001905 Result: Up-regulated in Transcription
  misc_feature: MA Experiment 20001905 PARAMETER Experiment Name: At_Drought_Reproduction_P Parameter: Age (day) Value: 40
  misc_feature: MA Experiment 20001905 PARAMETER Experiment Name: At_Drought_Reproduction_P Parameter: Organism Value: A. thaliana
  misc_feature: MA Experiment 20001905 PARAMETER Experiment Name: At_Drought_Reproduction_P Parameter: Plant Line Value: WS
  misc_feature: MA Experiment 20001905 PARAMETER Experiment Name: At_Drought_Reproduction_P Parameter: Timepoint (day) Value: 10
  misc_feature: MA Experiment 20001905 PARAMETER Experiment Name: At_Drought_Reproduction_P Parameter: Tissue Value: Rosettes
  misc_feature: MA Experiment 20001905 PARAMETER Experiment Name: At_Drought_Reproduction_P Parameter: Treatment Value: Drought vs. No Drought
atgggtaatgttgaaattccgaattggcttaaagctttgccattggcacctgtgtttagacctacagacactgaatttgcagatcccattgcttacatatcgaaaatcgaaaaggaagctagtgcctttgggatttgcaagatcattcctcctttacccaagccatcgaaaaagtatgttttctacaacttgaacaagtctcttttgaagtgtcccgaattggtttcagatgttgacatttcgaaggtgtgtaaagaggatagagctgtattcaccactaggcagcaagagttaggccaaactgtgaaaaaaaacaaaggagagaagggtaagagtaattctcaaaggagtggtgttaagcaggtttggcaaagtggaggcgtttatacattggatcagtttgaagctaagtcgaaagctttctacaaaacccaattaggaacggttaaggaactggcaccagttgtcattgaggcattgttctggaaagcggctttagagaagcctatatatatagagtatgctaatgacgtgcctggctctgctttcggtgagccagaggatcatttcaggcatttccggcagaggaagaggaggggcaggggattttatcagaggaagacagaaaataatgatccatcaggtaagaacggtgaaaagtcatcgcctgaggtagaaaaggcaccccttgcttctacaagtttatcatctcaggattcgtccaagcagaagaacatggatattgttgatgaaatggaaggtactgcaggctggaagctctccaacagttcgtggaaccttcagatgattgcacgttcacctggttctgttacacgtttcatgccagatgacattcctggtgttacatctcccatggtttatatcggtatgttgttcagttggtttgcctggcacgttgaggatcatgagcttcacagtatgaattatcttcacactggctcaccaaagacttggtacgctgtcccttgtgattatgcgcttgactttgaagaggttatccgcaaaaattcttatggcaggaacattgaccaactggctgctctcacccaactaggcgaaaagacaactcttgtatcacctgagatgatagttgcatctggcattccctgctgtaggttggtacaaaatcctggtgaatttgttgtgacttttccgaggtcttatcatgtaggattcagccacggttttaactgtggggaagccgctaattttggaaccccacagtggctcaacgtagcaaaggaagctgctgtgcgtcgggcagccatgaattatctacccatgctgtcccatcagcagctgctatatctcttgactatgtcctttgtttcaaggcaggttaccatggtctctttgtcatataacctagtgccacgatcattgctaccaggtggtcgtagctcccgactaagagatcggcagagagaagaaagagagttccttgtgaaaagagcttttgtagaagatatattgaacgaaaacaagaatttatctgttcttcttcgagaaccaggctctcgtttggtgatgtgggaccctgatttacttccgcgtcatagcgcactggctcttgcagctgctggagttgctggtgcttctgctgtttcacctccagcagtggcaaaaaaagaacttgaggagggtcattctgaattgcagaataaagaaaagacttctcttttagaggaattgagcttgttcatggagaagctgaatgatgtatactacgacgatgatgatggtctgcttaacgatttccaagttgatactggaaccttgccatgtgtggcttgtggcgttcttggcttcccctttatgtctgtggtacagccttctgaaaaagcattaaaagatctctcagagagacaaggagagacagatgctcaggaaattatgacactgtcatcagaaaagtctgactgcgaatggaaaacgtcttctagatatataagacctcgcattttctgcctcgaacacactattgaacttcagagactgctgcaatcaagaggtggattgaaattccttgttatttgccataaagactttcaaaaattcaaggcacatgcggctatagtggcagaggaggtcaaagtccctttcagctatgatgatgtcctgttagagagtgcatctcaggaagagttgagtctaattgatcttgcaattgaagatgaagaaaaatacgaacacagtgtagactggacctcagaacttggcatcaatttacggtactgtgtgaaagtgaggaaaaattcccctactaagaaaattcagcatgcactgtcactaggtggcttgttctccgatacaagccagatgctagattttacaactatcagatggctgcagagaaaatcacgctcaaaagctaaacccagttctacctcaagtttcacaccttgtgaacatcttgaagtaaaagcagatggaaaattaagggataatttggattctcagaccggaaaaaaggaagaaaagatcatccagtactcgagaaagaaaaagttgaatccaaagccttcagcagaacaagttcaggagctagctaccctagctaaatcaaaagattttgataagacatgtaaaaattttagcagtaggtcacatctggatagtgcaattcgttctgagatgaacagtgagattggagactctggaagggtcattggggtatcattttccataaatccttgtagctcatctttcactgtgggacatgggcaagaacatcccgagatcactgtcaagtttggttcagatttagatgggaatgtcacaaatagtttgagtatggtgaatggagactctgctgacctaaccttaacctccatatccagagagcagcaccaaggacactctatgaccagcaataataatggctccaactcaggtagtcatgttgtggcaagccagaccatacttgtttctacaggtgataatcatgacggaccaagaaaattgtctggtgattatgtctgcagtgatgtgtctgtacgtggtattcaggaagcggttgaaatgagtgaccaagagtttggagaacctaggtctactgtcactaatattgaggatgaacagcaatcacagattgtgaaaccaacccaaagagaagctgtatttggtgatcacgaacaggtggagggagcagaagctgtgtctaccagagaaaacttgtgctctgaaataattctgcacactgagcattcttcagctcatgtgggtatggaaattcctgacataaacacggccagtgagaacttagttgttgacatgacccatgatggtgaacctttggaaagtagcgatatattaagttcgagcaatggtgatgaagcttcttcaaatggattgcaagttctaaatgatgagcttagcatggagagtgaagtttcaagctcagaaaacaccgaagttattgaggctcccaattctatgggagaagcaaagaagaagcggaaaatagaatcagagtctgagacaaatgataatccagagagtagcattggtttcataaggagtccttgtgaagggttgaggtcaaggggcaagaggaaagcaacatgtgaaacttcattaaagcacactgaaacgagtgatgaagagaagaaacccattgcgaaaaggctgaagaaaacaccaaaggcttgctcagggagtcgtcagcaagaagtccccacgacaactcaccccaaccgttgttacctagagggatgcaagatgacttttgagagtaaagcgaaattacaaactcacaagagaaaccgttgcactcacgaagggtgtggaaagaaattcagggctcacaaatatctggtgcttcatcaacgtgtgcataaggatgaaagacctttcgagtgctcttggaaaggatgttcaatgactttcaaatggcaatgggcgaggacagaacatttgcgtctgcacacgggagagcgaccatacatatgcaaggtcgatggatgtggattgtcgtttaggtttgtatctgactatagtcgccacagacgtaaaaccatgcactatgtcacatag

SEQ ID NO: 88650 - protein, 1351 aa, Arabidopsis thaliana
  peptide (1)..(1351): Ceres Seq. ID no. 12711321
  misc_feature (292)..(401): Pfam Name: jmjC domain Pfam Description: jmjC domain
  misc_feature (254)..(626): Homolog of NCBI NO: 22331694 NR Description: similar to zinc finger protein - like; protein
  misc_feature (9)..(183): Homolog of NCBI NO: 22331694 NR Description: similar to zinc finger protein - like; protein
  misc_feature (1240)..(1350): Homolog of NCBI NO: 22331694 NR Description: similar to zinc finger protein - like; protein
  misc_feature (658)..(761): Homolog of NCBI NO: 22331694 NR Description: similar to zinc finger protein - like; protein
  misc_feature (254)..(626): Homolog of NCBI NO: 7488434 NR Description: zinc finger protein T29H11.50 - Arabidopsis >gi|4678345|emb|CAB41155.1| putative zinc finger protein
  misc_feature (9)..(183): Homolog of NCBI NO: 7488434 NR Description: zinc finger protein T29H11.50 - Arabidopsis >gi|4678345|emb|CAB41155.1| putative zinc finger protein
  misc_feature (1240)..(1350): Homolog of NCBI NO: 7488434 NR Description: zinc finger protein T29H11.50 - Arabidopsis >gi|4678345|emb|CAB41155.1| putative zinc finger protein
  misc_feature (658)..(761): Homolog of NCBI NO: 7488434 NR Description: zinc finger protein T29H11.50 - Arabidopsis >gi|4678345|emb|CAB41155.1| putative zinc finger protein
  misc_feature (1053)..(1350): Homolog of NCBI NO: 20804883 NR Description: putative zinc finger protein [Oryza sativa
  misc_feature (260)..(517): Homolog of NCBI NO: 20804883 NR Description: putative zinc finger protein [Oryza sativa
MGNVEIPNWLKALPLAPVFRPTDTEFADPIAYISKIEKEASAFGICKIIPPLPKPSKKYVFYNLNKSLLKCPELVSDVDISKVCKEDRAVFTTRQQELGQTVKKNKGEKGKSNSQRSGVKQVWQSGGVYTLDQFEAKSKAFYKTQLGTVKELAPVVIEALFWKAALEKPIYIEYANDVPGSAFGEPEDHFRHFRQRKRRGRGFYQRKTENNDPSGKNGEKSSPEVEKAPLASTSLSSQDSSKQKNMDIVDEMEGTAGWKLSNSSWNLQMIARSPGSVTRFMPDDIPGVTSPMVYIGMLFSWFAWHVEDHELHSMNYLHTGSPKTWYAVPCDYALDFEEVIRKNSYGRNIDQLAALTQLGEKTTLVSPEMIVASGIPCCRLVQNPGEFVVTFPRSYHVGFSHGFNCGEAANFGTPQWLNVAKEAAVRRAAMNYLPMLSHQQLLYLLTMSFVSRQVTMVSLSYNLVPRSLLPGGRSSRLRDRQREEREFLVKRAFVEDILNENKNLSVLLREPGSRLVMWDPDLLPRHSALALAAAGVAGASAVSPPAVAKKELEEGHSELQNKEKTSLLEELSLFMEKLNDVYYDDDDGLLNDFQVDTGTLPCVACGVLGFPFMSVVQPSEKALKDLSERQGETDAQEIMTLSSEKSDCEWKTSSRYIRPRIFCLEHTIELQRLLQSRGGLKFLVICHKDFQKFKAHAAIVAEEVKVPFSYDDVLLESASQEELSLIDLAIEDEEKYEHSVDWTSELGINLRYCVKVRKNSPTKKIQHALSLGGLFSDTSQMLDFTTIRWLQRKSRSKAKPSSTSSFTPCEHLEVKADGKLRDNLDSQTGKKEEKIIQYSRKKKLNPKPSAEQVQELATLAKSKDFDKTCKNFSSRSHLDSAIRSEMNSEIGDSGRVIGVSFSINPCSSSFTVGHGQEHPEITVKFGSDLDGNVTNSLSMVNGDSADLTLTSISREQHQGHSMTSNNNGSNSGSHVVASQTILVSTGDNHDGPRKLSGDYVCSDVSVRGIQEAVEMSDQEFGEPRSTVTNIEDEQQSQIVKPTQREAVFGDHEQVEGAEAVSTRENLCSEIILHTEHSSAHVGMEIPDINTASENLVVDMTHDGEPLESSDILSSSNGDEASSNGLQVLNDELSMESEVSSSENTEVIEAPNSMGEAKKKRKIESESETNDNPESSIGFIRSPCEGLRSRGKRKATCETSLKHTETSDEEKKPIAKRLKKTPKACSGSRQQEVPTTTHPNRCYLEGCKMTFESKAKLQTHKRNRCTHEGCGKKFRAHKYLVLHQRVHKDERPFECSWKGCSMTFKWQWARTEHLRLHTGERPYICKVDGCGLSFRFVSDYSRHRRKTMHYVT

SEQ ID NO: 88651 - protein, 1106 aa, Arabidopsis thaliana
  peptide (1)..(1106): Ceres Seq. ID no. 12711322
  misc_feature (47)..(156): Pfam Name: jmjC domain Pfam Description: jmjC domain
  misc_feature (9)..(381): Homolog of NCBI NO: 22331694 NR Description: similar to zinc finger protein - like; protein
  misc_feature (995)..(1105): Homolog of NCBI NO: 22331694 NR Description: similar to zinc finger protein - like; protein
  misc_feature (413)..(516): Homolog of NCBI NO: 22331694 NR Description: similar to zinc finger protein - like; protein
  misc_feature (9)..(381): Homolog of NCBI NO: 7488434 NR Description: zinc finger protein T29H11.50 - Arabidopsis >gi|4678345|emb|CAB41155.1| putative zinc finger protein
  misc_feature (995)..(1105): Homolog of NCBI NO: 7488434 NR Description: zinc finger protein T29H11.50 - Arabidopsis >gi|4678345|emb|CAB41155.1| putative zinc finger protein
  misc_feature (413)..(516): Homolog of NCBI NO: 7488434 NR Description: zinc finger protein T29H11.50 - Arabidopsis >gi|4678345|emb|CAB41155.1| putative zinc finger protein
  misc_feature (808)..(1105): Homolog of NCBI NO: 20804883 NR Description: putative zinc finger protein [Oryza sativa
  misc_feature (15)..(272): Homolog of NCBI NO: 20804883 NR Description: putative zinc finger protein [Oryza sativa
  misc_feature (381)..(633): Homolog of NCBI NO: 20804883 NR Description: putative zinc finger protein [Oryza sativa
  misc_feature (1)..(229): Homolog of NCBI NO: 15237976 NR Description: putative protein; protein id: At5g46910.1 thaliana] >gi|9759433|dbj|BAB10230.1|
MDIVDEMEGTAGWKLSNSSWNLQMIARSPGSVTRFMPDDIPGVTSPMVYIGMLFSWFAWHVEDHELHSMNYLHTGSPKTWYAVPCDYALDFEEVIRKNSYGRNIDQLAALTQLGEKTTLVSPEMIVASGIPCCRLVQNPGEFVVTFPRSYHVGFSHGFNCGEAANFGTPQWLNVAKEAAVRRAAMNYLPMLSHQQLLYLLTMSFVSRQVTMVSLSYNLVPRSLLPGGRSSRLRDRQREEREFLVKRAFVEDILNENKNLSVLLREPGSRLVMWDPDLLPRHSALALAAAGVAGASAVSPPAVAKKELEEGHSELQNKEKTSLLEELSLFMEKLNDVYYDDDDGLLNDFQVDTGTLPCVACGVLGFPFMSVVQPSEKALKDLSERQGETDAQEIMTLSSEKSDCEWKTSSRYIRPRIFCLEHTIELQRLLQSRGGLKFLVICHKDFQKFKAHAAIVAEEVKVPFSYDDVLLESASQEELSLIDLAIEDEEKYEHSVDWTSELGINLRYCVKVRKNSPTKKIQHALSLGGLFSDTSQMLDFTTIRWLQRKSRSKAKPSSTSSFTPCEHLEVKADGKLRDNLDSQTGKKEEKIIQYSRKKKLNPKPSAEQVQELATLAKSKDFDKTCKNFSSRSHLDSAIRSEMNSEIGDSGRVIGVSFSINPCSSSFTVGHGQEHPEITVKFGSDLDGNVTNSLSMVNGDSADLTLTSISREQHQGHSMTSNNNGSNSGSHVVASQTILVSTGDNHDGPRKLSGDYVCSDVSVRGIQEAVEMSDQEFGEPRSTVTNIEDEQQSQIVKPTQREAVFGDHEQVEGAEAVSTRENLCSEIILHTEHSSAHVGMEIPDINTASENLVVDMTHDGEPLESSDILSSSNGDEASSNGLQVLNDELSMESEVSSSENTEVIEAPNSMGEAKKKRKIESESETNDNPESSIGFIRSPCEGLRSRGKRKATCETSLKHTETSDEEKKPIAKRLKKTPKACSGSRQQEVPTTTHPNRCYLEGCKMTFESKAKLQTHKRNRCTHEGCGKKFRAHKYLVLHQRVHKDERPFECSWKGCSMTFKWQWARTEHLRLHTGERPYICKVDGCGLSFRFVSDYSRHRRKTMHYVT

SEQ ID NO: 88652 - protein, 1100 aa, Arabidopsis thaliana
  peptide (1)..(1100): Ceres Seq. ID no. 12711323
  misc_feature (41)..(150): Pfam Name: jmjC domain Pfam Description: jmjC domain
  misc_feature (3)..(375): Homolog of NCBI NO: 22331694 NR Description: similar to zinc finger protein - like; protein
  misc_feature (989)..(1099): Homolog of NCBI NO: 22331694 NR Description: similar to zinc finger protein - like; protein
  misc_feature (407)..(510): Homolog of NCBI NO: 22331694 NR Description: similar to zinc finger protein - like; protein
  misc_feature (3)..(375): Homolog of NCBI NO: 7488434 NR Description: zinc finger protein T29H11.50 - Arabidopsis >gi|4678345|emb|CAB41155.1| putative zinc finger protein
  misc_feature (989)..(1099): Homolog of NCBI NO: 7488434 NR Description: zinc finger protein T29H11.50 - Arabidopsis >gi|4678345|emb|CAB41155.1| putative zinc finger protein
  misc_feature (407)..(510): Homolog of NCBI NO: 7488434 NR Description: zinc finger protein T29H11.50 - Arabidopsis >gi|4678345|emb|CAB41155.1| putative zinc finger protein
  misc_feature (802)..(1099): Homolog of NCBI NO: 20804883 NR Description: putative zinc finger protein [Oryza sativa
  misc_feature (9)..(266): Homolog of NCBI NO: 20804883 NR Description: putative zinc finger protein [Oryza sativa
  misc_feature (375)..(627): Homolog of NCBI NO: 20804883 NR Description: putative zinc finger protein [Oryza sativa
  misc_feature (1)..(223): Homolog of NCBI NO: 15237976 NR Description: putative protein; protein id: At5g46910.1 thaliana] >gi|9759433|dbj|BAB10230.1|
MEGTAGWKLSNSSWNLQMIARSPGSVTRFMPDDIPGVTSPMVYIGMLFSWFAWHVEDHELHSMNYLHTGSPKTWYAVPCDYALDFEEVIRKNSYGRNIDQLAALTQLGEKTTLVSPEMIVASGIPCCRLVQNPGEFVVTFPRSYHVGFSHGFNCGEAANFGTPQWLNVAKEAAVRRAAMNYLPMLSHQQLLYLLTMSFVSRQVTMVSLSYNLVPRSLLPGGRSSRLRDRQREEREFLVKRAFVEDILNENKNLSVLLREPGSRLVMWDPDLLPRHSALALAAAGVAGASAVSPPAVAKKELEEGHSELQNKEKTSLLEELSLFMEKLNDVYYDDDDGLLNDFQVDTGTLPCVACGVLGFPFMSVVQPSEKALKDLSERQGETDAQEIMTLSSEKSDCEWKTSSRYIRPRIFCLEHTIELQRLLQSRGGLKFLVICHKDFQKFKAHAAIVAEEVKVPFSYDDVLLESASQEELSLIDLAIEDEEKYEHSVDWTSELGINLRYCVKVRKNSPTKKIQHALSLGGLFSDTSQMLDFTTIRWLQRKSRSKAKPSSTSSFTPCEHLEVKADGKLRDNLDSQTGKKEEKIIQYSRKKKLNPKPSAEQVQELATLAKSKDFDKTCKNFSSRSHLDSAIRSEMNSEIGDSGRVIGVSFSINPCSSSFTVGHGQEHPEITVKFGSDLDGNVTNSLSMVNGDSADLTLTSISREQHQGHSMTSNNNGSNSGSHVVASQTILVSTGDNHDGPRKLSGDYVCSDVSVRGIQEAVEMSDQEFGEPRSTVTNIEDEQQSQIVKPTQREAVFGDHEQVEGAEAVSTRENLCSEIILHTEHSSAHVGMEIPDINTASENLVVDMTHDGEPLESSDILSSSNGDEASSNGLQVLNDELSMESEVSSSENTEVIEAPNSMGEAKKKRKIESESETNDNPESSIGFIRSPCEGLRSRGKRKATCETSLKHTETSDEEKKPIAKRLKKTPKACSGSRQQEVPTTTHPNRCYLEGCKMTFESKAKLQTHKRNRCTHEGCGKKFRAHKYLVLHQRVHKDERPFECSWKGCSMTFKWQWARTEHLRLHTGERPYICKVDGCGLSFRFVSDYSRHRRKTMHYVT

SEQ ID NO: 88653 - DNA, 1257 bp, Arabidopsis thaliana
  misc_feature (1)..(1257): Ceres Seq. ID no. 12711324
  misc_feature: MA Experiment ID: 108462 Result: Down-regulated in Transcription
  misc_feature: MA Experiment 108462 PARAMETER Experiment Name: At_Germinating_Seeds_cDNA_P Parameter: Age (day) Value: 2 vs. 0
  misc_feature: MA Experiment 108462 PARAMETER Experiment Name: At_Germinating_Seeds_cDNA_P Parameter: Tissue Value: Germinating Seeds
  misc_feature: MA Experiment ID: 108464 Result: Down-regulated in Transcription
  misc_feature: MA Experiment 108464 PARAMETER Experiment Name: At_Germinating_Seeds_cDNA_P Parameter: Age (day) Value: 4 vs. 0
  misc_feature: MA Experiment 108464 PARAMETER Experiment Name: At_Germinating_Seeds_cDNA_P Parameter: Tissue Value: Germinating Seeds
  misc_feature: MA Experiment ID: 20000224 Result: Down-regulated in Transcription
  misc_feature: MA Experiment ID: 20001911 Result: Up-regulated in Transcription
  misc_feature: MA Experiment 20001911 PARAMETER Experiment Name: At_Drought_Reproduction_P Parameter: Age (day) Value: 40
  misc_feature: MA Experiment 20001911 PARAMETER Experiment Name: At_Drought_Reproduction_P Parameter: Organism Value: A. thaliana
  misc_feature: MA Experiment 20001911 PARAMETER Experiment Name: At_Drought_Reproduction_P Parameter: Plant Line Value: WS
  misc_feature: MA Experiment 20001911 PARAMETER Experiment Name: At_Drought_Reproduction_P Parameter: Timepoint (day) Value: 10
  misc_feature: MA Experiment 20001911 PARAMETER Experiment Name: At_Drought_Reproduction_P Parameter: Tissue Value: Flowers
  misc_feature: MA Experiment 20001911 PARAMETER Experiment Name: At_Drought_Reproduction_P Parameter: Treatment Value: Drought vs. No Drought
ttttagggtttcttcgtgccattgatattttgagaggcgaaggaaacaatacgattcagagagagacgagtgaaaatggctgcaaaagaaggtagtaggatttttgtcggtggtttatcgccggaagtgacagatagagaccttgaaagagcttttagccgcttcggagacattctcgattgtcagatcatgctggaaagagatactggtcgttcacgtggattcgggtttatcacttttgctgatcgccgcgctatggatgagtccatcagagagatgcatggaagggactttggtgatcgggtcatctcagtgaacagagctgaaccaaaactggggcgagatgatggagaaagtcatggctctagaggtggcagagacagtggctactcgattgctggaaaaggaagctttggtggaggtggaggtggaggtgggcgtgttggtgaagatgaatgcttcaagtgtggacgggttgggcactgggcccgtgattgtccttctgctggtggtggtcgtggaggacctgttggtggtttttcttcacgtgctagtgcgtatggaggatctgatggacgtgttgaccgctatgctgaccgtgaccgctatgtggaccgcgaacgatacatagatgatcgatacgacggtgctgcacgctatggtgctagagacaggtttgacagcagagaagcctacataccccgtgatcgatacgccagtgacaggtatgcagccccggctgatcggtttgcaggtggtgatagatacagccgtggatcagaccgttatcctccagggagctatgacaaagctcggtcctttgagagagacatagccccgagtgcaggcagtgacaggtacggtggtggtagagctggtggtcccatccgtggaggaggagaggagggaagagggtttagaagcagagccggtgctccttatgagagaccgagcagaagtggtggtggtggagcttatccgtcgtcgtccacttttgaccgttattaagacacattaatgaaagaaagtgagaatgatgcttggttagagctctatacactcagtcgtgtgtgttgcttgtggtaatgaatatctctgtaagcgttataggtgtaaaagacttgtcttttttatttatatatgattagtttgcggacctgtttagctttgtattttgatcctttattatttttggtttgttttggaccataacatgacttttgagcttcgtcagtcaatgttaaaccttgcacacat

SEQ ID NO: 88654 - protein, 310 aa, Arabidopsis thaliana; identical to SEQ ID NO: 22430
  peptide (1)..(310): Ceres Seq. ID no. 12711325
  misc_feature (9)..(80): Pfam Name: RNA recognition motif. (a.k.a. RRM, RBD, or RNP domain) Pfam Description: RNA recognition motif. (a.k.a. RRM, RBD, or RNP
  misc_feature (1)..(310): Homolog of NCBI NO: 15237666 NR Description: glycine-rich RNA-binding protein; protein id:
  misc_feature (1)..(295): Homolog of NCBI NO: 33146923 NR Description: glycine-rich RNA-binding protein-like [Oryza
  misc_feature (7)..(293): Homolog of NCBI NO: 18406831 NR Description: glycine-rich RNA-binding protein; protein id: supported by cDNA: 42847. [Arabidopsis thaliana]
  misc_feature (8)..(248): Homolog of NCBI NO: 15231557 NR Description: glycine-rich RNA-binding protein; protein id: supported by cDNA: gi_15451065, supported by cDNA: gi_15982738, by cDNA: gi_15983476, supported by cDNA: gi_18377411 [Arabidopsis
  misc_feature (1)..(200): Homolog of NCBI NO: 40714682 NR Description: putative RNA binding protein [Oryza sativa
  misc_feature (1)..(189): Homolog of NCBI NO: 12659074 NR Description: RNA-binding protein [Triticum aestivum]
  misc_feature (125)..(310): Homolog of NCBI NO: 21954079 NR Description: putative RNA binding protein [Arabidopsis
  misc_feature (3)..(215): Homolog of NCBI NO: 2129944 NR Description: RNA-binding protein RZ-1 - wood tobacco
  misc_feature (8)..(167): Homolog of NCBI NO: 15235002 NR Description: glycine-rich RNA-binding protein 8 (GRP8); id: At4g39260.1, supported by cDNA: gi_166838 [Arabidopsis
  misc_feature (8)..(167): Homolog of NCBI NO: 1346180 NR Description: Glycine-rich RNA-binding protein GRP1A

SEQ ID NO: 88655 - protein, 272 aa, Arabidopsis thaliana; identical to SEQ ID NO: 22431
  peptide (1)..(272): Ceres Seq. ID no. 12711326
  misc_feature (1)..(272): Homolog of NCBI NO: 15237666 NR Description: glycine-rich RNA-binding protein; protein id:
  misc_feature (1)..(257): Homolog of NCBI NO: 33146923 NR Description: glycine-rich RNA-binding protein-like [Oryza
  misc_feature (1)..(255): Homolog of NCBI NO: 18406831 NR Description: glycine-rich RNA-binding protein; protein id: supported by cDNA: 42847. [Arabidopsis thaliana]
  misc_feature (1)..(210): Homolog of NCBI NO: 15231557 NR Description: glycine-rich RNA-binding protein; protein id: supported by cDNA: gi_15451065, supported by cDNA: gi_15982738, by cDNA: gi_15983476, supported by cDNA: gi_18377411 [Arabidopsis
  misc_feature (1)..(162): Homolog of NCBI NO: 40714682 NR Description: putative RNA binding protein [Oryza sativa
  misc_feature (1)..(151): Homolog of NCBI NO: 12659074 NR Description: RNA-binding protein [Triticum aestivum]
  misc_feature (87)..(272): Homolog of NCBI NO: 21954079 NR Description: putative RNA binding protein [Arabidopsis
  misc_feature (1)..(177): Homolog of NCBI NO: 2129944 NR Description: RNA-binding protein RZ-1 - wood tobacco
  misc_feature (1)..(129): Homolog of NCBI NO: 15235002 NR Description: glycine-rich RNA-binding protein 8 (GRP8); id: At4g39260.1, supported by cDNA: gi_166838 [Arabidopsis
  misc_feature (1)..(129): Homolog of NCBI NO: 1346180 NR Description: Glycine-rich RNA-binding protein GRP1A

SEQ ID NO: 88656 - protein, 250 aa, Arabidopsis thaliana; identical to SEQ ID NO: 22432
  peptide (1)..(250): Ceres Seq. ID no. 12711327
  misc_feature (1)..(250): Homolog of NCBI NO: 15237666 NR Description: glycine-rich RNA-binding protein; protein id:
  misc_feature (1)..(235): Homolog of NCBI NO: 33146923 NR Description: glycine-rich RNA-binding protein-like [Oryza
  misc_feature (1)..(233): Homolog of NCBI NO: 18406831 NR Description: glycine-rich RNA-binding protein; protein id: supported by cDNA: 42847. [Arabidopsis thaliana]
  misc_feature (1)..(188): Homolog of NCBI NO: 15231557 NR Description: glycine-rich RNA-binding protein; protein id: supported by cDNA: gi_15451065, supported by cDNA: gi_15982738, by cDNA: gi_15983476, supported by cDNA: gi_18377411 [Arabidopsis
  misc_feature (1)..(140): Homolog of NCBI NO: 40714682 NR Description: putative RNA binding protein [Oryza sativa
  misc_feature (1)..(129): Homolog of NCBI NO: 12659074 NR Description: RNA-binding protein [Triticum aestivum]
  misc_feature (65)..(250): Homolog of NCBI NO: 21954079 NR Description: putative RNA binding protein [Arabidopsis
  misc_feature (1)..(155): Homolog of NCBI NO: 2129944 NR Description: RNA-binding protein RZ-1 - wood tobacco
  misc_feature (1)..(107): Homolog of NCBI NO: 15235002 NR Description: glycine-rich RNA-binding protein 8 (GRP8); id: At4g39260.1, supported by cDNA: gi_166838 [Arabidopsis
  misc_feature (1)..(107): Homolog of NCBI NO: 1346180 NR Description: Glycine-rich RNA-binding protein GRP1A

SEQ ID NO: 88657 - DNA, 2793 bp, Arabidopsis thaliana
  misc_feature (1)..(2793): Ceres Seq. ID no. 12711399
  misc_feature: MA Experiment ID: 20000184 Result: Down-regulated in Transcription
  misc_feature: MA Experiment 20000184 PARAMETER Experiment Name: At_Shoots__P Parameter: Age (day) Value: 7
  misc_feature: MA Experiment 20000184 PARAMETER Experiment Name: At_Shoots__P Parameter: Tissue Value: Shoots vs. Whole Plant
  misc_feature: MA Experiment ID: 20001451 Result: Up-regulated in Transcription
  misc_feature: MA Experiment 20001451 PARAMETER Experiment Name: At_Far-red-induction_P Parameter: Age (day) Value: 7
  misc_feature: MA Experiment 20001451 PARAMETER Experiment Name: At_Far-red-induction_P Parameter: Light Value: Far-red vs. White
  misc_feature: MA Experiment 20001451 PARAMETER Experiment Name: At_Far-red-induction_P Parameter: Organism Value: A. thaliana
  misc_feature: MA Experiment 20001451 PARAMETER Experiment Name: At_Far-red-induction_P Parameter: Plant Line Value: Columbia
  misc_feature: MA Experiment 20001451 PARAMETER Experiment Name: At_Far-red-induction_P Parameter: Timepoint (hr) Value: 24
  misc_feature: MA Experiment 20001451 PARAMETER Experiment Name: At_Far-red-induction_P Parameter: Tissue Value: Whole Plant
atggagggagcgtgttgtcgctctctgctccacacttcccttactccgccaccattctccgacgtcactctccggtggcttccatatctttctcccttaagcaaccaccaccgcaaccaccagaacctcctgagagtcctcctgacctccgccgcccggagaaatctattgattaatccactcaagggtttaaccaatcgctcttctgtgtctcctcttgttcaatcagaggtttcgagtaaagtttcttcctttggctcctctctagcatccaagctacgtttgtccagcaagctctctcctcctcctcctcctccacctccgcctcctgttgaggaaaccacccaattccgagatgagtttcggagtgacacgaaaccaccggaagaagaaactcgaaacccgcaacaggaattccgacaagaagggaagatattcgttggtaatttaccgacatggataaagaaaccagagtttgaagagttcttccgacagttcggaccgatagagaatgtgattctaatcaaaggacatcacgaggtcgagaaaaacgcgggatttgggttcattatttacgcggcagagaagtctgcaatgaaagctgtggagttcgacggcgttgagtttcacggcaggatattgacggtgaagctagacgacggaaagaggctgaaaacaaaggctgaacagagagtgaggtgggtagaggaaggagaagaagacacgaaaatgtctaataagtcgtcgtggcatcaagagagagaagggtctcgaaagtcactacagaggattttagataccaatggagataactggcaagctgttatttcagctttcgagaagatcagcaagccttcgaggacagagtttggtttgatggtgaagttctatggaagaagaggggatatgcatcgtgcacgtgagacttttgagagaatgcgcgcgaggggtatcacaccaacatcacgtatatacacaagccttattcacgcttatgcagttggtagagacatggacgaagcactgtcttgtgttcgtaaaatgaaggaagaaggaattgagatgagtttggtgacttatagtgtaatcgttggaggattctctaaagcgggacatgccgaagctgcagattactggtttgacgaggccaaacggatacacaaaacccttaatgccagtatatatggaaaaatcatatatgcacactgtcagacgtgcaatatggagcgggcagaggcattggtgagggagatggaagaagaaggtattgatgctcctattgctatctaccacaccatgatggatggttatacaatggtcgctgatgagaagaaaggcttagttgttttcaaaagacttaaggaatgtggatttactccaacagttgttacttatgggtgcctcattaatctttatactaaggttggaaagatttcaaaagccttggaagttagtagagtgatgaaggaagagggcgtaaagcataatttaaagacttattcgatgatgattaacggatttgtaaaactaaaagattgggccaatgcgtttgctgtatttgaagatatggtaaaagaaggcatgaaaccagatgttatactatacaacaacatcatctcagcattctgcgggatgggtaacatggatcgagcgatccagactgttaaggagatgcaaaagctgaggcatagaccaaccacacggacatttatgcctatcatacatggatatgcgaaatccggagacatgaggagatcactagaagtttttgatatgatgagacgatgtgggtgtgttccaaccgttcatactttcaatggtttgattaatggtttagttgagaaacgtcagatggaaaaggcggttgagatattagacgagatgacattggcgggtgtaagtgcaaacgaacatacttacacaaagatcatgcaaggctatgcatcagtcggtgataccggaaaagcctttgagtattttacaaggcttcaaaacgaaggtttggatgttgacattttcacttacgaggcgttacttaaagcttgctgcaaatcaggaagaatgcagagcgcattagctgtcacgaaagaaatgagtgcacggaatatcccgcgcaattccttcgtctataacatattaatcgacggatgggcacgaagaggcgatgtatgggaagccgcggatttgatacagcagatgaaaaaagaaggtgttaaacccgacattcatacttacacatccttcattagcgcttgttctaaggccggcgacatgaatagagctacacaaacaatcgaagaaatggaagcactaggtgtgaaacctaacatcaagacatacacgaccttaataaaaggatgggcgagagcatctcttccagagaaagccttaagttgctacgaggaaatgaaggcgatggggataaaacccgacaaagctgtgtatcattgccttctgacttcgcttctgtcgcgtgcttcaatcgcagaagcttacatttactcaggagtgatgactatctgcaaggaaatggtggaggcaggcttgattgttgatatgggaactgcggttcactggtctaaatgtctgtgtaagattgaagcttcaggtggtgagctcactgagacgttgcagaagactttcccacctgattggagctcgcatcatcatcaccatggcttcttagatcaagtttctgatgttgactccgatgaagatgatgttgatggtgaagatggtgaggacgatgaagatgttaactctgtttcggatttattatcaccttacaagtaa

SEQ ID NO: 88658 - protein, 930 aa, Arabidopsis thaliana
  peptide (1)..(930): Ceres Seq. ID no. 12711400
  misc_feature (145)..(216): Pfam Name: RNA recognition motif. (a.k.a. RRM, RBD, or RNP domain) Pfam Description: RNA recognition motif. (a.k.a. RRM, RBD, or RNP
  misc_feature (376)..(930): Homolog of NCBI NO: 18414702 NR Description: putative protein; protein id: At5g04810.1
  misc_feature (502)..(890): Homolog of NCBI NO: 7489198 NR Description: salt-inducible protein, membrane-associated -
  misc_feature (292)..(846): Homolog of NCBI NO: 34902570 NR Description: Putative indole-3-acetate
  misc_feature (325)..(824): Homolog of NCBI NO: 34906814 NR Description: similar to membrane-associated salt-inducible
  misc_feature (281)..(811): Homolog of NCBI NO: 34902570 NR Description: Putative indole-3-acetate
  misc_feature (310)..(852): Homolog of NCBI NO: 30840221 NR Description: fertility restorer [Raphanus sativus]
  misc_feature (310)..(852): Homolog of NCBI NO: 30840327 NR Description: fertility restorer homologue [Raphanus sativus]
  misc_feature (311)..(838): Homolog of NCBI NO: 34394343 NR Description: putative fertility restorer homologue [Oryza
  misc_feature (325)..(828): Homolog of NCBI NO: 15221610 NR Description: hypothetical protein; protein id: At1g62860.1
  misc_feature (320)..(855): Homolog of NCBI NO: 15221282 NR Description: hypothetical protein; protein id: At1g12300.1
MEGACCRSLLHTSLTPPPFSDVTLRWLPYLSPLSNHHRNHQNLLRVLLTSAARRNLLINPLKGLTNRSSVSPLVQSEVSSKVSSFGSSLASKLRLSSKLSPPPPPPPPPPVEETTQFRDEFRSDTKPPEEETRNPQQEFRQEGKIFVGNLPTWIKKPEFEEFFRQFGPIENVILIKGHHEVEKNAGFGFIIYAAEKSAMKAVEFDGVEFHGRILTVKLDDGKRLKTKAEQRVRWVEEGEEDTKMSNKSSWHQEREGSRKSLQRILDTNGDNWQAVISAFEKISKPSRTEFGLMVKFYGRRGDMHRARETFERMRARGITPTSRIYTSLIHAYAVGRDMDEALSCVRKMKEEGIEMSLVTYSVIVGGFSKAGHAEAADYWFDEAKRIHKTLNASIYGKIIYAHCQTCNMERAEALVREMEEEGIDAPIAIYHTMMDGYTMVADEKKGLVVFKRLKECGFTPTVVTYGCLINLYTKVGKISKALEVSRVMKEEGVKHNLKTYSMMINGFVKLKDWANAFAVFEDMVKEGMKPDVILYNNIISAFCGMGNMDRAIQTVKEMQKLRHRPTTRTFMPIIHGYAKSGDMRRSLEVFDMMRRCGCVPTVHTFNGLINGLVEKRQMEKAVEILDEMTLAGVSANEHTYTKIMQGYASVGDTGKAFEYFTRLQNEGLDVDIFTYEALLKACCKSGRMQSALAVTKEMSARNIPRNSFVYNILIDGWARRGDVWEAADLIQQMKKEGVKPDIHTYTSFISACSKAGDMNRATQTIEEMEALGVKPNIKTYTTLIKGWARASLPEKALSCYEEMKAMGIKPDKAVYHCLLTSLLSRASIAEAYIYSGVMTICKEMVEAGLIVDMGTAVHWSKCLCKIEASGGELTETLQKTFPPDWSSHHHHHGFLDQVSDVDSDEDDVDGEDGEDDEDVNSVSDLLSPYK

SEQ ID NO: 88659 - protein, 732 aa, Arabidopsis thaliana; identical to SEQ ID NO: 85077
  peptide (1)..(732): Ceres Seq. ID no. 12711401
  misc_feature (370)..(404): Pfam Name: PPR repeat Pfam Description: PPR repeat
  misc_feature (178)..(732): Homolog of NCBI NO: 18414702 NR Description: putative protein; protein id: At5g04810.1
  misc_feature (304)..(692): Homolog of NCBI NO: 7489198 NR Description: salt-inducible protein, membrane-associated -
  misc_feature (94)..(648): Homolog of NCBI NO: 34902570 NR Description: Putative indole-3-acetate
  misc_feature (127)..(626): Homolog of NCBI NO: 34906814 NR Description: similar to membrane-associated salt-inducible
  misc_feature (83)..(613): Homolog of NCBI NO: 34902570 NR Description: Putative indole-3-acetate
  misc_feature (112)..(654): Homolog of NCBI NO: 30840221 NR Description: fertility restorer [Raphanus sativus]
  misc_feature (112)..(654): Homolog of NCBI NO: 30840327 NR Description: fertility restorer homologue [Raphanus sativus]
  misc_feature (113)..(640): Homolog of NCBI NO: 34394343 NR Description: putative fertility restorer homologue [Oryza
  misc_feature (127)..(630): Homolog of NCBI NO: 15221610 NR Description: hypothetical protein; protein id: At1g62860.1
  misc_feature (122)..(657): Homolog of NCBI NO: 15221282 NR Description: hypothetical protein; protein id: At1g12300.1

SEQ ID NO: 88660 - protein, 687 aa, Arabidopsis thaliana; identical to SEQ ID NO: 85078
  peptide (1)..(687): Ceres Seq. ID no. 12711402
  misc_feature (325)..(359): Pfam Name: PPR repeat Pfam Description: PPR repeat
  misc_feature (133)..(687): Homolog of NCBI NO: 18414702 NR Description: putative protein; protein id: At5g04810.1
  misc_feature (259)..(647): Homolog of NCBI NO: 7489198 NR Description: salt-inducible protein, membrane-associated -
  misc_feature (49)..(603): Homolog of NCBI NO: 34902570 NR Description: Putative indole-3-acetate
  misc_feature (82)..(581): Homolog of NCBI NO: 34906814 NR Description: similar to membrane-associated salt-inducible
  misc_feature (38)..(568): Homolog of NCBI NO: 34902570 NR Description: Putative indole-3-acetate
  misc_feature (67)..(609): Homolog of NCBI NO: 30840221 NR Description: fertility restorer [Raphanus sativus]
  misc_feature (67)..(609): Homolog of NCBI NO: 30840327 NR Description: fertility restorer homologue [Raphanus sativus]
  misc_feature (68)..(595): Homolog of NCBI NO: 34394343 NR Description: putative fertility restorer homologue [Oryza
  misc_feature (82)..(585): Homolog of NCBI NO: 15221610 NR Description: hypothetical protein; protein id: At1g62860.1
  misc_feature (77)..(612): Homolog of NCBI NO: 15221282 NR Description: hypothetical protein; protein id: At1g12300.1

SEQ ID NO: 88661 - DNA, 1663 bp, Arabidopsis thaliana
  misc_feature (1)..(1663): Ceres Seq. ID no. 12711421
  misc_feature: MA Experiment ID: 108579 Result: Down-regulated in Transcription
  misc_feature: MA Experiment 108579 PARAMETER Experiment Name: At_4deg_Cold_cDNA_P Parameter: Temperature (deg C) Value: 4 vs. 22
  misc_feature: MA Experiment 108579 PARAMETER Experiment Name: At_4deg_Cold_cDNA_P Parameter: Timepoint (hr) Value: 6
  misc_feature: MA Experiment 108579 PARAMETER Experiment Name: At_4deg_Cold_cDNA_P Parameter: Tissue Value: Aerial
gtcatcattatctctatctaataaatggcgttacaaaggcaactcctgaagagagctacttccgatatctatcaccgccgtgcgatctctctcctccgtactgatttctctacttctccttcgattgctgatgctccgccgcacattccgccgttcgttcaccagccacggccgtataaaggtccttccgccgatgaggttttacagaaacggaagaagtttctcggaccttctcttttccactactaccagaagcctcttaacatcgttgaagggaagatgcagtacttgtatgatgagagtggtaggcgatatctggatgcctttgctggaatagtcactgtgtcgtgcggtcactgccatccggatattcttaatgcgattacggaacagagcaagctacttcagcacgcgactactatttacctgcatcatgccattggtgattttgctgaagcattggctgccaagatgcccggaaatcttaaggttgtgtactttgtgaattctggctcagaagctaatgagctagcaatgatgatggctaggctttacactggtagccttgagatgatttccttgagaaatgcttatcatggtggaagttccaatactattggactaactgctcttaacacatggaagtacccattacctcagggggaaatccatcacgtagtaaatccagatccataccgtggagtttttggctctgatggttctctttatgctaaagatgttcatgaccacatcgagtatggtacctctggaaaagtagctggatttatcgcagagaccatccagggggtcggaggagctgtagaattggctcctggttacttaaagtcggtttatgaaattgttcgcaacgctggtggtgtatgcattgctgatgaagtccaaactggatttgggcgaacaggaagccactattggggtttccagactcaagatgtggttcctgacatagtcacaatggcaaagggaattggaaatggattgccattaggagctgtggtgactacaccagaaatcgcaagtgttttagctagcaagattctgttcaacacttttggtgggaacccggtttgttcagctggtggacttgcggttctaaacgttattgataaggagaaacgccaagaacattgtgctgaagttggttcacaccttatacaacgtttgaaagatgtgcagaaaagacatgatatcattggagacgtgagaggaagagggttaatggttgggattgagcttgtgagtgaccggaaagacaagacaccagccaaggctgaaacatctgtcttgtttgagcaacttagagaacttggcattctcgtcggaaaaggaggacttcatgggaacgttttcaggataaagccaccaatgtgtttcactaaagatgatgcagatttcttggtagatgcattggactattccatctccaggttgtgaacaaggatgaaacaaagccaacgagagtttttaaccatatgaaccgttttaatgtttccgcgtctttgtaacgaaaaccaagccaagtctcatctcctttgatttcagaataaataaataaaatttatttatttctcagtgttgctatgacataatacaaatacattagaaaagcccaattatttttgttttctttgttaaaattccc

SEQ ID NO: 88662 - protein, 476 aa, Arabidopsis thaliana
  peptide (1)..(476): Ceres Seq. ID no. 12711422
  misc_feature (69)..(476): Pfam Name: Aminotransferase class-III Pfam Description: Aminotransferase class-III
  misc_feature (1)..(476): Homolog of NCBI NO: 18420498 NR Description: putative protein; protein id: At4g39660.1, by cDNA: gi_15809991, supported by cDNA: gi_5731258 [Arabidopsis >gi|15809992|gb|AAL06923.1| AT4g39660/T19P19_50 [Arabidopsis
  misc_feature (1)..(476): Homolog of NCBI NO: 5731259 NR Description: alanine:glyoxylate aminotransferase 2 homolog
  misc_feature (39)..(476): Homolog of NCBI NO: 15231974 NR Description: putative aminotransferase; protein id: supported by cDNA: gi_20466699 [Arabidopsis thaliana] putative aminotransferase [Arabidopsis thaliana]
  misc_feature (3)..(476): Homolog of NCBI NO: 15224499 NR Description: putative beta-alanine-pyruvate aminotransferase; id: At2g38400.1, supported by cDNA: 147543., supported by cDNA: supported by cDNA: gi_5731260 [Arabidopsis thaliana]
  misc_feature (3)..(476): Homolog of NCBI NO: 15028237 NR Description: putative beta-alanine-pyruvate aminotransferase
  misc_feature (232)..(474): Homolog of NCBI NO: 16198011 NR Description: LD24726p [Drosophila melanogaster]
  misc_feature (232)..(474): Homolog of NCBI NO: 28574759 NR Description: CG11241-PA [Drosophila melanogaster]
  misc_feature (1)..(229): Homolog of NCBI NO: 16198011 NR Description: LD24726p [Drosophila melanogaster]
  misc_feature (1)..(229): Homolog of NCBI NO: 28574759 NR Description: CG11241-PA [Drosophila melanogaster]
  misc_feature (132)..(466): Homolog of NCBI NO: 7434175 NR Description: hypothetical protein T19P19.50 - Arabidopsis >gi|3080435|emb|CAA18752.1| putative protein [Arabidopsis >gi|7270950|emb|CAB80629.1| putative protein [Arabidopsis
MALQRQLLKRATSDIYHRRAISLLRTDFSTSPSIADAPPHIPPFVHQPRPYKGPSADEVLQKRKKFLGPSLFHYYQKPLNIVEGKMQYLYDESGRRYLDAFAGIVTVSCGHCHPDILNAITEQSKLLQHATTIYLHHAIGDFAEALAAKMPGNLKVVYFVNSGSEANELAMMMARLYTGSLEMISLRNAYHGGSSNTIGLTALNTWKYPLPQGEIHHVVNPDPYRGVFGSDGSLYAKDVHDHIEYGTSGKVAGFIAETIQGVGGAVELAPGYLKSVYEIVRNAGGVCIADEVQTGFGRTGSHYWGFQTQDVVPDIVTMAKGIGNGLPLGAVVTTPEIASVLASKILFNTFGGNPVCSAGGLAVLNVIDKEKRQEHCAEVGSHLIQRLKDVQKRHDIIGDVRGRGLMVGIELVSDRKDKTPAKAETSVLFEQLRELGILVGKGGLHGNVFRIKPPMCFTKDDADFLVDALDYSISRL

SEQ ID NO: 88663 - protein, 391 aa, Arabidopsis thaliana
  peptide (1)..(391): Ceres Seq. ID no. 12711423
  misc_feature (1)..(391): Pfam Name: Aminotransferase class-III Pfam Description: Aminotransferase class-III
  misc_feature (1)..(391): Homolog of NCBI NO: 18420498 NR Description: putative protein; protein id: At4g39660.1, by cDNA: gi_15809991, supported by cDNA: gi_5731258 [Arabidopsis >gi|15809992|gb|AAL06923.1| AT4g39660/T19P19_50 [Arabidopsis
  misc_feature (1)..(391): Homolog of NCBI NO: 5731259 NR Description: alanine:glyoxylate aminotransferase 2 homolog
  misc_feature (1)..(391): Homolog of NCBI NO: 15231974 NR Description: putative aminotransferase; protein id: supported by cDNA: gi_20466699 [Arabidopsis thaliana] putative aminotransferase [Arabidopsis thaliana]
  misc_feature (1)..(391): Homolog of NCBI NO: 15224499 NR Description: putative beta-alanine-pyruvate aminotransferase; id: At2g38400.1, supported by cDNA: 147543., supported by cDNA: supported by cDNA: gi_5731260 [Arabidopsis thaliana]
  misc_feature (1)..(391): Homolog of NCBI NO: 15028237 NR Description: putative beta-alanine-pyruvate aminotransferase
  misc_feature (147)..(389): Homolog of NCBI NO: 16198011 NR Description: LD24726p [Drosophila melanogaster]
  misc_feature (147)..(389): Homolog of NCBI NO: 28574759 NR Description: CG11241-PA [Drosophila melanogaster]
  misc_feature (1)..(144): Homolog of NCBI NO: 16198011 NR Description: LD24726p [Drosophila melanogaster]
  misc_feature (1)..(144): Homolog of NCBI NO: 28574759 NR Description: CG11241-PA [Drosophila melanogaster]
  misc_feature (47)..(381): Homolog of NCBI NO: 7434175 NR Description: hypothetical protein T19P19.50 - Arabidopsis >gi|3080435|emb|CAA18752.1| putative protein [Arabidopsis >gi|7270950|emb|CAB80629.1| putative protein [Arabidopsis
MQYLYDESGRRYLDAFAGIVTVSCGHCHPDILNAITEQSKLLQHATTIYLHHAIGDFAEALAAKMPGNLKVVYFVNSGSEANELAMMMARLYTGSLEMISLRNAYHGGSSNTIGLTALNTWKYPLPQGEIHHVVNPDPYRGVFGSDGSLYAKDVHDHIEYGTSGKVAGFIAETIQGVGGAVELAPGYLKSVYEIVRNAGGVCIADEVQTGFGRTGSHYWGFQTQDVVPDIVTMAKGIGNGLPLGAVVTTPEIASVLASKILFNTFGGNPVCSAGGLAVLNVIDKEKRQEHCAEVGSHLIQRLKDVQKRHDIIGDVRGRGLMVGIELVSDRKDKTPAKAETSVLFEQLRELGILVGKGGLHGNVFRIKPPMCFTKDDADFLVDALDYSISRL

SEQ ID NO: 88664 - protein, 327 aa, Arabidopsis thaliana
  peptide (1)..(327): Ceres Seq. ID no. 12711424
  misc_feature (1)..(327): Pfam Name: Aminotransferase class-III Pfam Description: Aminotransferase class-III
  misc_feature (1)..(327): Homolog of NCBI NO: 18420498 NR Description: putative protein; protein id: At4g39660.1, by cDNA: gi_15809991, supported by cDNA: gi_5731258 [Arabidopsis >gi|15809992|gb|AAL06923.1| AT4g39660/T19P19_50 [Arabidopsis
  misc_feature (1)..(327): Homolog of NCBI NO: 5731259 NR Description: alanine:glyoxylate aminotransferase 2 homolog
  misc_feature (1)..(327): Homolog of NCBI NO: 15231974 NR Description: putative aminotransferase; protein id: supported by cDNA: gi_20466699 [Arabidopsis thaliana] putative aminotransferase [Arabidopsis thaliana]
  misc_feature (1)..(327): Homolog of NCBI NO: 15224499 NR Description: putative beta-alanine-pyruvate aminotransferase; id: At2g38400.1, supported by cDNA: 147543., supported by cDNA: supported by cDNA: gi_5731260 [Arabidopsis thaliana]
  misc_feature (1)..(327): Homolog of NCBI NO: 15028237 NR Description: putative beta-alanine-pyruvate aminotransferase
  misc_feature (83)..(325): Homolog of NCBI NO: 16198011 NR Description: LD24726p [Drosophila melanogaster]
  misc_feature (83)..(325): Homolog of NCBI NO: 28574759 NR Description: CG11241-PA [Drosophila melanogaster]
  misc_feature (1)..(80): Homolog of NCBI NO: 16198011 NR Description: LD24726p [Drosophila melanogaster]
  misc_feature (1)..(80): Homolog of NCBI NO: 28574759 NR Description: CG11241-PA [Drosophila melanogaster]
  misc_feature (1)..(317): Homolog of NCBI NO: 7434175 NR Description: hypothetical protein T19P19.50 - Arabidopsis >gi|3080435|emb|CAA18752.1| putative protein [Arabidopsis >gi|7270950|emb|CAB80629.1| putative protein [Arabidopsis
MPGNLKVVYFVNSGSEANELAMMMARLYTGSLEMISLRNAYHGGSSNTIGLTALNTWKYPLPQGEIHHVVNPDPYRGVFGSDGSLYAKDVHDHIEYGTSGKVAGFIAETIQGVGGAVELAPGYLKSVYEIVRNAGGVCIADEVQTGFGRTGSHYWGFQTQDVVPDIVTMAKGIGNGLPLGAVVTTPEIASVLASKILFNTFGGNPVCSAGGLAVLNVIDKEKRQEHCAEVGSHLIQRLKDVQKRHDIIGDVRGRGLMVGIELVSDRKDKTPAKAETSVLFEQLRELGILVGKGGLHGNVFRIKPPMCFTKDDADFLVDALDYSISRL

SEQ ID NO: 88665 - DNA, 1944 bp, Arabidopsis thaliana
  misc_feature (1)..(1944): Ceres Seq. ID no. 12711432
atgggtcattcgatattggagaaaatgggatgttcaaactcgaaagcatcgatgaataagaagaacgagccgcttcatctatgcaaagaaaggaagagatttgtcaaacaagctatggattccagatgtgctttagccgctgcacacgtgtcttacatccgttcactccgtaacatcggagcttgtcttcgtcaatacgcggaggcggagactgctcatgaatcatctccgtcgttaaccgccactgagcctgagaaatctccttctcataactcctcttaccctgacgattcggttgactcgccactgagtcataactcgaatccaaaccctaaccctaaaccccttttcaatctaagttacatgaagacggagacggctagttctactgtgactttcactattaaccctctgagcgacggtgatgacgatctggaagtgacaatgccggcgttttctcctcctcctccgccgcgtcctcgccggccagagacgtcttcttgggactatttcgacacttgtgacgattttgatagctttagatttgtagggctaagtgaacaaaccgagattgatagtgaatgtgatgcagcagttataggattagagaagattactagtcaagggaatgtagcaaaatctggttcagagacattgcaagactcgagttttaaaacaaagcagaggaaacagagttgtgaagataatgatgaaagagaagatccatcggagtttatcacacatagagccaaagactttgtgtcgagtatgaaagatatagaacataagttctttagagcttctgaatctggaagagaagtttcaagaatgcttgaagttaacaaaatcagagtcggattcgccgatatgacagctttgaagcgagcttgttgtagagggaaaagttattcaccagtttctcaagagccattgagtcatcaagttactaaagtcattgtgtggaagagaacatcgtcgtcaagatcctccacttctagaaatccgttgatccagacatcaaaagaagatcacgatgatgaaagtggaagtgatttcatcgaagagttttgtatgatctcaggaagtcactcttcttcgcttgatcggttatacgcttgggagagaaaactctatgatgaagtcaaggcgagtgagatgattaggaaagagtatgatcgaaaatgcgagcagctaaggaaccaattcgcaaaggatcacagtgctaaatcgatggataaaacaagagcagctgctaaagatcttcattcaagaatcagagtcgcgattcaatctgttgaatcgatttcaaagcggattgagagaatcagagacgatgagctccacccacagctcttagagtttcttcaagggttgataagaatgtggaaagcgatgcttgaatgtcatcatacacagtacattaccatttcattggcttaccattgtcgacattcctccaaaacagcacacgaaagtgtccttaagaggcggattttggcggagcttctagaagaaacagagtgttttggtctaagctttgtagatttggttcacagtatggcttcttatgtggaagctctgaatggttggcttcacaactgtgtcttgctccctcaagaacgttctacaagaaaccgaagaccatggtccccacgtcgtgtcctggctccaccgatattcgtgctgtgtcgggactggtctgcagggatcaaaacactgccgtctgatgaacttagcgggtcaatcaaggggttttccttggatatggagatgttgggggaagaaaaaggcggttcactgttggtttcggatttgtcgagtgtgcattcgagtttggcgaagcttctagagagattaaaaaagttttcggaagcttctttaaaaatgtatgaagatgtaaaggtgaaaagtgaagcagctagagttgcttacactaataaataa

SEQ ID NO: 88666 - protein, 647 aa, Arabidopsis thaliana
  peptide (1)..(647): Ceres Seq. ID no. 12711433
  misc_feature (254)..(593): Pfam Name: Protein of unknown function (DUF632) Pfam Description: Protein of unknown function (DUF632)
  misc_feature (251)..(589): Homolog of NCBI NO: 15225846 NR Description: hypothetical protein; protein id: At2g27090.1
  misc_feature (9)..(259): Homolog of NCBI NO: 15225846 NR Description: hypothetical protein; protein id: At2g27090.1
  misc_feature (240)..(647): Homolog of NCBI NO: 22324428 NR Description: hypothetical protein~predicted by GeneMark.hmm
  misc_feature (8)..(89): Homolog of NCBI NO: 22324428 NR Description: hypothetical protein~predicted by GeneMark.hmm
  misc_feature (235)..(643): Homolog of NCBI NO: 15234640 NR Description: putative protein; protein id: At4g30130.1, by cDNA: gi_15810478 [Arabidopsis thaliana]
  misc_feature (9)..(282): Homolog of NCBI NO: 15234640 NR Description: putative protein; protein id: At4g30130.1, by cDNA: gi_15810478 [Arabidopsis thaliana]
  misc_feature (151)..(631): Homolog of NCBI NO: 32526673 NR Description: bzip-like transcription factor-like protein
  misc_feature (23)..(88): Homolog of NCBI NO: 32526673 NR Description: bzip-like transcription factor-like protein
  misc_feature (319)..(596): Homolog of NCBI NO: 15219083 NR Description: putative bzip-like transcription factor; protein At1g21740.1 [Arabidopsis thaliana] >gi|25518309|pir||A86351
  misc_feature (9)..(99): Homolog of NCBI NO: 15219083 NR Description: putative bzip-like transcription factor; protein At1g21740.1 [Arabidopsis thaliana] >gi|25518309|pir||A86351
MGHSILEKMGCSNSKASMNKKNEPLHLCKERKRFVKQAMDSRCALAAAHVSYIRSLRNIGACLRQYAEAETAHESSPSLTATEPEKSPSHNSSYPDDSVDSPLSHNSNPNPNPKPLFNLSYMKTETASSTVTFTINPLSDGDDDLEVTMPAFSPPPPPRPRRPETSSWDYFDTCDDFDSFRFVGLSEQTEIDSECDAAVIGLEKITSQGNVAKSGSETLQDSSFKTKQRKQSCEDNDEREDPSEFITHRAKDFVSSMKDIEHKFFRASESGREVSRMLEVNKIRVGFADMTALKRACCRGKSYSPVSQEPLSHQVTKVIVWKRTSSSRSSTSRNPLIQTSKEDHDDESGSDFIEEFCMISGSHSSSLDRLYAWERKLYDEVKASEMIRKEYDRKCEQLRNQFAKDHSAKSMDKTRAAAKDLHSRIRVAIQSVESISKRIERIRDDELHPQLLEFLQGLIRMWKAMLECHHTQYITISLAYHCRHSSKTAHESVLKRRILAELLEETECFGLSFVDLVHSMASYVEALNGWLHNCVLLPQERSTRNRRPWSPRRVLAPPIFVLCRDWSAGIKTLPSDELSGSIKGFSLDMEMLGEEKGGSLLVSDLSSVHSSLAKLLERLKKFSEASLKMYEDVKVKSEAARVAYTNK

SEQ ID NO: 88667 - protein, 639 aa, Arabidopsis thaliana
  peptide (1)..(639): Ceres Seq. ID no. 12711434
  misc_feature (246)..(585): Pfam Name: Protein of unknown function (DUF632) Pfam Description: Protein of unknown function (DUF632)
  misc_feature (243)..(581): Homolog of NCBI NO: 15225846 NR Description: hypothetical protein; protein id: At2g27090.1
  misc_feature (1)..(251): Homolog of NCBI NO: 15225846 NR Description: hypothetical protein; protein id: At2g27090.1
  misc_feature (232)..(639): Homolog of NCBI NO: 22324428 NR Description: hypothetical protein~predicted by GeneMark.hmm
  misc_feature (1)..(81): Homolog of NCBI NO: 22324428 NR Description: hypothetical protein~predicted by GeneMark.hmm
  misc_feature (227)..(635): Homolog of NCBI NO: 15234640 NR Description: putative protein; protein id: At4g30130.1, by cDNA: gi_15810478 [Arabidopsis thaliana]
  misc_feature (1)..(274): Homolog of NCBI NO: 15234640 NR Description: putative protein; protein id: At4g30130.1, by cDNA: gi_15810478 [Arabidopsis thaliana]
  misc_feature (143)..(623): Homolog of NCBI NO: 32526673 NR Description: bzip-like transcription factor-like protein
  misc_feature (15)..(80): Homolog of NCBI NO: 32526673 NR Description: bzip-like transcription factor-like protein
  misc_feature (311)..(588): Homolog of NCBI NO: 15219083 NR Description: putative bzip-like transcription factor; protein At1g21740.1 [Arabidopsis thaliana] >gi|25518309|pir||A86351
  misc_feature (1)..(91): Homolog of NCBI NO: 15219083 NR Description: putative bzip-like transcription factor; protein At1g21740.1 [Arabidopsis thaliana] >gi|25518309|pir||A86351
MGCSNSKASMNKKNEPLHLCKERKRFVKQAMDSRCALAAAHVSYIRSLRNIGACLRQYAEAETAHESSPSLTATEPEKSPSHNSSYPDDSVDSPLSHNSNPNPNPKPLFNLSYMKTETASSTVTFTINPLSDGDDDLEVTMPAFSPPPPPRPRRPETSSWDYFDTCDDFDSFRFVGLSEQTEIDSECDAAVIGLEKITSQGNVAKSGSETLQDSSFKTKQRKQSCEDNDEREDPSEFITHRAKDFVSSMKDIEHKFFRASESGREVSRMLEVNKIRVGFADMTALKRACCRGKSYSPVSQEPLSHQVTKVIVWKRTSSSRSSTSRNPLIQTSKEDHDDESGSDFIEEFCMISGSHSSSLDRLYAWERKLYDEVKASEMIRKEYDRKCEQLRNQFAKDHSAKSMDKTRAAAKDLHSRIRVAIQSVESISKRIERIRDDELHPQLLEFLQGLIRMWKAMLECHHTQYITISLAYHCRHSSKTAHESVLKRRILAELLEETECFGLSFVDLVHSMASYVEALNGWLHNCVLLPQERSTRNRRPWSPRRVLAPPIFVLCRDWSAGIKTLPSDELSGSIKGFSLDMEMLGEEKGGSLLVSDLSSVHSSLAKLLERLKKFSEASLKMYEDVKVKSEAARVAYTNK

SEQ ID NO: 88668 - protein, 630 aa, Arabidopsis thaliana
  peptide (1)..(630): Ceres Seq. ID no. 12711435
  misc_feature (237)..(576): Pfam Name: Protein of unknown function (DUF632) Pfam Description: Protein of unknown function (DUF632)
  misc_feature (234)..(572): Homolog of NCBI NO: 15225846 NR Description: hypothetical protein; protein id: At2g27090.1
  misc_feature (1)..(242): Homolog of NCBI NO: 15225846 NR Description: hypothetical protein; protein id: At2g27090.1
  misc_feature (223)..(630): Homolog of NCBI NO: 22324428 NR Description: hypothetical protein~predicted by GeneMark.hmm
  misc_feature (1)..(72): Homolog of NCBI NO: 22324428 NR Description: hypothetical protein~predicted by GeneMark.hmm
  misc_feature (218)..(626): Homolog of NCBI NO: 15234640 NR Description: putative protein; protein id: At4g30130.1, by cDNA: gi_15810478 [Arabidopsis thaliana]
  misc_feature (1)..(265): Homolog of NCBI NO: 15234640 NR Description: putative protein; protein id: At4g30130.1, by cDNA: gi_15810478 [Arabidopsis thaliana]
  misc_feature (134)..(614): Homolog of NCBI NO: 32526673 NR Description: bzip-like transcription factor-like protein
  misc_feature (6)..(71): Homolog of NCBI NO: 32526673 NR Description: bzip-like transcription factor-like protein
  misc_feature (302)..(579): Homolog of NCBI NO: 15219083 NR Description: putative bzip-like transcription factor; protein At1g21740.1 [Arabidopsis thaliana] >gi|25518309|pir||A86351
  misc_feature (1)..(82): Homolog of NCBI NO: 15219083 NR Description: putative bzip-like transcription factor; protein At1g21740.1 [Arabidopsis thaliana] >gi|25518309|pir||A86351
MNKKNEPLHLCKERKRFVKQAMDSRCALAAAHVSYIRSLRNIGACLRQYAEAETAHESSPSLTATEPEKSPSHNSSYPDDSVDSPLSHNSNPNPNPKPLFNLSYMKTETASSTVTFTINPLSDGDDDLEVTMPAFSPPPPPRPRRPETSSWDYFDTCDDFDSFRFVGLSEQTEIDSECDAAVIGLEKITSQGNVAKSGSETLQDSSFKTKQRKQSCEDNDEREDPSEFITHRAKDFVSSMKDIEHKFFRASESGREVSRMLEVNKIRVGFADMTALKRACCRGKSYSPVSQEPLSHQVTKVIVWKRTSSSRSSTSRNPLIQTSKEDHDDESGSDFIEEFCMISGSHSSSLDRLYAWERKLYDEVKASEMIRKEYDRKCEQLRNQFAKDHSAKSMDKTRAAAKDLHSRIRVAIQSVESISKRIERIRDDELHPQLLEFLQGLIRMWKAMLECHHTQYITISLAYHCRHSSKTAHESVLKRRILAELLEETECFGLSFVDLVHSMASYVEALNGWLHNCVLLPQERSTRNRRPWSPRRVLAPPIFVLCRDWSAGIKTLPSDELSGSIKGFSLDMEMLGEEKGGSLLVSDLSSVHSSLAKLLERLKKFSEASLKMYEDVKVKSEAARVAYTNK

SEQ ID NO: 88669 - DNA, 1913 bp, Arabidopsis thaliana
  misc_feature (1)..(1913): Ceres Seq. ID no. 12711436
  misc_feature: MA Experiment ID: 108434 Result: Up-regulated in Transcription
  misc_feature: MA Experiment 108434 PARAMETER Experiment Name: At_Root_Tips_cDNA_P Parameter: Tissue Value: Root Tips
  misc_feature: MA Experiment ID: 108462 Result: Up-regulated in Transcription
  misc_feature: MA Experiment 108462 PARAMETER Experiment Name: At_Germinating_Seeds_cDNA_P Parameter: Age (day) Value: 2 vs. 0
  misc_feature: MA Experiment 108462 PARAMETER Experiment Name: At_Germinating_Seeds_cDNA_P Parameter: Tissue Value: Germinating Seeds
  misc_feature: MA Experiment ID: 108464 Result: Up-regulated in Transcription
  misc_feature: MA Experiment 108464 PARAMETER Experiment Name: At_Germinating_Seeds_cDNA_P Parameter: Age (day) Value: 4 vs. 0
  misc_feature: MA Experiment 108464 PARAMETER Experiment Name: At_Germinating_Seeds_cDNA_P Parameter: Tissue Value: Germinating Seeds
  misc_feature: MA Experiment ID: 108501 Result: Up-regulated in Transcription
  misc_feature: MA Experiment 108501 PARAMETER Experiment Name: At_ap2_floral_buds_cDNA_P Parameter: Plant Line Value: ap2 (Ler.)
  misc_feature: MA Experiment 108501 PARAMETER Experiment Name: At_ap2_floral_buds_cDNA_P Parameter: Tissue Value: Closed Flower
  misc_feature: MA Experiment ID: 108561 Result: Down-regulated in Transcription
  misc_feature: MA Experiment 108561 PARAMETER Experiment Name: At_100uM_ABA_cDNA_P Parameter: Timepoint (hr) Value: 6
  misc_feature: MA Experiment 108561 PARAMETER Experiment Name: At_100uM_ABA_cDNA_P Parameter: Tissue Value: Aerial
  misc_feature: MA Experiment 108561 PARAMETER Experiment Name: At_100uM_ABA_cDNA_P Parameter: Treatment Value: 100uM ABA vs. No Treatment
  misc_feature: MA Experiment ID: 108569 Result: Up-regulated in Transcription
  misc_feature: MA Experiment 108569 PARAMETER Experiment Name: At_0.001%_MeJA__cDNA_P Parameter: Timepoint (hr) Value: 6
  misc_feature: MA Experiment 108569 PARAMETER Experiment Name: At_0.001%_MeJA__cDNA_P Parameter: Tissue Value: Aerial
  misc_feature: MA Experiment 108569 PARAMETER Experiment Name: At_0.001%_MeJA__cDNA_P Parameter: Treatment Value: 0.001% MeJA vs. No Treatment
  misc_feature: MA Experiment ID: 108577 Result: Up-regulated in Transcription
  misc_feature: MA Experiment 108577 PARAMETER Experiment Name: At_42deg_Heat_cDNA_P Parameter: Temperature (deg C) Value: 42 vs. 22
  misc_feature: MA Experiment 108577 PARAMETER Experiment Name: At_42deg_Heat_cDNA_P Parameter: Timepoint (hr) Value: 6
  misc_feature: MA Experiment 108577 PARAMETER Experiment Name: At_42deg_Heat_cDNA_P Parameter: Tissue Value: Aerial
  misc_feature: MA Experiment ID: 108579 Result: Up-regulated in Transcription
  misc_feature: MA Experiment 108579 PARAMETER Experiment Name: At_4deg_Cold_cDNA_P Parameter: Temperature (deg C) Value: 4 vs. 22
  misc_feature: MA Experiment 108579 PARAMETER Experiment Name: At_4deg_Cold_cDNA_P Parameter: Timepoint (hr) Value: 6
  misc_feature: MA Experiment 108579 PARAMETER Experiment Name: At_4deg_Cold_cDNA_P Parameter: Tissue Value: Aerial
  misc_feature: MA Experiment ID: 108605 Result: Down-regulated in Transcription
  misc_feature: MA Experiment 108605 PARAMETER Experiment Name: At_100uM_ABA_cDNA_P Parameter: Timepoint (hr) Value: 6
  misc_feature: MA Experiment 108605 PARAMETER Experiment Name: At_100uM_ABA_cDNA_P Parameter: Tissue Value: Aerial
  misc_feature: MA Experiment 108605 PARAMETER Experiment Name: At_100uM_ABA_cDNA_P Parameter: Treatment Value: 100uM ABA vs. No Treatment
  misc_feature: MA Experiment ID: 20000071 Result: Down-regulated in Transcription
  misc_feature: MA Experiment 20000071 PARAMETER Experiment Name: At_100uM_ABA_Mutants_cDNA_P Parameter: Plant Line Value: CS8104
  misc_feature: MA Experiment 20000071 PARAMETER Experiment Name: At_100uM_ABA_Mutants_cDNA_P Parameter: Timepoint (hr) Value: 6
  misc_feature: MA Experiment 20000071 PARAMETER Experiment Name: At_100uM_ABA_Mutants_cDNA_P Parameter: Tissue Value: Aerial
  misc_feature: MA Experiment 20000071 PARAMETER Experiment Name: At_100uM_ABA_Mutants_cDNA_P Parameter: Treatment Value: 100uM ABA vs. No Treatment
  misc_feature: MA Experiment ID: 20000086 Result: Down-regulated in Transcription
  misc_feature: MA Experiment 20000086 PARAMETER Experiment Name: At_100uM_ABA_Mutants_cDNA_P Parameter: Plant Line Value: CS22
  misc_feature: MA Experiment 20000086 PARAMETER Experiment Name: At_100uM_ABA_Mutants_cDNA_P Parameter: Timepoint (hr) Value: 6
  misc_feature: MA Experiment 20000086 PARAMETER Experiment Name: At_100uM_ABA_Mutants_cDNA_P Parameter: Tissue Value: Aerial
  misc_feature: MA Experiment 20000086 PARAMETER Experiment Name: At_100uM_ABA_Mutants_cDNA_P Parameter: Treatment Value: 100uM ABA vs. No Treatment
  misc_feature: MA Experiment ID: 20000093 Result: Up-regulated in Transcription
  misc_feature: MA Experiment 20000093 PARAMETER Experiment Name: At_42deg_Heat_cDNA_P Parameter: Temperature (deg C) Value: 42 vs. 22
  misc_feature: MA Experiment 20000093 PARAMETER Experiment Name: At_42deg_Heat_cDNA_P Parameter: Timepoint (hr) Value: 0.5
  misc_feature: MA Experiment 20000093 PARAMETER Experiment Name: At_42deg_Heat_cDNA_P Parameter: Tissue Value: Aerial
  misc_feature: MA Experiment ID: 20000117 Result: Down-regulated in Transcription
  misc_feature: MA Experiment 20000117 PARAMETER Experiment Name: At_100uM_ABA_Mutants_cDNA_P Parameter: Plant Line Value: Columbia
  misc_feature: MA Experiment 20000117 PARAMETER Experiment Name: At_100uM_ABA_Mutants_cDNA_P Parameter: Timepoint (hr) Value: 6
  misc_feature: MA Experiment 20000117 PARAMETER Experiment Name: At_100uM_ABA_Mutants_cDNA_P Parameter: Tissue Value: Aerial
  misc_feature: MA Experiment 20000117 PARAMETER Experiment Name: At_100uM_ABA_Mutants_cDNA_P Parameter: Treatment Value: 100uM ABA vs. No Treatment
  misc_feature: MA Experiment ID: 20000169 Result: Down-regulated in Transcription
  misc_feature: MA Experiment 20000169 PARAMETER Experiment Name: At_100uM_ABA_P Parameter: Age (day) Value: 14
  misc_feature: MA Experiment 20000169 PARAMETER Experiment Name: At_100uM_ABA_P Parameter: Organism Value: A. thaliana
  misc_feature: MA Experiment 20000169 PARAMETER Experiment Name: At_100uM_ABA_P Parameter: Plant Line Value: WS
  misc_feature: MA Experiment 20000169 PARAMETER Experiment Name: At_100uM_ABA_P Parameter: Timepoint (hr) Value: 6
  misc_feature: MA Experiment 20000169 PARAMETER Experiment Name: At_100uM_ABA_P Parameter: Tissue Value: Aerial
  misc_feature: MA Experiment 20000169 PARAMETER Experiment Name: At_100uM_ABA_P Parameter: Treatment Value: 100uM ABA vs. No Treatment
  misc_feature: MA Experiment ID: 20000184 Result: Up-regulated in Transcription
  misc_feature: MA Experiment 20000184 PARAMETER Experiment Name: At_Shoots__P Parameter: Age (day) Value: 7
  misc_feature: MA Experiment 20000184 PARAMETER Experiment Name: At_Shoots__P Parameter: Tissue Value: Shoots vs. Whole Plant
  misc_feature: MA Experiment ID: 20000227 Result: Up-regulated in Transcription
  misc_feature: MA Experiment 20000227 PARAMETER Experiment Name: At_Root-Tips-vs-Tops_P Parameter: Tissue Value: Root Tips vs. Root Tops
  misc_feature: MA Experiment ID: 20000234 Result: Up-regulated in Transcription
  misc_feature: MA Experiment 20000234 PARAMETER Experiment Name: At_Siliques_P Parameter: Age (day) Value: 21
  misc_feature: MA Experiment 20000234 PARAMETER Experiment Name: At_Siliques_P Parameter: Organism Value: A. thaliana
  misc_feature: MA Experiment 20000234 PARAMETER Experiment Name: At_Siliques_P Parameter: Plant Line Value: WS
  misc_feature: MA Experiment 20000234 PARAMETER Experiment Name: At_Siliques_P Parameter: Tissue Value: Less Than 5mm Siliques vs. Whole Plant
  misc_feature: MA Experiment ID: 20000269 Result: Up-regulated in Transcription
  misc_feature: MA Experiment 20000269 PARAMETER Experiment Name: At_1mM_KNO3_L-vs-H_Roots_P Parameter: Age (day) Value: 7,10,12
  misc_feature: MA Experiment 20000269 PARAMETER Experiment Name: At_1mM_KNO3_L-vs-H_Roots_P Parameter: Organism Value: A. thaliana
  misc_feature: MA Experiment 20000269 PARAMETER Experiment Name: At_1mM_KNO3_L-vs-H_Roots_P Parameter: Plant Line Value: WS
  misc_feature: MA Experiment 20000269 PARAMETER Experiment Name: At_1mM_KNO3_L-vs-H_Roots_P Parameter: Timepoint (day) Value: 7,10,12
  misc_feature: MA Experiment 20000269 PARAMETER Experiment Name: At_1mM_KNO3_L-vs-H_Roots_P Parameter: Tissue Value: Roots
  misc_feature: MA Experiment 20000269 PARAMETER Experiment Name: At_1mM_KNO3_L-vs-H_Roots_P Parameter: Treatment Value: 1mM KNO3 vs. 50mM KNO3
  misc_feature: MA Experiment ID: 20000438 Result: Up-regulated in Transcription
  misc_feature: MA Experiment 20000438 PARAMETER Experiment Name: At_Shoots__P Parameter: Age (day) Value: 14
  misc_feature: MA Experiment 20000438 PARAMETER Experiment Name: At_Shoots__P Parameter: Tissue Value: Shoots vs. Whole Plant
  misc_feature: MA Experiment ID: 20000441 Result: Down-regulated in Transcription
  misc_feature: MA Experiment 20000441 PARAMETER Experiment Name: At_1uM_BR-BRZ__P Parameter: Tissue Value: Shoot Apices
  misc_feature: MA Experiment 20000441 PARAMETER Experiment Name: At_1uM_BR-BRZ__P Parameter: Treatment Value: 1uM BR vs. No Treatment
  misc_feature: MA Experiment ID: 20000573 Result: Down-regulated in Transcription
  misc_feature: MA Experiment 20000573 PARAMETER Experiment Name: At_100uM_ABA_Mutants__P Parameter: Organism Value: A. thaliana
  misc_feature: MA Experiment 20000573 PARAMETER Experiment Name: At_100uM_ABA_Mutants__P Parameter: Plant Line Value: CS22 vs. Ler wt
  misc_feature: MA Experiment 20000573 PARAMETER Experiment Name: At_100uM_ABA_Mutants__P Parameter: Timepoint (hr) Value: N/A
  misc_feature: MA Experiment 20000573 PARAMETER Experiment Name: At_100uM_ABA_Mutants__P Parameter: Tissue Value: Whole Plant
  misc_feature: MA Experiment 20000573 PARAMETER Experiment Name: At_100uM_ABA_Mutants__P Parameter: Treatment Value: None
  misc_feature: MA Experiment ID: 20000574 Result: Down-regulated in Transcription
  misc_feature: MA Experiment 20000574 PARAMETER Experiment Name: At_100uM_ABA_Mutants__P Parameter: Organism Value: A. thaliana
  misc_feature: MA Experiment 20000574 PARAMETER Experiment Name: At_100uM_ABA_Mutants__P Parameter: Plant Line Value: CS23 vs. Ler wt
  misc_feature: MA Experiment 20000574 PARAMETER Experiment Name: At_100uM_ABA_Mutants__P Parameter: Timepoint (hr) Value: N/A
  misc_feature: MA Experiment 20000574 PARAMETER Experiment Name: At_100uM_ABA_Mutants__P Parameter: Tissue Value: Whole Plant
  misc_feature: MA Experiment 20000574 PARAMETER Experiment Name: At_100uM_ABA_Mutants__P Parameter: Treatment Value: None
  misc_feature: MA Experiment ID: 20000794 Result: Down-regulated in Transcription
  misc_feature: MA Experiment 20000794 PARAMETER Experiment Name: At_Petals_P Parameter: Age (day) Value: 23-25 days
  misc_feature: MA Experiment 20000794 PARAMETER Experiment Name: At_Petals_P Parameter: Plant Line Value: WS
  misc_feature: MA Experiment 20000794 PARAMETER Experiment Name: At_Petals_P Parameter: Tissue Value: Petals vs. Whole plant
  misc_feature: MA Experiment ID: 20001248 Result: Down-regulated in Transcription
  misc_feature: MA Experiment 20001248 PARAMETER Experiment Name: At_Far-red-induction_P Parameter: Age (day) Value: 7
  misc_feature: MA Experiment 20001248 PARAMETER Experiment Name: At_Far-red-induction_P Parameter: Light Value: Far-red vs. White
  misc_feature: MA Experiment 20001248 PARAMETER Experiment Name: At_Far-red-induction_P Parameter: Organism Value: A. thaliana
  misc_feature: MA Experiment 20001248 PARAMETER Experiment Name: At_Far-red-induction_P Parameter: Plant Line Value: Columbia
  misc_feature: MA Experiment 20001248 PARAMETER Experiment Name: At_Far-red-induction_P Parameter: Timepoint (hr) Value: 4
  misc_feature: MA Experiment 20001248 PARAMETER Experiment Name: At_Far-red-induction_P Parameter: Tissue Value: Whole Plant
  misc_feature: MA Experiment ID: 20001450 Result: Down-regulated in Transcription
  misc_feature: MA Experiment 20001450 PARAMETER Experiment Name: At_Far-red-induction_P Parameter: Age (day) Value: 7
  misc_feature: MA Experiment 20001450 PARAMETER Experiment Name: At_Far-red-induction_P Parameter: Light Value: Far-red vs. White
  misc_feature: MA Experiment 20001450 PARAMETER Experiment Name: At_Far-red-induction_P Parameter: Organism Value: A. thaliana
  misc_feature: MA Experiment 20001450 PARAMETER Experiment Name: At_Far-red-induction_P Parameter: Plant Line Value: Columbia
  misc_feature: MA Experiment 20001450 PARAMETER Experiment Name: At_Far-red-induction_P Parameter: Timepoint (hr) Value: 8
  misc_feature: MA Experiment 20001450 PARAMETER Experiment Name: At_Far-red-induction_P Parameter: Tissue Value: Whole Plant
  misc_feature: MA Experiment ID: 20001451 Result: Down-regulated in Transcription
  misc_feature: MA Experiment 20001451 PARAMETER Experiment Name: At_Far-red-induction_P Parameter: Age (day) Value: 7
  misc_feature: MA Experiment 20001451 PARAMETER Experiment Name: At_Far-red-induction_P Parameter: Light Value: Far-red vs. White
  misc_feature: MA Experiment 20001451 PARAMETER Experiment Name: At_Far-red-induction_P Parameter: Organism Value: A. thaliana
  misc_feature: MA Experiment 20001451 PARAMETER Experiment Name: At_Far-red-induction_P Parameter: Plant Line Value: Columbia
  misc_feature: MA Experiment 20001451 PARAMETER Experiment Name: At_Far-red-induction_P Parameter: Timepoint (hr) Value: 24
  misc_feature: MA Experiment 20001451 PARAMETER Experiment Name: At_Far-red-induction_P Parameter: Tissue Value: Whole Plant
  misc_feature: MA Experiment ID: 20001757 Result: Down-regulated in Transcription
  misc_feature: MA Experiment 20001757 PARAMETER Experiment Name: At_50mM_NH4NO3_L-to-H_P Parameter: Timepoint (hr) Value: 6
  misc_feature: MA Experiment 20001757 PARAMETER Experiment Name: At_50mM_NH4NO3_L-to-H_P Parameter: Tissue Value: Leaf
  misc_feature: MA Experiment 20001757 PARAMETER Experiment Name: At_50mM_NH4NO3_L-to-H_P Parameter: Treatment Value: 50mM NH4NO3 vs 100mM Mannitol
  misc_feature: MA Experiment ID: 20001911 Result: Down-regulated in Transcription
  misc_feature: MA Experiment 20001911 PARAMETER Experiment Name: At_Drought_Reproduction_P Parameter: Age (day) Value: 40
  misc_feature: MA Experiment 20001911 PARAMETER Experiment Name: At_Drought_Reproduction_P Parameter: Organism Value: A. thaliana
  misc_feature: MA Experiment 20001911 PARAMETER Experiment Name: At_Drought_Reproduction_P Parameter: Plant Line Value: WS
  misc_feature: MA Experiment 20001911 PARAMETER Experiment Name: At_Drought_Reproduction_P Parameter: Timepoint (day) Value: 10
  misc_feature: MA Experiment 20001911 PARAMETER Experiment Name: At_Drought_Reproduction_P Parameter: Tissue Value: Flowers
  misc_feature: MA Experiment 20001911 PARAMETER Experiment Name: At_Drought_Reproduction_P Parameter: Treatment Value: Drought vs. No Drought
acaaaactcacaccccaaaaccgatccaaattccgagaaagacaaccaaattttccttttcctctgcaaaaatgtttattgagagcttcaaagttgagagcccgaacgtgaagtacacagagaatgagattcactctgtgtacgattacgagacgacggaggttgttcatgagaagaccgtcaatggcacttaccaatggattgtgaagccaaagactgtcaaatacgatttcaaaaccgatattcgtgtccccaaattaggggttatgcttgtgggtttgggaggaaacaatggatcaactctcaccgctggtgtgattgcgaacaaagaaggaatctcgtgggcaacgaaggacaaagtgcaacaagcgaattacttcgggtcactaactcaagcttcatcgattcgtgtcggatcttttaacggtgaagagatctatgctcctttcaagagtctccttccaatggtgaatccggatgatgttgtgtttggaggatgggatataagtgacatgaacttagcagatgccatggctagagccagggttcttgatatcgacttgcagaaacagctcaggccttacatggagaacattgtgccactccctgggatcttcgatcctgatttcatagctgctaatcaagggtcacgtgctaaccacgtgatcaaaggtaccaagaaggaacaagtcgaccacatcatcaaggacatgagggagtttaaggagaagaataaggtggataaggttgtggttctctggacggctaacacagagcgttatagcaatgtggtcgttgggatgaacgatacaatggagaatctcatggagtctgtggatagggatgaggctgagatctctccttcaacactttatgcgattgcttgtgttcttgagggaatcccgttcatcaatggaagccctcaaaacacctttgttccaggtctaattgatatggcgatcaggaacaatgttttgatcggtggagatgatttcaagagtggtcaaaccaagatgaaatctgtcttggttgatttcctagttggcgcaggaatcaagcctacttcaattgtgagctacaatcacttgggaaacaacgatggaatgaatctctcagctccacagactttcagatctaaggagatctccaaaagcaatgtcgtggacgatatggttgctagcaatggtatcctctttgagcctggggaacacccggaccatgttgttgtcatcaagtatgtaccgtatgttgcggatagtaagcgagccatggacgagtacacatcagagatattcatgggagggaagaacacaattgtgatgcacaatacctgcgaggactctctcttagctgctccaatcatcttggatcttgttctcctcgcggagctcagcaccaggatccagttcaaatccgagggagagggaaagtttcactctttccatcctgtggccaccatactcagctacctcaccaaggcaccacttgtaccgccgggaactccggtgattaacgcactgtcgaagcagcgggctatgctggagaatattatgagggcgtgcgttggactggctccggagaacaacatgatcatggaattcaagtgaacatgaagaagcatgaatctaagacctttaattagctcataatttaagagtctttaatttgtgtcgttgtttggtttttatataatgtttttaaattatgaaagcttgtgtttctgagagaccaaagagcttttagtttggtctctgtagggtgtgaagtaacttgtatttgtagtaatccggatgggttggtatattttgcaagtgtgtctaggttggaccataatttcaatatctcttatgattttgtttcatatgtttgtaaaacagcttatcttttgagatatataatcatggttttggttc

SEQ ID NO: 88670 - protein, 534 aa, Arabidopsis thaliana; identical to SEQ ID NO: 26151
  peptide (1)..(534): Ceres Seq. ID no. 12711437
  misc_feature (85)..(519): Pfam Name: Myo-inositol-1-phosphate synthase Pfam Description: Myo-inositol-1-phosphate synthase
  misc_feature (24)..(534): Homolog of NCBI NO: 15236025 NR Description: myo-inositol-1-phosphate synthase; protein id: supported by cDNA: 1978., supported by cDNA: gi_1161311, by cDNA: gi_13937199, supported by cDNA: gi_14334743 [Arabidopsis
  misc_feature (24)..(534): Homolog of NCBI NO: 1161312 NR Description: myo-inositol-1-phosphate synthase
  misc_feature (24)..(534): Homolog of NCBI NO: 14548092 NR Description: Inositol-3-phosphate synthase
  misc_feature (24)..(534): Homolog of NCBI NO: 14548093 NR Description: Inositol-3-phosphate synthase
  misc_feature (25)..(534): Homolog of NCBI NO: 7488491 NR Description: inositol-3-phosphate synthase (EC 5.5.1.4)
  misc_feature (24)..(534): Homolog of NCBI NO: 15227169 NR Description: putative myo-inositol 1-phosphate synthase; id: At2g22240.1, supported by cDNA: gi_15450746, supported by
  misc_feature (24)..(534): Homolog of NCBI NO: 14548098 NR Description: Inositol-3-phosphate synthase
  misc_feature (24)..(534): Homolog of NCBI NO: 973313 NR Description: myo-inositol 1-phosphate synthase isozyme-2
  misc_feature (24)..(534): Homolog of NCBI NO: 14548099 NR Description: Inositol-3-phosphate synthase
  misc_feature (24)..(534): Homolog of NCBI NO: 32140125 NR Description: inositol 1-phosphate synthase [Porteresia

SEQ ID NO: 88671 - protein, 511 aa, Arabidopsis thaliana; identical to SEQ ID NO: 26152
  peptide (1)..(511): Ceres Seq. ID no. 12711438
  misc_feature (62)..(496): Pfam Name: Myo-inositol-1-phosphate synthase Pfam Description: Myo-inositol-1-phosphate synthase
  misc_feature (1)..(511): Homolog of NCBI NO: 15236025 NR Description: myo-inositol-1-phosphate synthase; protein id: supported by cDNA: 1978., supported by cDNA: gi_1161311, by cDNA: gi_13937199, supported by cDNA: gi_14334743 [Arabidopsis
  misc_feature (1)..(511): Homolog of NCBI NO: 1161312 NR Description: myo-inositol-1-phosphate synthase
  misc_feature (1)..(511): Homolog of NCBI NO: 14548092 NR Description: Inositol-3-phosphate synthase
  misc_feature (1)..(511): Homolog of NCBI NO: 14548093 NR Description: Inositol-3-phosphate synthase
  misc_feature (2)..(511): Homolog of NCBI NO: 7488491 NR Description: inositol-3-phosphate synthase (EC 5.5.1.4)
  misc_feature (1)..(511): Homolog of NCBI NO: 15227169 NR Description: putative myo-inositol 1-phosphate synthase; id: At2g22240.1, supported by cDNA: gi_15450746, supported by
  misc_feature (1)..(511): Homolog of NCBI NO: 14548098 NR Description: Inositol-3-phosphate synthase
  misc_feature (1)..(511): Homolog of NCBI NO: 973313 NR Description: myo-inositol 1-phosphate synthase isozyme-2
  misc_feature (1)..(511): Homolog of NCBI NO: 14548099 NR Description: Inositol-3-phosphate synthase
  misc_feature (1)..(511): Homolog of NCBI NO: 32140125 NR Description: inositol 1-phosphate synthase [Porteresia

SEQ ID NO: 88672 - protein, 446 aa, Arabidopsis thaliana; identical to SEQ ID NO: 26153
  peptide (1)..(446): Ceres Seq. ID no. 12711439
  misc_feature (1)..(431): Pfam Name: Myo-inositol-1-phosphate synthase Pfam Description: Myo-inositol-1-phosphate synthase
  misc_feature (1)..(446): Homolog of NCBI NO: 15236025 NR Description: myo-inositol-1-phosphate synthase; protein id: supported by cDNA: 1978., supported by cDNA: gi_1161311, by cDNA: gi_13937199, supported by cDNA: gi_14334743 [Arabidopsis
  misc_feature (1)..(446): Homolog of NCBI NO: 1161312 NR Description: myo-inositol-1-phosphate synthase
  misc_feature (1)..(446): Homolog of NCBI NO: 14548092 NR Description: Inositol-3-phosphate synthase
  misc_feature (1)..(446): Homolog of NCBI NO: 14548093 NR Description: Inositol-3-phosphate synthase
  misc_feature (1)..(446): Homolog of NCBI NO: 7488491 NR Description: inositol-3-phosphate synthase (EC 5.5.1.4)
  misc_feature (1)..(446): Homolog of NCBI NO: 15227169 NR Description: putative myo-inositol 1-phosphate synthase; id: At2g22240.1, supported by cDNA: gi_15450746, supported by
  misc_feature (1)..(446): Homolog of NCBI NO: 14548098 NR Description: Inositol-3-phosphate synthase
  misc_feature (1)..(446): Homolog of NCBI NO: 973313 NR Description: myo-inositol 1-phosphate synthase isozyme-2
  misc_feature (1)..(446): Homolog of NCBI NO: 14548099 NR Description: Inositol-3-phosphate synthase
  misc_feature (1)..(446): Homolog of NCBI NO: 32140125 NR Description: inositol 1-phosphate synthase [Porteresia

SEQ ID NO: 88673 - DNA, 2328 bp, Arabidopsis thaliana
  misc_feature (1)..(2328): Ceres Seq. ID no. 12711463
  misc_feature: MA Experiment ID: 20000180 Result: Down-regulated in Transcription
  misc_feature: MA Experiment 20000180 PARAMETER Experiment Name: At_Germinating_Seeds_P Parameter: Age (hr) Value: 24 vs. 0
  misc_feature: MA Experiment 20000180 PARAMETER Experiment Name: At_Germinating_Seeds_P Parameter: Tissue Value: Germinating Seeds
  misc_feature: MA Experiment ID: 20001247 Result: Down-regulated in Transcription
  misc_feature: MA Experiment 20001247 PARAMETER Experiment Name: At_Far-red-induction_P Parameter: Age (day) Value: 7
  misc_feature: MA Experiment 20001247 PARAMETER Experiment Name: At_Far-red-induction_P Parameter: Light Value: Far-red vs. White
  misc_feature: MA Experiment 20001247 PARAMETER Experiment Name: At_Far-red-induction_P Parameter: Organism Value: A. thaliana
  misc_feature: MA Experiment 20001247 PARAMETER Experiment Name: At_Far-red-induction_P Parameter: Plant Line Value: Columbia
  misc_feature: MA Experiment 20001247 PARAMETER Experiment Name: At_Far-red-induction_P Parameter: Timepoint (hr) Value: 1
  misc_feature: MA Experiment 20001247 PARAMETER Experiment Name: At_Far-red-induction_P Parameter: Tissue Value: Whole Plant
  misc_feature: MA Experiment ID: 20001248 Result: Up-regulated in Transcription
  misc_feature: MA Experiment 20001248 PARAMETER Experiment Name: At_Far-red-induction_P Parameter: Age (day) Value: 7
  misc_feature: MA Experiment 20001248 PARAMETER Experiment Name: At_Far-red-induction_P Parameter: Light Value: Far-red vs. White
  misc_feature: MA Experiment 20001248 PARAMETER Experiment Name: At_Far-red-induction_P Parameter: Organism Value: A. thaliana
  misc_feature: MA Experiment 20001248 PARAMETER Experiment Name: At_Far-red-induction_P Parameter: Plant Line Value: Columbia
  misc_feature: MA Experiment 20001248 PARAMETER Experiment Name: At_Far-red-induction_P Parameter: Timepoint (hr) Value: 4
  misc_feature: MA Experiment 20001248 PARAMETER Experiment Name: At_Far-red-induction_P Parameter: Tissue Value: Whole Plant
atgttgcgtcgtctcttgaaacccaatcttgttgttactctacgcaaactctcttcttcttccgcaagctacgtcgatcgtcatattagtgtgattctctgcgatcagagcttgagcttagagtctctgcgcaaacacaacgctcttatcatcaccggaggactctcggaaaacatcttcgtcgcatcgaagctaatttcatcttacgcttcttacgggaaacccaatttgtcttccagagtcttccatttggttactcgaagagatatctttctttggaattctattatcaaagcacatttctccaatggggattatgctcgatccttgtgtttcttcttctcaatgctcttgtctggccaatcccctgatcatttcactgctcccatggttgtttctgcttgtgcggagcttttgtggtttcatgttgggactttcgttcacgggcttgttttgaaacatggaggttttgatagaaacactgctgtgggagcttcctttgtgtatttctactcaaagtgtgggtttttacaagatgcgtgtcttgtgttcgacgaaatgcctgacagagatgttgttgcttggactgccattatatctgggcatgtgcagaacggcgagagcgagggaggtttgggttatctttgcaagatgcatagtgctggttctgatgttgataagccgaatcccagaacattggaatgcggattccaagcttgttctaatctgggagctttgaaagaaggaagatgtcttcatggatttgcggtgaaaaatggtttagcttcttccaagtttgtccagtcttccatgttttcattctattcgaaatctgggaatccatccgaggcttatctttctttccgtgaacttggggatgaagatatgttttcatggacttcgattatagcgtcactggcgagatcaggtgacatggaggaaagttttgatatgttctgggaaatgcagaacaagggaatgcacccagatggggttgtcattagctgtttgattaatgaactaggtaagatgatgcttgtccctcagggtaaagcctttcacgggttcgtcataagacattgtttctctttagacagtacagtttgcaattccttgttatcgatgtactgcaaattcgagcttctgtctgtggctgagaagcttttctgtaggataagcgaagaaggaaacaaagaagcttggaatacaatgcttaaaggctatggtaaaatgaaatgtcacgtaaagtgtatcgagttatttagaaaaattcagaatcttggaattgaaatcgactctgccagcgcaacctctgtcatatcttcttgttcccacataggagcggtgctactagggaagtcgttgcattgctatgttgtcaaaactagcctggatcttaccatctcagtggtcaattccctcattgatttgtatggaaaaatgggagacttgactgtagcttggaggatgttttgtgaagcagatactaacgttatcacttggaacgcaatgattgcgtcttatgttcactgtgagcaatccgaaaaagccattgcattgttcgatagaatggtttctgagaatttcaaacccagctcaataactttggtgactctgcttatggcttgtgtcaatactggctctctggagagaggacagatgattcatcggtacatcactgaaacagagcacgagatgaatctttctctttcagctgctctcattgacatgtacgcgaaatgtggccaccttgaaaagtcacgagaactgtttgatgctggaaatcagaaggatgccgtttgttggaatgtgatgatatcaggttatggaatgcacggagatgttgaatcggccatagcactttttgatcaaatggaagagtctgatgttaaaccaaccggacctacatttcttgcgcttctatcggcttgcacgcacgctggtttagtagaacaagggaaaaaactatttctcaagatgcatcagtacgatgtgaaacccaacttaaagcattactcttgtcttgtggatcttctttccaggtctggtaatttggaggaagctgaaagcacagtcatgtctatgccattctcaccagacggggtcatatggggaacattgttgagctcatgcatgacccatggggagtttgagatgggaattcgaatggcagaacgtgcggttgctagtgatccgcagaacgatgggtattatataatgcttgcgaacatgtacagtgctgcaggtaagtgggaagaagcggaaagggcacgagagatgatgagggaaagcggagttggtaagagagctggtcatagtgtagtctaa

SEQ ID NO: 88674 - protein, 775 aa, Arabidopsis thaliana
  peptide (1)..(775): Ceres Seq. ID no. 12711464
  misc_feature (670)..(704): Pfam Name: PPR repeat Pfam Description: PPR repeat
  misc_feature (1)..(660): Homolog of NCBI NO: 22329268 NR Description: hypothetical protein; protein id: At4g39952.1
  misc_feature (40)..(775): Homolog of NCBI NO: 38567725 NR Description: B1358B12.23 [Oryza sativa (japonica
  misc_feature (40)..(775): Homolog of NCBI NO: 38347057 NR Description: OSJNBa0060P14.4 [Oryza sativa (japonica
  misc_feature (402)..(775): Homolog of NCBI NO: 22329268 NR Description: hypothetical protein; protein id: At4g39952.1
  misc_feature (37)..(775): Homolog of NCBI NO: 18409250 NR Description: PPR-repeat protein, putative; protein id: [Arabidopsis thaliana] >gi|12325094|gb|AAG52503.1|AC018364_21
  misc_feature (21)..(773): Homolog of NCBI NO: 15228590 NR Description: hypothetical protein; protein id: At3g03580.1 thaliana] >gi|6091764|gb|AAF03474.1|AC009327_13 hypothetical [Arabidopsis thaliana] >gi|28393735|gb|AAO42278.1| unknown
  misc_feature (2)..(768): Homolog of NCBI NO: 38606535 NR Description: OSJNBa0016O02.23 [Oryza sativa (japonica
  misc_feature (7)..(775): Homolog of NCBI NO: 34897084 NR Description: hypothetical protein [Oryza sativa (japonica group)] >gi|12957718|gb|AAK09236.1| hypothetical protein [Oryza
  misc_feature (14)..(773): Homolog of NCBI NO: 38423978 NR Description: PPR-repeat protein-like [Oryza sativa (japonica
  misc_feature (11)..(773): Homolog of NCBI NO: 34903762 NR Description: unnamed protein product [Oryza sativa (japonica group)] >gi|7340873|dbj|BAA92963.1| unnamed protein product
MLRRLLKPNLVVTLRKLSSSSASYVDRHISVILCDQSLSLESLRKHNALIITGGLSENIFVASKLISSYASYGKPNLSSRVFHLVTRRDIFLWNSIIKAHFSNGDYARSLCFFFSMLLSGQSPDHFTAPMVVSACAELLWFHVGTFVHGLVLKHGGFDRNTAVGASFVYFYSKCGFLQDACLVFDEMPDRDVVAWTAIISGHVQNGESEGGLGYLCKMHSAGSDVDKPNPRTLECGFQACSNLGALKEGRCLHGFAVKNGLASSKFVQSSMFSFYSKSGNPSEAYLSFRELGDEDMFSWTSIIASLARSGDMEESFDMFWEMQNKGMHPDGVVISCLINELGKMMLVPQGKAFHGFVIRHCFSLDSTVCNSLLSMYCKFELLSVAEKLFCRISEEGNKEAWNTMLKGYGKMKCHVKCIELFRKIQNLGIEIDSASATSVISSCSHIGAVLLGKSLHCYVVKTSLDLTISVVNSLIDLYGKMGDLTVAWRMFCEADTNVITWNAMIASYVHCEQSEKAIALFDRMVSENFKPSSITLVTLLMACVNTGSLERGQMIHRYITETEHEMNLSLSAALIDMYAKCGHLEKSRELFDAGNQKDAVCWNVMISGYGMHGDVESAIALFDQMEESDVKPTGPTFLALLSACTHAGLVEQGKKLFLKMHQYDVKPNLKHYSCLVDLLSRSGNLEEAESTVMSMPFSPDGVIWGTLLSSCMTHGEFEMGIRMAERAVASDPQNDGYYIMLANMYSAAGKWEEAERAREMMRESGVGKRAGHSVV

SEQ ID NO: 88675 - protein, 660 aa, Arabidopsis thaliana
  peptide (1)..(660): Ceres Seq. ID no. 12711465
  misc_feature (555)..(589): Pfam Name: PPR repeat Pfam Description: PPR repeat
  misc_feature (1)..(545): Homolog of NCBI NO: 22329268 NR Description: hypothetical protein; protein id: At4g39952.1
  misc_feature (1)..(660): Homolog of NCBI NO: 38567725 NR Description: B1358B12.23 [Oryza sativa (japonica
  misc_feature (1)..(660): Homolog of NCBI NO: 38347057 NR Description: OSJNBa0060P14.4 [Oryza sativa (japonica
  misc_feature (287)..(660): Homolog of NCBI NO: 22329268 NR Description: hypothetical protein; protein id: At4g39952.1
  misc_feature (1)..(660): Homolog of NCBI NO: 18409250 NR Description: PPR-repeat protein, putative; protein id: [Arabidopsis thaliana] >gi|12325094|gb|AAG52503.1|AC018364_21
  misc_feature (1)..(658): Homolog of NCBI NO: 15228590 NR Description: hypothetical protein; protein id: At3g03580.1 thaliana] >gi|6091764|gb|AAF03474.1|AC009327_13 hypothetical [Arabidopsis thaliana] >gi|28393735|gb|AAO42278.1| unknown
  misc_feature (1)..(653): Homolog of NCBI NO: 38606535 NR Description: OSJNBa0016O02.23 [Oryza sativa (japonica
  misc_feature (1)..(660): Homolog of NCBI NO: 34897084 NR Description: hypothetical protein [Oryza sativa (japonica group)] >gi|12957718|gb|AAK09236.1| hypothetical protein [Oryza
  misc_feature (1)..(658): Homolog of NCBI NO: 38423978 NR Description: PPR-repeat protein-like [Oryza sativa (japonica
  misc_feature (1)..(658): Homolog of NCBI NO: 34903762 NR Description: unnamed protein product [Oryza sativa (japonica group)] >gi|7340873|dbj|BAA92963.1| unnamed protein product
MLLSGQSPDHFTAPMVVSACAELLWFHVGTFVHGLVLKHGGFDRNTAVGASFVYFYSKCGFLQDACLVFDEMPDRDVVAWTAIISGHVQNGESEGGLGYLCKMHSAGSDVDKPNPRTLECGFQACSNLGALKEGRCLHGFAVKNGLASSKFVQSSMFSFYSKSGNPSEAYLSFRELGDEDMFSWTSIIASLARSGDMEESFDMFWEMQNKGMHPDGVVISCLINELGKMMLVPQGKAFHGFVIRHCFSLDSTVCNSLLSMYCKFELLSVAEKLFCRISEEGNKEAWNTMLKGYGKMKCHVKCIELFRKIQNLGIEIDSASATSVISSCSHIGAVLLGKSLHCYVVKTSLDLTISVVNSLIDLYGKMGDLTVAWRMFCEADTNVITWNAMIASYVHCEQSEKAIALFDRMVSENFKPSSITLVTLLMACVNTGSLERGQMIHRYITETEHEMNLSLSAALIDMYAKCGHLEKSRELFDAGNQKDAVCWNVMISGYGMHGDVESAIALFDQMEESDVKPTGPTFLALLSACTHAGLVEQGKKLFLKMHQYDVKPNLKHYSCLVDLLSRSGNLEEAESTVMSMPFSPDGVIWGTLLSSCMTHGEFEMGIRMAERAVASDPQNDGYYIMLANMYSAAGKWEEAERAREMMRESGVGKRAGHSVV

SEQ ID NO: 88676 - protein, 646 aa, Arabidopsis thaliana
  peptide (1)..(646): Ceres Seq. ID no. 12711466
  misc_feature (541)..(575): Pfam Name: PPR repeat Pfam Description: PPR repeat
  misc_feature (1)..(531): Homolog of NCBI NO: 22329268 NR Description: hypothetical protein; protein id: At4g39952.1
  misc_feature (1)..(646): Homolog of NCBI NO: 38567725 NR Description: B1358B12.23 [Oryza sativa (japonica
  misc_feature (1)..(646): Homolog of NCBI NO: 38347057 NR Description: OSJNBa0060P14.4 [Oryza sativa (japonica
  misc_feature (273)..(646): Homolog of NCBI NO: 22329268 NR Description: hypothetical protein; protein id: At4g39952.1
  misc_feature (1)..(646): Homolog of NCBI NO: 18409250 NR Description: PPR-repeat protein, putative; protein id: [Arabidopsis thaliana] >gi|12325094|gb|AAG52503.1|AC018364_21
  misc_feature (1)..(644): Homolog of NCBI NO: 15228590 NR Description: hypothetical protein; protein id: At3g03580.1 thaliana] >gi|6091764|gb|AAF03474.1|AC009327_13 hypothetical [Arabidopsis thaliana] >gi|28393735|gb|AAO42278.1| unknown
  misc_feature (1)..(639): Homolog of NCBI NO: 38606535 NR Description: OSJNBa0016O02.23 [Oryza sativa (japonica
  misc_feature (1)..(646): Homolog of NCBI NO: 34897084 NR Description: hypothetical protein [Oryza sativa (japonica group)] >gi|12957718|gb|AAK09236.1| hypothetical protein [Oryza
  misc_feature (1)..(644): Homolog of NCBI NO: 38423978 NR Description: PPR-repeat protein-like [Oryza sativa (japonica
  misc_feature (1)..(644): Homolog of NCBI NO: 34903762 NR Description: unnamed protein product [Oryza sativa (japonica group)] >gi|7340873|dbj|BAA92963.1| unnamed protein product
MVVSACAELLWFHVGTFVHGLVLKHGGFDRNTAVGASFVYFYSKCGFLQDACLVFDEMPDRDVVAWTAIISGHVQNGESEGGLGYLCKMHSAGSDVDKPNPRTLECGFQACSNLGALKEGRCLHGFAVKNGLASSKFVQSSMFSFYSKSGNPSEAYLSFRELGDEDMFSWTSIIASLARSGDMEESFDMFWEMQNKGMHPDGVVISCLINELGKMMLVPQGKAFHGFVIRHCFSLDSTVCNSLLSMYCKFELLSVAEKLFCRISEEGNKEAWNTMLKGYGKMKCHVKCIELFRKIQNLGIEIDSASATSVISSCSHIGAVLLGKSLHCYVVKTSLDLTISVVNSLIDLYGKMGDLTVAWRMFCEADTNVITWNAMIASYVHCEQSEKAIALFDRMVSENFKPSSITLVTLLMACVNTGSLERGQMIHRYITETEHEMNLSLSAALIDMYAKCGHLEKSRELFDAGNQKDAVCWNVMISGYGMHGDVESAIALFDQMEESDVKPTGPTFLALLSACTHAGLVEQGKKLFLKMHQYDVKPNLKHYSCLVDLLSRSGNLEEAESTVMSMPFSPDGVIWGTLLSSCMTHGEFEMGIRMAERAVASDPQNDGYYIMLANMYSAAGKWEEAERAREMMRESGVGKRAGHSVV

SEQ ID NO: 88677 - DNA, 1064 bp, Arabidopsis thaliana
  misc_feature (1)..(1064): Ceres Seq. ID no. 12711515
  misc_feature: MA Experiment ID: 108435 Result: Down-regulated in Transcription
  misc_feature: MA Experiment 108435 PARAMETER Experiment Name: At_stm_Mutants_cDNA_P Parameter: Plant Line Value: wt Landsburg vs stm
  misc_feature: MA Experiment 108435 PARAMETER Experiment Name: At_stm_Mutants_cDNA_P Parameter: Tissue Value: Shoot Apical Meristem Region
  misc_feature: MA Experiment ID: 108461 Result: Down-regulated in Transcription
  misc_feature: MA Experiment 108461 PARAMETER Experiment Name: At_Germinating_Seeds_cDNA_P Parameter: Age (day) Value: 1 vs. 0
  misc_feature: MA Experiment 108461 PARAMETER Experiment Name: At_Germinating_Seeds_cDNA_P Parameter: Tissue Value: Germinating Seeds
  misc_feature: MA Experiment ID: 108462 Result: Down-regulated in Transcription
  misc_feature: MA Experiment 108462 PARAMETER Experiment Name: At_Germinating_Seeds_cDNA_P Parameter: Age (day) Value: 2 vs. 0
  misc_feature: MA Experiment 108462 PARAMETER Experiment Name: At_Germinating_Seeds_cDNA_P Parameter: Tissue Value: Germinating Seeds
  misc_feature: MA Experiment ID: 108463 Result: Down-regulated in Transcription
  misc_feature: MA Experiment 108463 PARAMETER Experiment Name: At_Germinating_Seeds_cDNA_P Parameter: Age (day) Value: 3 vs. 0
  misc_feature: MA Experiment 108463 PARAMETER Experiment Name: At_Germinating_Seeds_cDNA_P Parameter: Tissue Value: Germinating Seeds
  misc_feature: MA Experiment ID: 108464 Result: Down-regulated in Transcription
  misc_feature: MA Experiment 108464 PARAMETER Experiment Name: At_Germinating_Seeds_cDNA_P Parameter: Age (day) Value: 4 vs. 0
  misc_feature: MA Experiment 108464 PARAMETER Experiment Name: At_Germinating_Seeds_cDNA_P Parameter: Tissue Value: Germinating Seeds
  misc_feature: MA Experiment ID: 108474 Result: Up-regulated in Transcription
  misc_feature: MA Experiment 108474 PARAMETER Experiment Name: At_Drought_Flowers_cDNA_P Parameter: Timepoint (hr) Value: null
  misc_feature: MA Experiment 108474 PARAMETER Experiment Name: At_Drought_Flowers_cDNA_P Parameter: Treatment Value: Drought vs. No Drought
  misc_feature: MA Experiment ID: 108501 Result: Up-regulated in Transcription
  misc_feature: MA Experiment 108501 PARAMETER Experiment Name: At_ap2_floral_buds_cDNA_P Parameter: Plant Line Value: ap2 (Ler.)
  misc_feature: MA Experiment 108501 PARAMETER Experiment Name: At_ap2_floral_buds_cDNA_P Parameter: Tissue Value: Closed Flower
  misc_feature: MA Experiment ID: 108561 Result: Up-regulated in Transcription
  misc_feature: MA Experiment 108561 PARAMETER Experiment Name: At_100uM_ABA_cDNA_P Parameter: Timepoint (hr) Value: 6
  misc_feature: MA Experiment 108561 PARAMETER Experiment Name: At_100uM_ABA_cDNA_P Parameter: Tissue Value: Aerial
  misc_feature: MA Experiment 108561 PARAMETER Experiment Name: At_100uM_ABA_cDNA_P Parameter: Treatment Value: 100uM ABA vs. No Treatment
  misc_feature: MA Experiment ID: 108579 Result: Down-regulated in Transcription
  misc_feature: MA Experiment 108579 PARAMETER Experiment Name: At_4deg_Cold_cDNA_P Parameter: Temperature (deg C) Value: 4 vs. 22
  misc_feature: MA Experiment 108579 PARAMETER Experiment Name: At_4deg_Cold_cDNA_P Parameter: Timepoint (hr) Value: 6
  misc_feature: MA Experiment 108579 PARAMETER Experiment Name: At_4deg_Cold_cDNA_P Parameter: Tissue Value: Aerial
  misc_feature: MA Experiment ID: 108585 Result: Down-regulated in Transcription
  misc_feature: MA Experiment 108585 PARAMETER Experiment Name: At_5mM_NaNP_cDNA_P Parameter: Timepoint (hr) Value: 6
  misc_feature: MA Experiment 108585 PARAMETER Experiment Name: At_5mM_NaNP_cDNA_P Parameter: Tissue Value: Aerial
  misc_feature: MA Experiment 108585 PARAMETER Experiment Name: At_5mM_NaNP_cDNA_P Parameter: Treatment Value: null
  misc_feature: MA Experiment ID: 108605 Result: Up-regulated in Transcription
  misc_feature: MA Experiment 108605 PARAMETER Experiment Name: At_100uM_ABA_cDNA_P Parameter: Timepoint (hr) Value: 6
  misc_feature: MA Experiment 108605 PARAMETER Experiment Name: At_100uM_ABA_cDNA_P Parameter: Tissue Value: Aerial
  misc_feature: MA Experiment 108605 PARAMETER Experiment Name: At_100uM_ABA_cDNA_P Parameter: Treatment Value: 100uM ABA vs. No Treatment
  misc_feature: MA Experiment ID: 108607 Result: Up-regulated in Transcription
  misc_feature: MA Experiment 108607 PARAMETER Experiment Name: At_100uM_ABA_cDNA_P Parameter: Timepoint (hr) Value: 4
  misc_feature: MA Experiment 108607 PARAMETER Experiment Name: At_100uM_ABA_cDNA_P Parameter: Tissue Value: Aerial
  misc_feature: MA Experiment 108607 PARAMETER Experiment Name: At_100uM_ABA_cDNA_P Parameter: Treatment Value: 100uM ABA vs. No Treatment
  misc_feature: MA Experiment ID: 108609 Result: Up-regulated in Transcription
  misc_feature: MA Experiment 108609 PARAMETER Experiment Name: At_100uM_ABA_cDNA_P Parameter: Timepoint (hr) Value: 24
  misc_feature: MA Experiment 108609 PARAMETER Experiment Name: At_100uM_ABA_cDNA_P Parameter: Tissue Value: Aerial
  misc_feature: MA Experiment 108609 PARAMETER Experiment Name: At_100uM_ABA_cDNA_P Parameter: Treatment Value: 100uM ABA vs. No Treatment
  misc_feature: MA Experiment ID: 108668 Result: Down-regulated in Transcription
  misc_feature: MA Experiment 108668 PARAMETER Experiment Name: At_2mM_SA_cDNA_P Parameter: Plant Line Value: WS
  misc_feature: MA Experiment 108668 PARAMETER Experiment Name: At_2mM_SA_cDNA_P Parameter: Timepoint (hr) Value: 6
  misc_feature: MA Experiment 108668 PARAMETER Experiment Name: At_2mM_SA_cDNA_P Parameter: Treatment Value: 2mM SA vs. No Treatment
  misc_feature: MA Experiment ID: 20000069 Result: Up-regulated in Transcription
  misc_feature: MA Experiment 20000069 PARAMETER Experiment Name: At_100uM_ABA_Mutants_cDNA_P Parameter: Plant Line Value: CS23
  misc_feature: MA Experiment 20000069 PARAMETER Experiment Name: At_100uM_ABA_Mutants_cDNA_P Parameter: Timepoint (hr) Value: 6
  misc_feature: MA Experiment 20000069 PARAMETER Experiment Name: At_100uM_ABA_Mutants_cDNA_P Parameter: Tissue Value: Aerial
  misc_feature: MA Experiment 20000069 PARAMETER Experiment Name: At_100uM_ABA_Mutants_cDNA_P Parameter: Treatment Value: 100uM ABA vs. No Treatment
  misc_feature: MA Experiment ID: 20000070 Result: Up-regulated in Transcription
  misc_feature: MA Experiment 20000070 PARAMETER Experiment Name: At_100uM_ABA_Mutants_cDNA_P Parameter: Plant Line Value: CS24
  misc_feature: MA Experiment 20000070 PARAMETER Experiment Name: At_100uM_ABA_Mutants_cDNA_P Parameter: Timepoint (hr) Value: 6
  misc_feature: MA Experiment 20000070 PARAMETER Experiment Name: At_100uM_ABA_Mutants_cDNA_P Parameter: Tissue Value: Aerial
  misc_feature: MA Experiment 20000070 PARAMETER Experiment Name: At_100uM_ABA_Mutants_cDNA_P Parameter: Treatment Value: 100uM ABA vs. No Treatment
  misc_feature: MA Experiment ID: 20000071 Result: Up-regulated in Transcription
  misc_feature: MA Experiment 20000071 PARAMETER Experiment Name: At_100uM_ABA_Mutants_cDNA_P Parameter: Plant Line Value: CS8104
  misc_feature: MA Experiment 20000071 PARAMETER Experiment Name: At_100uM_ABA_Mutants_cDNA_P Parameter: Timepoint (hr) Value: 6
  misc_feature: MA Experiment 20000071 PARAMETER Experiment Name: At_100uM_ABA_Mutants_cDNA_P Parameter: Tissue Value: Aerial
  misc_feature: MA Experiment 20000071 PARAMETER Experiment Name: At_100uM_ABA_Mutants_cDNA_P Parameter: Treatment Value: 100uM ABA vs. No Treatment
  misc_feature: MA Experiment ID: 20000086 Result: Up-regulated in Transcription
  misc_feature: MA Experiment 20000086 PARAMETER Experiment Name: At_100uM_ABA_Mutants_cDNA_P Parameter: Plant Line Value: CS22
  misc_feature: MA Experiment 20000086 PARAMETER Experiment Name: At_100uM_ABA_Mutants_cDNA_P Parameter: Timepoint (hr) Value: 6
  misc_feature: MA Experiment 20000086 PARAMETER Experiment Name: At_100uM_ABA_Mutants_cDNA_P Parameter: Tissue Value: Aerial
  misc_feature: MA Experiment 20000086 PARAMETER Experiment Name: At_100uM_ABA_Mutants_cDNA_P Parameter: Treatment Value: 100uM ABA vs. No Treatment
  misc_feature: MA Experiment ID: 20000088 Result: Up-regulated in Transcription
  misc_feature: MA Experiment 20000088 PARAMETER Experiment Name: At_100uM_ABA_Mutants_cDNA_P Parameter: Plant Line Value: Landsberg
  misc_feature: MA Experiment 20000088 PARAMETER Experiment Name: At_100uM_ABA_Mutants_cDNA_P Parameter: Timepoint (hr) Value: 6
  misc_feature: MA Experiment 20000088 PARAMETER Experiment Name: At_100uM_ABA_Mutants_cDNA_P Parameter: Tissue Value: Aerial
  misc_feature: MA Experiment 20000088 PARAMETER Experiment Name: At_100uM_ABA_Mutants_cDNA_P Parameter: Treatment Value: 100uM ABA vs. No Treatment
  misc_feature: MA Experiment ID: 20000090 Result: Down-regulated in Transcription
  misc_feature: MA Experiment ID: 20000111 Result: Down-regulated in Transcription
  misc_feature: MA Experiment 20000111 PARAMETER Experiment Name: At_42deg_Heat_cDNA_P Parameter: Temperature (deg C) Value: 42 vs. 22
  misc_feature: MA Experiment 20000111 PARAMETER Experiment Name: At_42deg_Heat_cDNA_P Parameter: Timepoint (hr) Value: 6
  misc_feature: MA Experiment 20000111 PARAMETER Experiment Name: At_42deg_Heat_cDNA_P Parameter: Tissue Value: Aerial
  misc_feature: MA Experiment ID: 20000117 Result: Up-regulated in Transcription
  misc_feature: MA Experiment 20000117 PARAMETER Experiment Name: At_100uM_ABA_Mutants_cDNA_P Parameter: Plant Line Value: Columbia
  misc_feature: MA Experiment 20000117 PARAMETER Experiment Name: At_100uM_ABA_Mutants_cDNA_P Parameter: Timepoint (hr) Value: 6
  misc_feature: MA Experiment 20000117 PARAMETER Experiment Name: At_100uM_ABA_Mutants_cDNA_P Parameter: Tissue Value: Aerial
  misc_feature: MA Experiment 20000117 PARAMETER Experiment Name: At_100uM_ABA_Mutants_cDNA_P Parameter: Treatment Value: 100uM ABA vs. No Treatment
  misc_feature: MA Experiment ID: 20000144 Result: Down-regulated in Transcription
  misc_feature: MA Experiment 20000144 PARAMETER Experiment Name: At_42deg_Heat_cDNA_P Parameter: Temperature (deg C) Value: 42 vs. 22
  misc_feature: MA Experiment 20000144 PARAMETER Experiment Name: At_42deg_Heat_cDNA_P Parameter: Timepoint (hr) Value: 1
  misc_feature: MA Experiment 20000144 PARAMETER Experiment Name: At_42deg_Heat_cDNA_P Parameter: Tissue Value: Aerial
  misc_feature: MA Experiment ID: 20000169 Result: Up-regulated in Transcription
  misc_feature: MA Experiment 20000169 PARAMETER Experiment Name: At_100uM_ABA_P Parameter: Age (day) Value: 14
  misc_feature: MA Experiment 20000169 PARAMETER Experiment Name: At_100uM_ABA_P Parameter: Organism Value: A. thaliana
  misc_feature: MA Experiment 20000169 PARAMETER Experiment Name: At_100uM_ABA_P Parameter: Plant Line Value: WS
  misc_feature: MA Experiment 20000169 PARAMETER Experiment Name: At_100uM_ABA_P Parameter: Timepoint (hr) Value: 6
  misc_feature: MA Experiment 20000169 PARAMETER Experiment Name: At_100uM_ABA_P Parameter: Tissue Value: Aerial
  misc_feature: MA Experiment 20000169 PARAMETER Experiment Name: At_100uM_ABA_P Parameter: Treatment Value: 100uM ABA vs. No Treatment
  misc_feature: MA Experiment ID: 20000171 Result: Down-regulated in Transcription
  misc_feature: MA Experiment 20000171 PARAMETER Experiment Name: At_42deg_Heat_P Parameter: Age (day) Value: 14
  misc_feature: MA Experiment 20000171 PARAMETER Experiment Name: At_42deg_Heat_P Parameter: Organism Value: A. thaliana
  misc_feature: MA Experiment 20000171 PARAMETER Experiment Name: At_42deg_Heat_P Parameter: Plant Line Value: WS
  misc_feature: MA Experiment 20000171 PARAMETER Experiment Name: At_42deg_Heat_P Parameter: Temperature (deg C) Value: 42 vs. 22
  misc_feature: MA Experiment 20000171 PARAMETER Experiment Name: At_42deg_Heat_P Parameter: Timepoint (hr) Value: 1
  misc_feature: MA Experiment 20000171 PARAMETER Experiment Name: At_42deg_Heat_P Parameter: Tissue Value: Aerial
  misc_feature: MA Experiment ID: 20000173 Result: Down-regulated in Transcription
  misc_feature: MA Experiment 20000173 PARAMETER Experiment Name: At_42deg_Heat_P Parameter: Age (day) Value: 14
  misc_feature: MA Experiment 20000173 PARAMETER Experiment Name: At_42deg_Heat_P Parameter: Organism Value: A. thaliana
  misc_feature: MA Experiment 20000173 PARAMETER Experiment Name: At_42deg_Heat_P Parameter: Plant Line Value: WS
  misc_feature: MA Experiment 20000173 PARAMETER Experiment Name: At_42deg_Heat_P Parameter: Temperature (deg C) Value: 42 vs. 22
  misc_feature: MA Experiment 20000173 PARAMETER Experiment Name: At_42deg_Heat_P Parameter: Timepoint (hr) Value: 6
  misc_feature: MA Experiment 20000173 PARAMETER Experiment Name: At_42deg_Heat_P Parameter: Tissue Value: Aerial
  misc_feature: MA Experiment ID: 20000182 Result: Down-regulated in Transcription
  misc_feature: MA Experiment 20000182 PARAMETER Experiment Name: At_2mM_SA_P Parameter: Age (day) Value: 14
  misc_feature: MA Experiment 20000182 PARAMETER Experiment Name: At_2mM_SA_P Parameter: Organism Value: A. thaliana
  misc_feature: MA Experiment 20000182 PARAMETER Experiment Name: At_2mM_SA_P Parameter: Plant Line Value: WS
  misc_feature: MA Experiment 20000182 PARAMETER Experiment Name: At_2mM_SA_P Parameter: Timepoint (hr) Value: 6
  misc_feature: MA Experiment 20000182 PARAMETER Experiment Name: At_2mM_SA_P Parameter: Tissue Value: Aerial
  misc_feature: MA Experiment 20000182 PARAMETER Experiment Name: At_2mM_SA_P Parameter: Treatment Value: 2mM SA vs. No Treatment
  misc_feature: MA Experiment ID: 20000184 Result: Down-regulated in Transcription
  misc_feature: MA Experiment 20000184 PARAMETER Experiment Name: At_Shoots__P Parameter: Age (day) Value: 7
  misc_feature: MA Experiment 20000184 PARAMETER Experiment Name: At_Shoots__P Parameter: Tissue Value: Shoots vs. Whole Plant
  misc_feature: MA Experiment ID: 20000213 Result: Down-regulated in Transcription
  misc_feature: MA Experiment 20000213 PARAMETER Experiment Name: At_4deg_Cold_P Parameter: Timepoint (hr) Value: 2
  misc_feature: MA Experiment ID: 20000214 Result: Down-regulated in Transcription
  misc_feature: MA Experiment 20000214 PARAMETER Experiment Name: At_4deg_Cold_P Parameter: Timepoint (hr) Value: 6
  misc_feature: MA Experiment ID: 20000224 Result: Down-regulated in Transcription
  misc_feature: MA Experiment ID: 20000227 Result: Up-regulated in Transcription
  misc_feature: MA Experiment 20000227 PARAMETER Experiment Name: At_Root-Tips-vs-Tops_P Parameter: Tissue Value: Root Tips vs. Root Tops
  misc_feature: MA Experiment ID: 20000234 Result: Down-regulated in Transcription
  misc_feature: MA Experiment 20000234 PARAMETER Experiment Name: At_Siliques_P Parameter: Age (day) Value: 21
  misc_feature: MA Experiment 20000234 PARAMETER Experiment Name: At_Siliques_P Parameter: Organism Value: A. thaliana
  misc_feature: MA Experiment 20000234 PARAMETER Experiment Name: At_Siliques_P Parameter: Plant Line Value: WS
  misc_feature: MA Experiment 20000234 PARAMETER Experiment Name: At_Siliques_P Parameter: Tissue Value: Less Than 5mm Siliques vs. Whole Plant
  misc_feature: MA Experiment ID: 20000235 Result: Down-regulated in Transcription
  misc_feature: MA Experiment 20000235 PARAMETER Experiment Name: At_Siliques_P Parameter: Age (day) Value: 21
  misc_feature: MA Experiment 20000235 PARAMETER Experiment Name: At_Siliques_P Parameter: Organism Value: A. thaliana
  misc_feature: MA Experiment 20000235 PARAMETER Experiment Name: At_Siliques_P Parameter: Plant Line Value: WS
  misc_feature: MA Experiment 20000235 PARAMETER Experiment Name: At_Siliques_P Parameter: Tissue Value: 5-10mm Siliques vs. Whole Plant
  misc_feature: MA Experiment ID: 20000264 Result: Down-regulated in Transcription
  misc_feature: MA Experiment 20000264 PARAMETER Experiment Name: At_Open_Flower_P Parameter: Age (day) Value: 21
  misc_feature: MA Experiment 20000264 PARAMETER Experiment Name: At_Open_Flower_P Parameter: Plant Line Value: WS
  misc_feature: MA Experiment 20000264 PARAMETER Experiment Name: At_Open_Flower_P Parameter: Tissue Value: Open Flower vs. Whole Plant
  misc_feature: MA Experiment ID: 20000265 Result: Down-regulated in Transcription
  misc_feature: MA Experiment 20000265 PARAMETER Experiment Name: At_Open_Flower_P Parameter: Age (day) Value: 21
  misc_feature: MA Experiment 20000265 PARAMETER Experiment Name: At_Open_Flower_P Parameter: Plant Line Value: WS
  misc_feature: MA Experiment 20000265 PARAMETER Experiment Name: At_Open_Flower_P Parameter: Tissue Value: Closed Flower vs. Whole Plant
  misc_feature: MA Experiment ID: 20000267 Result: Down-regulated in Transcription
  misc_feature: MA Experiment 20000267 PARAMETER Experiment Name: At_Drought_P Parameter: Age (day) Value: 7
  misc_feature: MA Experiment 20000267 PARAMETER Experiment Name: At_Drought_P Parameter: Organism Value: A. thaliana
  misc_feature: MA Experiment 20000267 PARAMETER Experiment Name: At_Drought_P Parameter: Plant Line Value: WS
  misc_feature: MA Experiment 20000267 PARAMETER Experiment Name: At_Drought_P Parameter: Timepoint (hr) Value: 6
  misc_feature: MA Experiment 20000267 PARAMETER Experiment Name: At_Drought_P Parameter: Tissue Value: Whole Plant
  misc_feature: MA Experiment 20000267 PARAMETER Experiment Name: At_Drought_P Parameter: Treatment Value: Drought vs. No Drought
  misc_feature: MA Experiment ID: 20000286 Result: Down-regulated in Transcription
  misc_feature: MA Experiment 20000286 PARAMETER Experiment Name: At_Open_Flower_P Parameter: Age (day) Value: 21
  misc_feature: MA Experiment 20000286 PARAMETER Experiment Name: At_Open_Flower_P Parameter: Plant Line Value: WS
  misc_feature: MA Experiment 20000286 PARAMETER Experiment Name: At_Open_Flower_P Parameter: Tissue Value: Half Open vs. Whole Plant
  misc_feature: MA Experiment ID: 20000436 Result: Down-regulated in Transcription
  misc_feature: MA Experiment 20000436 PARAMETER Experiment Name: At_Drought_P Parameter: Age (day) Value: 7
  misc_feature: MA Experiment 20000436 PARAMETER Experiment Name: At_Drought_P Parameter: Organism Value: A. thaliana
  misc_feature: MA Experiment 20000436 PARAMETER Experiment Name: At_Drought_P Parameter: Plant Line Value: WS
  misc_feature: MA Experiment 20000436 PARAMETER Experiment Name: At_Drought_P Parameter: Timepoint (hr) Value: 12
  misc_feature: MA Experiment 20000436 PARAMETER Experiment Name: At_Drought_P Parameter: Tissue Value: Whole Plant
  misc_feature: MA Experiment 20000436 PARAMETER Experiment Name: At_Drought_P Parameter: Treatment Value: Drought vs. No Drought
  misc_feature: MA Experiment ID: 20000437 Result: Down-regulated in Transcription
  misc_feature: MA Experiment 20000437 PARAMETER Experiment Name: At_Drought_P Parameter: Age (day) Value: 8
  misc_feature: MA Experiment 20000437 PARAMETER Experiment Name: At_Drought_P Parameter: Organism Value: A. thaliana
  misc_feature: MA Experiment 20000437 PARAMETER Experiment Name: At_Drought_P Parameter: Plant Line Value: WS
  misc_feature: MA Experiment 20000437 PARAMETER Experiment Name: At_Drought_P Parameter: Timepoint (hr) Value: 24
  misc_feature: MA Experiment 20000437 PARAMETER Experiment Name: At_Drought_P Parameter: Tissue Value: Whole Plant
  misc_feature: MA Experiment 20000437 PARAMETER Experiment Name: At_Drought_P Parameter: Treatment Value: Drought vs. No Drought
  misc_feature: MA Experiment ID: 20000438 Result: Down-regulated in Transcription
  misc_feature: MA Experiment 20000438 PARAMETER Experiment Name: At_Shoots__P Parameter: Age (day) Value: 14
  misc_feature: MA Experiment 20000438 PARAMETER Experiment Name: At_Shoots__P Parameter: Tissue Value: Shoots vs. Whole Plant
  misc_feature: MA Experiment ID: 20000441 Result: Up-regulated in Transcription
  misc_feature: MA Experiment 20000441 PARAMETER Experiment Name: At_1uM_BR-BRZ__P Parameter: Tissue Value: Shoot Apices
  misc_feature: MA Experiment 20000441 PARAMETER Experiment Name: At_1uM_BR-BRZ__P Parameter: Treatment Value: 1uM BR vs. No Treatment
  misc_feature: MA Experiment ID: 20000445 Result: Up-regulated in Transcription
  misc_feature: MA Experiment 20000445 PARAMETER Experiment Name: At_100uM_NAA__P Parameter: Age (day) Value: 14
  misc_feature: MA Experiment 20000445 PARAMETER Experiment Name: At_100uM_NAA__P Parameter: Organism Value: A. thaliana
  misc_feature: MA Experiment 20000445 PARAMETER Experiment Name: At_100uM_NAA__P Parameter: Plant Line Value: WS
  misc_feature: MA Experiment 20000445 PARAMETER Experiment Name: At_100uM_NAA__P Parameter: Timepoint (hr) Value: 6
  misc_feature: MA Experiment 20000445 PARAMETER Experiment Name: At_100uM_NAA__P Parameter: Tissue Value: Aerial
  misc_feature: MA Experiment 20000445 PARAMETER Experiment Name: At_100uM_NAA__P Parameter: Treatment Value: 100uM NAA vs. No Treatment
  misc_feature: MA Experiment ID: 20000452 Result: Down-regulated in Transcription
  misc_feature: MA Experiment 20000452 PARAMETER Experiment Name: At_CS6879_Shoots-Roots_P Parameter: Age (day) Value: 14
  misc_feature: MA Experiment 20000452 PARAMETER Experiment Name: At_CS6879_Shoots-Roots_P Parameter: Organism Value: A. thaliana
  misc_feature: MA Experiment 20000452 PARAMETER Experiment Name: At_CS6879_Shoots-Roots_P Parameter: Plant Line Value: CS6879 vs. WS
  misc_feature: MA Experiment 20000452 PARAMETER Experiment Name: At_CS6879_Shoots-Roots_P Parameter: Tissue Value: Shoots
  misc_feature: MA Experiment ID: 20000453 Result: Up-regulated in Transcription
  misc_feature: MA Experiment 20000453 PARAMETER Experiment Name: At_100uM_ABA_P Parameter: Age (day) Value: 15
  misc_feature: MA Experiment 20000453 PARAMETER Experiment Name: At_100uM_ABA_P Parameter: Organism Value: A. thaliana
  misc_feature: MA Experiment 20000453 PARAMETER Experiment Name: At_100uM_ABA_P Parameter: Plant Line Value: WS
  misc_feature: MA Experiment 20000453 PARAMETER Experiment Name: At_100uM_ABA_P Parameter: Timepoint (hr) Value: 24
  misc_feature: MA Experiment 20000453 PARAMETER Experiment Name: At_100uM_ABA_P Parameter: Tissue Value: Aerial
  misc_feature: MA Experiment 20000453 PARAMETER Experiment Name: At_100uM_ABA_P Parameter: Treatment Value: 100uM ABA vs. No Treatment
  misc_feature: MA Experiment ID: 20000455 Result: Up-regulated in Transcription
  misc_feature: MA Experiment 20000455 PARAMETER Experiment Name: At_100uM_ABA_P Parameter: Age (day) Value: 16
  misc_feature: MA Experiment 20000455 PARAMETER Experiment Name: At_100uM_ABA_P Parameter: Organism Value: A. thaliana
  misc_feature: MA Experiment 20000455 PARAMETER Experiment Name: At_100uM_ABA_P Parameter: Plant Line Value: WS
  misc_feature: MA Experiment 20000455 PARAMETER Experiment Name: At_100uM_ABA_P Parameter: Timepoint (hr) Value: 48
  misc_feature: MA Experiment 20000455 PARAMETER Experiment Name: At_100uM_ABA_P Parameter: Tissue Value: Aerial
  misc_feature: MA Experiment 20000455 PARAMETER Experiment Name: At_100uM_ABA_P Parameter: Treatment Value: 100uM ABA vs. No Treatment
  misc_feature: MA Experiment ID: 20000456 Result: Down-regulated in Transcription
  misc_feature: MA Experiment 20000456 PARAMETER Experiment Name: At_100uM_BA_P Parameter: Age (day) Value: 14
  misc_feature: MA Experiment 20000456 PARAMETER Experiment Name: At_100uM_BA_P Parameter: Organism Value: A. thaliana
  misc_feature: MA Experiment 20000456 PARAMETER Experiment Name: At_100uM_BA_P Parameter: Plant Line Value: WS
  misc_feature: MA Experiment 20000456 PARAMETER Experiment Name: At_100uM_BA_P Parameter: Timepoint (hr) Value: 6
  misc_feature: MA Experiment 20000456 PARAMETER Experiment Name: At_100uM_BA_P Parameter: Tissue Value: Aerial
  misc_feature: MA Experiment 20000456 PARAMETER Experiment Name: At_100uM_BA_P Parameter: Treatment Value: 100uM BA vs. No Treatment
  misc_feature: MA Experiment ID: 20000495 Result: Up-regulated in Transcription
  misc_feature: MA Experiment 20000495 PARAMETER Experiment Name: At_Guard_Cells_P Parameter: Harvest Date Value: 8/2/2002
  misc_feature: MA Experiment 20000495 PARAMETER Experiment Name: At_Guard_Cells_P Parameter: Organism Value: A. thaliana
  misc_feature: MA Experiment 20000495 PARAMETER Experiment Name: At_Guard_Cells_P Parameter: Tissue Value: Guard Cells vs. Leaves
  misc_feature: MA Experiment ID: 20000527 Result: Down-regulated in Transcription
  misc_feature: MA Experiment 20000527 PARAMETER Experiment Name: At_10percent_PEG_P Parameter: Age (day) Value: 20
  misc_feature: MA Experiment 20000527 PARAMETER Experiment Name: At_10percent_PEG_P Parameter: Organism Value: A. thaliana
  misc_feature: MA Experiment 20000527 PARAMETER Experiment Name: At_10percent_PEG_P Parameter: Plant Line Value: WS
  misc_feature: MA Experiment 20000527 PARAMETER Experiment Name: At_10percent_PEG_P Parameter: Timepoint (day) Value: 20
  misc_feature: MA Experiment 20000527 PARAMETER Experiment Name: At_10percent_PEG_P Parameter: Tissue Value: Whole Plant
  misc_feature: MA Experiment 20000527 PARAMETER Experiment Name: At_10percent_PEG_P Parameter: Treatment Value: 10percent PEG vs. No Treatment
  misc_feature: MA Experiment ID: 20000573 Result: Up-regulated in Transcription
  misc_feature: MA Experiment 20000573 PARAMETER Experiment Name: At_100uM_ABA_Mutants__P Parameter: Organism Value: A. thaliana
  misc_feature: MA Experiment 20000573 PARAMETER Experiment Name: At_100uM_ABA_Mutants__P Parameter: Plant Line Value: CS22 vs. Ler wt
  misc_feature: MA Experiment 20000573 PARAMETER Experiment Name: At_100uM_ABA_Mutants__P Parameter: Timepoint (hr) Value: N/A
  misc_feature: MA Experiment 20000573 PARAMETER Experiment Name: At_100uM_ABA_Mutants__P Parameter: Tissue Value: Whole Plant
  misc_feature: MA Experiment 20000573 PARAMETER Experiment Name: At_100uM_ABA_Mutants__P Parameter: Treatment Value: None
  misc_feature: MA Experiment ID: 20000574 Result: Up-regulated in Transcription
  misc_feature: MA Experiment 20000574 PARAMETER Experiment Name: At_100uM_ABA_Mutants__P Parameter: Organism Value: A. thaliana
  misc_feature: MA Experiment 20000574 PARAMETER Experiment Name: At_100uM_ABA_Mutants__P Parameter: Plant Line Value: CS23 vs. Ler wt
  misc_feature: MA Experiment 20000574 PARAMETER Experiment Name: At_100uM_ABA_Mutants__P Parameter: Timepoint (hr) Value: N/A
  misc_feature: MA Experiment 20000574 PARAMETER Experiment Name: At_100uM_ABA_Mutants__P Parameter: Tissue Value: Whole Plant
  misc_feature: MA Experiment 20000574 PARAMETER Experiment Name: At_100uM_ABA_Mutants__P Parameter: Treatment Value: None
  misc_feature: MA Experiment ID: 20000794 Result: Down-regulated in Transcription
  misc_feature: MA Experiment 20000794 PARAMETER Experiment Name: At_Petals_P Parameter: Age (day) Value: 23-25 days
  misc_feature: MA Experiment 20000794 PARAMETER Experiment Name: At_Petals_P Parameter: Plant Line Value: WS
  misc_feature: MA Experiment 20000794 PARAMETER Experiment Name: At_Petals_P Parameter: Tissue Value: Petals vs. Whole plant
  misc_feature: MA Experiment ID: 20001248 Result: Up-regulated in Transcription
  misc_feature: MA Experiment 20001248 PARAMETER Experiment Name: At_Far-red-induction_P Parameter: Age (day) Value: 7
  misc_feature: MA Experiment 20001248 PARAMETER Experiment Name: At_Far-red-induction_P Parameter: Light Value: Far-red vs. White
  misc_feature: MA Experiment 20001248 PARAMETER Experiment Name: At_Far-red-induction_P Parameter: Organism Value: A. thaliana
  misc_feature: MA Experiment 20001248 PARAMETER Experiment Name: At_Far-red-induction_P Parameter: Plant Line Value: Columbia
  misc_feature: MA Experiment 20001248 PARAMETER Experiment Name: At_Far-red-induction_P Parameter: Timepoint (hr) Value: 4
  misc_feature: MA Experiment 20001248 PARAMETER Experiment Name: At_Far-red-induction_P Parameter: Tissue Value: Whole Plant
  misc_feature: MA Experiment ID: 20001450 Result: Up-regulated in Transcription
  misc_feature: MA Experiment 20001450 PARAMETER Experiment Name: At_Far-red-induction_P Parameter: Age (day) Value: 7
  misc_feature: MA Experiment 20001450 PARAMETER Experiment Name: At_Far-red-induction_P Parameter: Light Value: Far-red vs. White
  misc_feature: MA Experiment 20001450 PARAMETER Experiment Name: At_Far-red-induction_P Parameter: Organism Value: A. thaliana
  misc_feature: MA Experiment 20001450 PARAMETER Experiment Name: At_Far-red-induction_P Parameter: Plant Line Value: Columbia
  misc_feature: MA Experiment 20001450 PARAMETER Experiment Name: At_Far-red-induction_P Parameter: Timepoint (hr) Value: 8
  misc_feature: MA Experiment 20001450 PARAMETER Experiment Name: At_Far-red-induction_P Parameter: Tissue Value: Whole Plant
  misc_feature: MA Experiment ID: 20001451 Result: Up-regulated in Transcription
  misc_feature: MA Experiment 20001451 PARAMETER Experiment Name: At_Far-red-induction_P Parameter: Age (day) Value: 7
  misc_feature: MA Experiment 20001451 PARAMETER Experiment Name: At_Far-red-induction_P Parameter: Light Value: Far-red vs. White
  misc_feature: MA Experiment 20001451 PARAMETER Experiment Name: At_Far-red-induction_P Parameter: Organism Value: A. thaliana
  misc_feature: MA Experiment 20001451 PARAMETER Experiment Name: At_Far-red-induction_P Parameter: Plant Line Value: Columbia
  misc_feature: MA Experiment 20001451 PARAMETER Experiment Name: At_Far-red-induction_P Parameter: Timepoint (hr) Value: 24
  misc_feature: MA Experiment 20001451 PARAMETER Experiment Name: At_Far-red-induction_P Parameter: Tissue Value: Whole Plant
  misc_feature: MA Experiment ID: 20001503 Result: Up-regulated in Transcription
  misc_feature: MA Experiment 20001503 PARAMETER Experiment Name: At_Far-red-enriched_P Parameter: Age (day) Value: 7
  misc_feature: MA Experiment 20001503 PARAMETER Experiment Name: At_Far-red-enriched_P Parameter: Light Value: Far-red enriched vs. White
  misc_feature: MA Experiment 20001503 PARAMETER Experiment Name: At_Far-red-enriched_P Parameter: Organism Value: A. thaliana
  misc_feature: MA Experiment 20001503 PARAMETER Experiment Name: At_Far-red-enriched_P Parameter: Plant Line Value: Columbia
  misc_feature: MA Experiment 20001503 PARAMETER Experiment Name: At_Far-red-enriched_P Parameter: Timepoint (day) Value: 3
  misc_feature: MA Experiment 20001503 PARAMETER Experiment Name: At_Far-red-enriched_P Parameter: Tissue Value: Whole Plant
  misc_feature: MA Experiment ID: 20001504 Result: Up-regulated in Transcription
  misc_feature: MA Experiment 20001504 PARAMETER Experiment Name: At_Far-red-enriched_P Parameter: Age (day) Value: 10
  misc_feature: MA Experiment 20001504 PARAMETER Experiment Name: At_Far-red-enriched_P Parameter: Light Value: Far-red enriched vs. White
  misc_feature: MA Experiment 20001504 PARAMETER Experiment Name: At_Far-red-enriched_P Parameter: Organism Value: A. thaliana
  misc_feature: MA Experiment 20001504 PARAMETER Experiment Name: At_Far-red-enriched_P Parameter: Plant Line Value: Columbia
  misc_feature: MA Experiment 20001504 PARAMETER Experiment Name: At_Far-red-enriched_P Parameter: Timepoint (day) Value: 6
  misc_feature: MA Experiment 20001504 PARAMETER Experiment Name: At_Far-red-enriched_P Parameter: Tissue Value: Whole Plant
  misc_feature: MA Experiment ID: 20001554 Result: Down-regulated in Transcription
  misc_feature: MA Experiment 20001554 PARAMETER Experiment Name: At_Drought_Soil_Dry_P Parameter: Age (day) Value: 21
  misc_feature: MA Experiment 20001554 PARAMETER Experiment Name: At_Drought_Soil_Dry_P Parameter: Organism Value: A. thaliana
  misc_feature: MA Experiment 20001554 PARAMETER Experiment Name: At_Drought_Soil_Dry_P Parameter: Plant Line Value: WS
  misc_feature: MA Experiment 20001554 PARAMETER Experiment Name: At_Drought_Soil_Dry_P Parameter: Post Timepoint (hr) Value: None
  misc_feature: MA Experiment 20001554 PARAMETER Experiment Name: At_Drought_Soil_Dry_P Parameter: Post-Treatment Value: None
  misc_feature: MA Experiment 20001554 PARAMETER Experiment Name: At_Drought_Soil_Dry_P Parameter: Timepoint (day) Value: 7
  misc_feature: MA Experiment 20001554 PARAMETER Experiment Name: At_Drought_Soil_Dry_P Parameter: Treatment Value: Drought vs. No Drought
  misc_feature: MA Experiment ID: 20001555 Result: Down-regulated in Transcription
  misc_feature: MA Experiment 20001555 PARAMETER Experiment Name: At_Drought_Soil_Dry_P Parameter: Age (day) Value: 24
  misc_feature: MA Experiment 20001555 PARAMETER Experiment Name: At_Drought_Soil_Dry_P Parameter: Organism Value: A. thaliana
  misc_feature: MA Experiment 20001555 PARAMETER Experiment Name: At_Drought_Soil_Dry_P Parameter: Plant Line Value: WS
  misc_feature: MA Experiment 20001555 PARAMETER Experiment Name: At_Drought_Soil_Dry_P Parameter: Post Timepoint (hr) Value: None
  misc_feature: MA Experiment 20001555 PARAMETER Experiment Name: At_Drought_Soil_Dry_P Parameter: Post-Treatment Value: None
  misc_feature: MA Experiment 20001555 PARAMETER Experiment Name: At_Drought_Soil_Dry_P Parameter: Timepoint (day) Value: 10
  misc_feature: MA Experiment 20001555 PARAMETER Experiment Name: At_Drought_Soil_Dry_P Parameter: Treatment Value: Drought vs. No Drought
  misc_feature: MA Experiment ID: 20001560 Result: Up-regulated in Transcription
  misc_feature: MA Experiment 20001560 PARAMETER Experiment Name: At_Drought_Soil_Dry_P Parameter: Age (day) Value: 28
  misc_feature: MA Experiment 20001560 PARAMETER Experiment Name: At_Drought_Soil_Dry_P Parameter: Organism Value: A. thaliana
  misc_feature: MA Experiment 20001560 PARAMETER Experiment Name: At_Drought_Soil_Dry_P Parameter: Plant Line Value: WS
  misc_feature: MA Experiment 20001560 PARAMETER Experiment Name: At_Drought_Soil_Dry_P Parameter: Post Timepoint (hr) Value: None
  misc_feature: MA Experiment 20001560 PARAMETER Experiment Name: At_Drought_Soil_Dry_P Parameter: Post-Treatment Value: None
  misc_feature: MA Experiment 20001560 PARAMETER Experiment Name: At_Drought_Soil_Dry_P Parameter: Timepoint (day) Value: 14
  misc_feature: MA Experiment 20001560 PARAMETER Experiment Name: At_Drought_Soil_Dry_P Parameter: Treatment Value: Drought vs. No Drought
  misc_feature: MA Experiment ID: 20001761 Result: Up-regulated in Transcription
  misc_feature: MA Experiment 20001761 PARAMETER Experiment Name: At_50mM_NH4NO3_L-to-H_P Parameter: Timepoint (hr) Value: 4
  misc_feature: MA Experiment 20001761 PARAMETER Experiment Name: At_50mM_NH4NO3_L-to-H_P Parameter: Tissue Value: Siliques
  misc_feature: MA Experiment 20001761 PARAMETER Experiment Name: At_50mM_NH4NO3_L-to-H_P Parameter: Treatment Value: 50mM NH4NO3 vs 100mM Mannitol
  misc_feature: MA Experiment ID: 20001770 Result: Up-regulated in Transcription
  misc_feature: MA Experiment 20001770 PARAMETER Experiment Name: At_Far-red-enriched-adult_P Parameter: Age (day) Value: 28
  misc_feature: MA Experiment 20001770 PARAMETER Experiment Name: At_Far-red-enriched-adult_P Parameter: Light Value: Far-red enriched vs. White
  misc_feature: MA Experiment 20001770 PARAMETER Experiment Name: At_Far-red-enriched-adult_P Parameter: Organism Value: A. thaliana
  misc_feature: MA Experiment 20001770 PARAMETER Experiment Name: At_Far-red-enriched-adult_P Parameter: Plant Line Value: Columbia
  misc_feature: MA Experiment 20001770 PARAMETER Experiment Name: At_Far-red-enriched-adult_P Parameter: Timepoint (hr) Value: 8
  misc_feature: MA Experiment 20001770 PARAMETER Experiment Name: At_Far-red-enriched-adult_P Parameter: Tissue Value: Aerial
  misc_feature: MA Experiment ID: 20001771 Result: Up-regulated in Transcription
  misc_feature: MA Experiment 20001771 PARAMETER Experiment Name: At_Far-red-enriched-adult_P Parameter: Age (day) Value: 28
  misc_feature: MA Experiment 20001771 PARAMETER Experiment Name: At_Far-red-enriched-adult_P Parameter: Light Value: Far-red enriched vs. White
  misc_feature: MA Experiment 20001771 PARAMETER Experiment Name: At_Far-red-enriched-adult_P Parameter: Organism Value: A. thaliana
  misc_feature: MA Experiment 20001771 PARAMETER Experiment Name: At_Far-red-enriched-adult_P Parameter: Plant Line Value: Columbia
  misc_feature: MA Experiment 20001771 PARAMETER Experiment Name: At_Far-red-enriched-adult_P Parameter: Timepoint (hr) Value: 16
  misc_feature: MA Experiment 20001771 PARAMETER Experiment Name: At_Far-red-enriched-adult_P Parameter: Tissue Value: Aerial
  misc_feature: MA Experiment ID: 20001910 Result: Down-regulated in Transcription
  misc_feature: MA Experiment 20001910 PARAMETER Experiment Name: At_Drought_Reproduction_P Parameter: Age (day) Value: 37
  misc_feature: MA Experiment 20001910 PARAMETER Experiment Name: At_Drought_Reproduction_P Parameter: Organism Value: A. thaliana
  misc_feature: MA Experiment 20001910 PARAMETER Experiment Name: At_Drought_Reproduction_P Parameter: Plant Line Value: WS
  misc_feature: MA Experiment 20001910 PARAMETER Experiment Name: At_Drought_Reproduction_P Parameter: Timepoint (day) Value: 7
  misc_feature: MA Experiment 20001910 PARAMETER Experiment Name: At_Drought_Reproduction_P Parameter: Tissue Value: Flowers
  misc_feature: MA Experiment 20001910 PARAMETER Experiment Name: At_Drought_Reproduction_P Parameter: Treatment Value: Drought vs. No Drought
atctcacaccaaaacacaaagctctcatcttcttttagtttccaaactcacccccacaactttcatttctatcaaccaaacccaaatgggtccaagttcgagcctcaccaccatcgtggcgactgttcttcttgtgacattgttcggttcggcctacgcaagcaacttcttcgacgagtttgacctcacttggggtgaccacagaggcaaaatcttcaacggaggaaatatgctgtctttgtcgctggaccaggtttccgggtcaggtttcaaatccaaaaaagagtatttggtcggtcggatcgatatgcagctcaaacttgtcgccggaaactcggccggcaccgtcactgcttactacttgtcttcacaaggagcaacacatgacgagatagactttgagtttctaggtaacgagacagggaagccttatgttcttcacaccaatgtctttgctcaagggaaaggagacagagagcaacagttttatctctggttcgacccaaccaagaacttccacacttactccattgtctggagaccccaacacatcatattcttggtggacaatttacccattagagtgttcaacaatgcagagaagctcggcgttcctttcccaaagagtcaacccatgaggatctactctagcctgtggaatgcagacgattgggccacgagaggtggtctagtcaagactgactggtccaaggctcctttcacagcttactacagaggattcaacgctgcggcttgcacagcctcttcaggatgtgaccctaaattcaagagttcttttggtgatggtaaattgcaagtggcaaccgagctcaatgcttatggcaggaggagactcagatgggttcagaaatacttcatgatctataattattgctctgatctcaaaaggttccctcgtggattccctccagaatgcaagaagtccagagtctgatgaacacatattacctcatatttctctgcttgtttgatgcaattcttaaattcctctgttattccattgtacattgtcaagatcaataaagcattcctggtttcaaaat

SEQ ID NO: 88678 - protein, 317 aa, Arabidopsis thaliana
  peptide (1)..(317): Ceres Seq. ID no. 12711516
  misc_feature (56)..(237): Pfam Name: Glycosyl hydrolases family 16 Pfam Description: Glycosyl hydrolases family 16
  misc_feature (29)..(317): Homolog of NCBI NO: 15236412 NR Description: xyloglucan endotransglycosylase (XTR7); protein At4g14130.1, supported by cDNA: 33554., supported by cDNA: supported by cDNA: gi_15028016 [Arabidopsis thaliana]
  misc_feature (29)..(317): Homolog of NCBI NO: 38605153 NR Description: Probable xyloglucan
  misc_feature (37)..(317): Homolog of NCBI NO: 18403867 NR Description: xyloglucan endotransglycosylase, putative; id: At3g23730.1, supported by cDNA: 10852. [Arabidopsis thaliana]
  misc_feature (37)..(317): Homolog of NCBI NO: 21536689 NR Description: xyloglucan endotransglycosylase, putative
  misc_feature (29)..(314): Homolog of NCBI NO: 543905 NR Description: Brassinosteroid-regulated protein BRU1 precursor
  misc_feature (35)..(312): Homolog of NCBI NO: 8886867 NR Description: xyloglucan endotransglycosylase XET2 [Asparagus
  misc_feature (32)..(313): Homolog of NCBI NO: 8886865 NR Description: xyloglucan endotransglycosylase XET1 [Asparagus
SHTKTQSSHLLLVSKLTPTTFISINQTQMGPSSSLTTIVATVLLVTLFGSAYASNFFDEFDLTWGDHRGKIFNGGNMLSLSLDQVSGSGFKSKKEYLVGRIDMQLKLVAGNSAGTVTAYYLSSQGATHDEIDFEFLGNETGKPYVLHTNVFAQGKGDREQQFYLWFDPTKNFHTYSIVWRPQHIIFLVDNLPIRVFNNAEKLGVPFPKSQPMRIYSSLWNADDWATRGGLVKTDWSKAPFTAYYRGFNAAACTASSGCDPKFKSSFGDGKLQVATELNAYGRRRLRWVQKYFMIYNYCSDLKRFPRGFPPECKKSRV

SEQ ID NO: 88679 - protein, 289 aa, Arabidopsis thaliana
  peptide (1)..(289): Ceres Seq. ID no. 12711517
  misc_feature (28)..(209): Pfam Name: Glycosyl hydrolases family 16 Pfam Description: Glycosyl hydrolases family 16
  misc_feature (1)..(289): Homolog of NCBI NO: 15236412 NR Description: xyloglucan endotransglycosylase (XTR7); protein At4g14130.1, supported by cDNA: 33554., supported by cDNA: supported by cDNA: gi_15028016 [Arabidopsis thaliana]
  misc_feature (1)..(289): Homolog of NCBI NO: 38605153 NR Description: Probable xyloglucan
  misc_feature (9)..(289): Homolog of NCBI NO: 18403867 NR Description: xyloglucan endotransglycosylase, putative; id: At3g23730.1, supported by cDNA: 10852. [Arabidopsis thaliana]
  misc_feature (9)..(289): Homolog of NCBI NO: 21536689 NR Description: xyloglucan endotransglycosylase, putative
  misc_feature (1)..(286): Homolog of NCBI NO: 543905 NR Description: Brassinosteroid-regulated protein BRU1 precursor
  misc_feature (7)..(284): Homolog of NCBI NO: 8886867 NR Description: xyloglucan endotransglycosylase XET2 [Asparagus
  misc_feature (4)..(285): Homolog of NCBI NO: 8886865 NR Description: xyloglucan endotransglycosylase XET1 [Asparagus
MGPSSSLTTIVATVLLVTLFGSAYASNFFDEFDLTWGDHRGKIFNGGNMLSLSLDQVSGSGFKSKKEYLVGRIDMQLKLVAGNSAGTVTAYYLSSQGATHDEIDFEFLGNETGKPYVLHTNVFAQGKGDREQQFYLWFDPTKNFHTYSIVWRPQHIIFLVDNLPIRVFNNAEKLGVPFPKSQPMRIYSSLWNADDWATRGGLVKTDWSKAPFTAYYRGFNAAACTASSGCDPKFKSSFGDGKLQVATELNAYGRRRLRWVQKYFMIYNYCSDLKRFPRGFPPECKKSRV

SEQ ID NO: 88680 - protein, 241 aa, Arabidopsis thaliana
  peptide (1)..(241): Ceres Seq. ID no. 12711518
  misc_feature (1)..(161): Pfam Name: Glycosyl hydrolases family 16 Pfam Description: Glycosyl hydrolases family 16
  misc_feature (1)..(241): Homolog of NCBI NO: 15236412 NR Description: xyloglucan endotransglycosylase (XTR7); protein At4g14130.1, supported by cDNA: 33554., supported by cDNA: supported by cDNA: gi_15028016 [Arabidopsis thaliana]
  misc_feature (1)..(241): Homolog of NCBI NO: 38605153 NR Description: Probable xyloglucan
  misc_feature (1)..(241): Homolog of NCBI NO: 18403867 NR Description: xyloglucan endotransglycosylase, putative; id: At3g23730.1, supported by cDNA: 10852. [Arabidopsis thaliana]
  misc_feature (1)..(241): Homolog of NCBI NO: 21536689 NR Description: xyloglucan endotransglycosylase, putative
  misc_feature (1)..(238): Homolog of NCBI NO: 543905 NR Description: Brassinosteroid-regulated protein BRU1 precursor
  misc_feature (1)..(236): Homolog of NCBI NO: 8886867 NR Description: xyloglucan endotransglycosylase XET2 [Asparagus
  misc_feature (1)..(237): Homolog of NCBI NO: 8886865 NR Description: xyloglucan endotransglycosylase XET1 [Asparagus
MLSLSLDQVSGSGFKSKKEYLVGRIDMQLKLVAGNSAGTVTAYYLSSQGATHDEIDFEFLGNETGKPYVLHTNVFAQGKGDREQQFYLWFDPTKNFHTYSIVWRPQHIIFLVDNLPIRVFNNAEKLGVPFPKSQPMRIYSSLWNADDWATRGGLVKTDWSKAPFTAYYRGFNAAACTASSGCDPKFKSSFGDGKLQVATELNAYGRRRLRWVQKYFMIYNYCSDLKRFPRGFPPECKKSRV

SEQ ID NO: 88681 - DNA, 1434 bp, Arabidopsis thaliana
  misc_feature (1)..(1434): Ceres Seq. ID no. 12711531
  misc_feature: MA Experiment ID: 20000327 Result: Up-regulated in Transcription
  misc_feature: MA Experiment 20000327 PARAMETER Experiment Name: At_42deg_Heat_Sub_P Parameter: Age (day) Value: 14
  misc_feature: MA Experiment 20000327 PARAMETER Experiment Name: At_42deg_Heat_Sub_P Parameter: Organism Value: A. thaliana
  misc_feature: MA Experiment 20000327 PARAMETER Experiment Name: At_42deg_Heat_Sub_P Parameter: Plant Line Value: WS
  misc_feature: MA Experiment 20000327 PARAMETER Experiment Name: At_42deg_Heat_Sub_P Parameter: Temperature (deg C) Value: 42 vs. 22
  misc_feature: MA Experiment 20000327 PARAMETER Experiment Name: At_42deg_Heat_Sub_P Parameter: Timepoint (hr) Value: 1
  misc_feature: MA Experiment 20000327 PARAMETER Experiment Name: At_42deg_Heat_Sub_P Parameter: Tissue Value: Aerial
atgcacttaccatcttcctcttccttgtactcgtctcctacgaagagtctattcgcaatgttcttgaaagctcgagctttatcagtaactacacagaatcctcctgatctcttctcgcttctacatcattctccaaacgctaaacatctacgccatctccacgctcaccttcttcgtacatttctctattccaacgttgtgctcagctccaagctcgtcctcgcttattccaagctgaaccatctctttcctacttcgctttctgtcttctggcacatgccttatcgcaacattttctcttggaatataatcatcggtgagttctctagatcgggttttgcttccaagtcaattgatttgtttcttcgtatgtggcgagagtcttgtgttagaccggatgattttacgcttcctcttattctacgagcttgctctgcgtctagggaagcgaaatctggagatttgattcatgttctgtgtttgaaacttgggtttagctcaagtttgtttgttagttcggctttagtgataatgtatgtagatatggggaaacttttacatgcacgtaagttgttcgacgatatgcctgtgagagactctgttctttatacagctatgtttggtgggtatgttcagcaaggagaagctatgttgggtttagccatgttcagagaaatggggtattctggatttgcgctggattcagtggtgatggtgagtttacttatggcttgtggacaacttggagcgttgaagcacgggaagagcgtccatggatggtgtatcaggagatgctcctgcttgggcttgaatctcggcaatgctataacagatatgtatgtaaagtgctcgatactggactatgcgcacactgtatttgtaaatatgtcgagacgagatgtgatctcttggagctcgcttattttggggtatggtttggatggagacgtggtaatgtcttttaaactctttgatgagatgcttaaggaaggaattgaacccaatgctgtcacttttcttggtgtcttatcagcctgtgcccatggcggtcttgtggaaaaatcttggctgtatttcagactaatgcaggaatataatatagttcctgaactgaaacactatgctagtgtggcggattgtatgtctcgagcaggtcttctggaggaagcagagaagtttctggaagatatgcccgtgaaacctgatgaggctgttatgggtgcggtgttgagtgggtgcaaggtgtatggaaatgtagaagttggggaaagagtggcgagggagctgattcaacttaagccgagaaaagctagctactatgtaacgttggccggtctatattcagctgcaggtcggtttgatgaagctgagagtctgaggcagtggatgaaggagaaacagatttctaaggttcccgggtgtagctcaatatga

SEQ ID NO: 88682 - protein, 477 aa, Arabidopsis thaliana
  peptide (1)..(477): Ceres Seq. ID no. 12711532
  misc_feature (99)..(133): Pfam Name: PPR repeat Pfam Description: PPR repeat
  misc_feature (201)..(477): Homolog of NCBI NO: 15236432 NR Description: hypothetical protein; protein id: At4g14170.1
  misc_feature (20)..(412): Homolog of NCBI NO: 15236432 NR Description: hypothetical protein; protein id: At4g14170.1
  misc_feature (179)..(477): Homolog of NCBI NO: 15239745 NR Description: selenium-binding protein-like; protein id:
  misc_feature (12)..(226): Homolog of NCBI NO: 15239745 NR Description: selenium-binding protein-like; protein id:
  misc_feature (53)..(477): Homolog of NCBI NO: 18483237 NR Description: putative vegetative storage protein [Sorghum
  misc_feature (8)..(477): Homolog of NCBI NO: 38175558 NR Description: putative pentatricopeptide (PPR)
  misc_feature (51)..(477): Homolog of NCBI NO: 15226150 NR Description: hypothetical protein; protein id: At2g33680.1
  misc_feature (24)..(477): Homolog of NCBI NO: 15226299 NR Description: hypothetical protein; protein id: At2g01510.1
  misc_feature (9)..(477): Homolog of NCBI NO: 34906110 NR Description: P0020E09.15 [Oryza sativa (japonica
  misc_feature (51)..(477): Homolog of NCBI NO: 15231358 NR Description: hypothetical protein; protein id: At3g13770.1
MHLPSSSSLYSSPTKSLFAMFLKARALSVTTQNPPDLFSLLHHSPNAKHLRHLHAHLLRTFLYSNVVLSSKLVLAYSKLNHLFPTSLSVFWHMPYRNIFSWNIIIGEFSRSGFASKSIDLFLRMWRESCVRPDDFTLPLILRACSASREAKSGDLIHVLCLKLGFSSSLFVSSALVIMYVDMGKLLHARKLFDDMPVRDSVLYTAMFGGYVQQGEAMLGLAMFREMGYSGFALDSVVMVSLLMACGQLGALKHGKSVHGWCIRRCSCLGLNLGNAITDMYVKCSILDYAHTVFVNMSRRDVISWSSLILGYGLDGDVVMSFKLFDEMLKEGIEPNAVTFLGVLSACAHGGLVEKSWLYFRLMQEYNIVPELKHYASVADCMSRAGLLEEAEKFLEDMPVKPDEAVMGAVLSGCKVYGNVEVGERVARELIQLKPRKASYYVTLAGLYSAAGRFDEAESLRQWMKEKQISKVPGCSSI

SEQ ID NO: 88683 - protein, 458 aa, Arabidopsis thaliana
  peptide (1)..(458): Ceres Seq. ID no. 12711533
  misc_feature (80)..(114): Pfam Name: PPR repeat Pfam Description: PPR repeat
  misc_feature (182)..(458): Homolog of NCBI NO: 15236432 NR Description: hypothetical protein; protein id: At4g14170.1
  misc_feature (1)..(393): Homolog of NCBI NO: 15236432 NR Description: hypothetical protein; protein id: At4g14170.1
  misc_feature (160)..(458): Homolog of NCBI NO: 15239745 NR Description: selenium-binding protein-like; protein id:
  misc_feature (1)..(207): Homolog of NCBI NO: 15239745 NR Description: selenium-binding protein-like; protein id:
  misc_feature (34)..(458): Homolog of NCBI NO: 18483237 NR Description: putative vegetative storage protein [Sorghum
  misc_feature (1)..(458): Homolog of NCBI NO: 38175558 NR Description: putative pentatricopeptide (PPR)
  misc_feature (32)..(458): Homolog of NCBI NO: 15226150 NR Description: hypothetical protein; protein id: At2g33680.1
  misc_feature (5)..(458): Homolog of NCBI NO: 15226299 NR Description: hypothetical protein; protein id: At2g01510.1
  misc_feature (1)..(458): Homolog of NCBI NO: 34906110 NR Description: P0020E09.15 [Oryza sativa (japonica
  misc_feature (32)..(458): Homolog of NCBI NO: 15231358 NR Description: hypothetical protein; protein id: At3g13770.1
MFLKARALSVTTQNPPDLFSLLHHSPNAKHLRHLHAHLLRTFLYSNVVLSSKLVLAYSKLNHLFPTSLSVFWHMPYRNIFSWNIIIGEFSRSGFASKSIDLFLRMWRESCVRPDDFTLPLILRACSASREAKSGDLIHVLCLKLGFSSSLFVSSALVIMYVDMGKLLHARKLFDDMPVRDSVLYTAMFGGYVQQGEAMLGLAMFREMGYSGFALDSVVMVSLLMACGQLGALKHGKSVHGWCIRRCSCLGLNLGNAITDMYVKCSILDYAHTVFVNMSRRDVISWSSLILGYGLDGDVVMSFKLFDEMLKEGIEPNAVTFLGVLSACAHGGLVEKSWLYFRLMQEYNIVPELKHYASVADCMSRAGLLEEAEKFLEDMPVKPDEAVMGAVLSGCKVYGNVEVGERVARELIQLKPRKASYYVTLAGLYSAAGRFDEAESLRQWMKEKQISKVPGCSSI

SEQ ID NO: 88684 - protein, 385 aa, Arabidopsis thaliana
  peptide (1)..(385): Ceres Seq. ID no. 12711534
  misc_feature (7)..(41): Pfam Name: PPR repeat Pfam Description: PPR repeat
  misc_feature (109)..(385): Homolog of NCBI NO: 15236432 NR Description: hypothetical protein; protein id: At4g14170.1
  misc_feature (1)..(320): Homolog of NCBI NO: 15236432 NR Description: hypothetical protein; protein id: At4g14170.1
  misc_feature (87)..(385): Homolog of NCBI NO: 15239745 NR Description: selenium-binding protein-like; protein id:
  misc_feature (1)..(134): Homolog of NCBI NO: 15239745 NR Description: selenium-binding protein-like; protein id:
  misc_feature (1)..(385): Homolog of NCBI NO: 18483237 NR Description: putative vegetative storage protein [Sorghum
  misc_feature (1)..(385): Homolog of NCBI NO: 38175558 NR Description: putative pentatricopeptide (PPR)
  misc_feature (1)..(385): Homolog of NCBI NO: 15226150 NR Description: hypothetical protein; protein id: At2g33680.1
  misc_feature (1)..(385): Homolog of NCBI NO: 15226299 NR Description: hypothetical protein; protein id: At2g01510.1
  misc_feature (1)..(385): Homolog of NCBI NO: 34906110 NR Description: P0020E09.15 [Oryza sativa (japonica
  misc_feature (1)..(385): Homolog of NCBI NO: 15231358 NR Description: hypothetical protein; protein id: At3g13770.1
MPYRNIFSWNIIIGEFSRSGFASKSIDLFLRMWRESCVRPDDFTLPLILRACSASREAKSGDLIHVLCLKLGFSSSLFVSSALVIMYVDMGKLLHARKLFDDMPVRDSVLYTAMFGGYVQQGEAMLGLAMFREMGYSGFALDSVVMVSLLMACGQLGALKHGKSVHGWCIRRCSCLGLNLGNAITDMYVKCSILDYAHTVFVNMSRRDVISWSSLILGYGLDGDVVMSFKLFDEMLKEGIEPNAVTFLGVLSACAHGGLVEKSWLYFRLMQEYNIVPELKHYASVADCMSRAGLLEEAEKFLEDMPVKPDEAVMGAVLSGCKVYGNVEVGERVARELIQLKPRKASYYVTLAGLYSAAGRFDEAESLRQWMKEKQISKVPGCSSI

SEQ ID NO: 88685 - DNA, 687 bp, Arabidopsis thaliana
  misc_feature (1)..(687): Ceres Seq. ID no. 12711546
  misc_feature: MA Experiment ID: 20000169 Result: Up-regulated in Transcription
  misc_feature: MA Experiment 20000169 PARAMETER Experiment Name: At_100uM_ABA_P Parameter: Age (day) Value: 14
  misc_feature: MA Experiment 20000169 PARAMETER Experiment Name: At_100uM_ABA_P Parameter: Organism Value: A. thaliana
  misc_feature: MA Experiment 20000169 PARAMETER Experiment Name: At_100uM_ABA_P Parameter: Plant Line Value: WS
  misc_feature: MA Experiment 20000169 PARAMETER Experiment Name: At_100uM_ABA_P Parameter: Timepoint (hr) Value: 6
  misc_feature: MA Experiment 20000169 PARAMETER Experiment Name: At_100uM_ABA_P Parameter: Tissue Value: Aerial
  misc_feature: MA Experiment 20000169 PARAMETER Experiment Name: At_100uM_ABA_P Parameter: Treatment Value: 100uM ABA vs. No Treatment
  misc_feature: MA Experiment ID: 20000171 Result: Up-regulated in Transcription
  misc_feature: MA Experiment 20000171 PARAMETER Experiment Name: At_42deg_Heat_P Parameter: Age (day) Value: 14
  misc_feature: MA Experiment 20000171 PARAMETER Experiment Name: At_42deg_Heat_P Parameter: Organism Value: A. thaliana
  misc_feature: MA Experiment 20000171 PARAMETER Experiment Name: At_42deg_Heat_P Parameter: Plant Line Value: WS
  misc_feature: MA Experiment 20000171 PARAMETER Experiment Name: At_42deg_Heat_P Parameter: Temperature (deg C) Value: 42 vs. 22
  misc_feature: MA Experiment 20000171 PARAMETER Experiment Name: At_42deg_Heat_P Parameter: Timepoint (hr) Value: 1
  misc_feature: MA Experiment 20000171 PARAMETER Experiment Name: At_42deg_Heat_P Parameter: Tissue Value: Aerial
  misc_feature: MA Experiment ID: 20000179 Result: Up-regulated in Transcription
  misc_feature: MA Experiment 20000179 PARAMETER Experiment Name: At_Germinating_Seeds_P Parameter: Age (hr) Value: 6 vs. 0
  misc_feature: MA Experiment 20000179 PARAMETER Experiment Name: At_Germinating_Seeds_P Parameter: Tissue Value: Germinating Seeds
  misc_feature: MA Experiment ID: 20000214 Result: Down-regulated in Transcription
  misc_feature: MA Experiment 20000214 PARAMETER Experiment Name: At_4deg_Cold_P Parameter: Timepoint (hr) Value: 6
  misc_feature: MA Experiment ID: 20000227 Result: Down-regulated in Transcription
  misc_feature: MA Experiment 20000227 PARAMETER Experiment Name: At_Root-Tips-vs-Tops_P Parameter: Tissue Value: Root Tips vs. Root Tops
  misc_feature: MA Experiment ID: 20000234 Result: Down-regulated in Transcription
  misc_feature: MA Experiment 20000234 PARAMETER Experiment Name: At_Siliques_P Parameter: Age (day) Value: 21
  misc_feature: MA Experiment 20000234 PARAMETER Experiment Name: At_Siliques_P Parameter: Organism Value: A. thaliana
  misc_feature: MA Experiment 20000234 PARAMETER Experiment Name: At_Siliques_P Parameter: Plant Line Value: WS
  misc_feature: MA Experiment 20000234 PARAMETER Experiment Name: At_Siliques_P Parameter: Tissue Value: Less Than 5mm Siliques vs. Whole Plant
  misc_feature: MA Experiment ID: 20000267 Result: Up-regulated in Transcription
  misc_feature: MA Experiment 20000267 PARAMETER Experiment Name: At_Drought_P Parameter: Age (day) Value: 7
  misc_feature: MA Experiment 20000267 PARAMETER Experiment Name: At_Drought_P Parameter: Organism Value: A. thaliana
  misc_feature: MA Experiment 20000267 PARAMETER Experiment Name: At_Drought_P Parameter: Plant Line Value: WS
  misc_feature: MA Experiment 20000267 PARAMETER Experiment Name: At_Drought_P Parameter: Timepoint (hr) Value: 6
  misc_feature: MA Experiment 20000267 PARAMETER Experiment Name: At_Drought_P Parameter: Tissue Value: Whole Plant
  misc_feature: MA Experiment 20000267 PARAMETER Experiment Name: At_Drought_P Parameter: Treatment Value: Drought vs. No Drought
  misc_feature: MA Experiment ID: 20000286 Result: Down-regulated in Transcription
  misc_feature: MA Experiment 20000286 PARAMETER Experiment Name: At_Open_Flower_P Parameter: Age (day) Value: 21
  misc_feature: MA Experiment 20000286 PARAMETER Experiment Name: At_Open_Flower_P Parameter: Plant Line Value: WS
  misc_feature: MA Experiment 20000286 PARAMETER Experiment Name: At_Open_Flower_P Parameter: Tissue Value: Half Open vs. Whole Plant
  misc_feature: MA Experiment ID: 20000437 Result: Up-regulated in Transcription
  misc_feature: MA Experiment 20000437 PARAMETER Experiment Name: At_Drought_P Parameter: Age (day) Value: 8
  misc_feature: MA Experiment 20000437 PARAMETER Experiment Name: At_Drought_P Parameter: Organism Value: A. thaliana
  misc_feature: MA Experiment 20000437 PARAMETER Experiment Name: At_Drought_P Parameter: Plant Line Value: WS
  misc_feature: MA Experiment 20000437 PARAMETER Experiment Name: At_Drought_P Parameter: Timepoint (hr) Value: 24
  misc_feature: MA Experiment 20000437 PARAMETER Experiment Name: At_Drought_P Parameter: Tissue Value: Whole Plant
  misc_feature: MA Experiment 20000437 PARAMETER Experiment Name: At_Drought_P Parameter: Treatment Value: Drought vs. No Drought
  misc_feature: MA Experiment ID: 20000453 Result: Up-regulated in Transcription
  misc_feature: MA Experiment 20000453 PARAMETER Experiment Name: At_100uM_ABA_P Parameter: Age (day) Value: 15
  misc_feature: MA Experiment 20000453 PARAMETER Experiment Name: At_100uM_ABA_P Parameter: Organism Value: A. thaliana
  misc_feature: MA Experiment 20000453 PARAMETER Experiment Name: At_100uM_ABA_P Parameter: Plant Line Value: WS
  misc_feature: MA Experiment 20000453 PARAMETER Experiment Name: At_100uM_ABA_P Parameter: Timepoint (hr) Value: 24
  misc_feature: MA Experiment 20000453 PARAMETER Experiment Name: At_100uM_ABA_P Parameter: Tissue Value: Aerial
  misc_feature: MA Experiment 20000453 PARAMETER Experiment Name: At_100uM_ABA_P Parameter: Treatment Value: 100uM ABA vs. No Treatment
  misc_feature: MA Experiment ID: 20000794 Result: Down-regulated in Transcription
  misc_feature: MA Experiment 20000794 PARAMETER Experiment Name: At_Petals_P Parameter: Age (day) Value: 23-25 days
  misc_feature: MA Experiment 20000794 PARAMETER Experiment Name: At_Petals_P Parameter: Plant Line Value: WS
  misc_feature: MA Experiment 20000794 PARAMETER Experiment Name: At_Petals_P Parameter: Tissue Value: Petals vs. Whole plant
  misc_feature: MA Experiment ID: 20001459 Result: Down-regulated in Transcription
  misc_feature: MA Experiment 20001459 PARAMETER Experiment Name: At_50mM_NH4NO3_L-to-H_P Parameter: Age (day) Value: Undefined
  misc_feature: MA Experiment 20001459 PARAMETER Experiment Name: At_50mM_NH4NO3_L-to-H_P Parameter: Organism Value: Undefined
  misc_feature: MA Experiment 20001459 PARAMETER Experiment Name: At_50mM_NH4NO3_L-to-H_P Parameter: Plant Line Value: Undefined
  misc_feature: MA Experiment 20001459 PARAMETER Experiment Name: At_50mM_NH4NO3_L-to-H_P Parameter: Timepoint (hr) Value: 4
  misc_feature: MA Experiment 20001459 PARAMETER Experiment Name: At_50mM_NH4NO3_L-to-H_P Parameter: Tissue Value: Siliques
  misc_feature: MA Experiment 20001459 PARAMETER Experiment Name: At_50mM_NH4NO3_L-to-H_P Parameter: Treatment Value: 50mM NH4NO3 vs. 100mM Manitol
  misc_feature: MA Experiment ID: 20001554 Result: Up-regulated in Transcription
  misc_feature: MA Experiment 20001554 PARAMETER Experiment Name: At_Drought_Soil_Dry_P Parameter: Age (day) Value: 21
  misc_feature: MA Experiment 20001554 PARAMETER Experiment Name: At_Drought_Soil_Dry_P Parameter: Organism Value: A. thaliana
  misc_feature: MA Experiment 20001554 PARAMETER Experiment Name: At_Drought_Soil_Dry_P Parameter: Plant Line Value: WS
  misc_feature: MA Experiment 20001554 PARAMETER Experiment Name: At_Drought_Soil_Dry_P Parameter: Post Timepoint (hr) Value: None
  misc_feature: MA Experiment 20001554 PARAMETER Experiment Name: At_Drought_Soil_Dry_P Parameter: Post-Treatment Value: None
  misc_feature: MA Experiment 20001554 PARAMETER Experiment Name: At_Drought_Soil_Dry_P Parameter: Timepoint (day) Value: 7
  misc_feature: MA Experiment 20001554 PARAMETER Experiment Name: At_Drought_Soil_Dry_P Parameter: Treatment Value: Drought vs. No Drought
  misc_feature: MA Experiment ID: 20001555 Result: Up-regulated in Transcription
  misc_feature: MA Experiment 20001555 PARAMETER Experiment Name: At_Drought_Soil_Dry_P Parameter: Age (day) Value: 24
  misc_feature: MA Experiment 20001555 PARAMETER Experiment Name: At_Drought_Soil_Dry_P Parameter: Organism Value: A. thaliana
  misc_feature: MA Experiment 20001555 PARAMETER Experiment Name: At_Drought_Soil_Dry_P Parameter: Plant Line Value: WS
  misc_feature: MA Experiment 20001555 PARAMETER Experiment Name: At_Drought_Soil_Dry_P Parameter: Post Timepoint (hr) Value: None
  misc_feature: MA Experiment 20001555 PARAMETER Experiment Name: At_Drought_Soil_Dry_P Parameter: Post-Treatment Value: None
  misc_feature: MA Experiment 20001555 PARAMETER Experiment Name: At_Drought_Soil_Dry_P Parameter: Timepoint (day) Value: 10
  misc_feature: MA Experiment 20001555 PARAMETER Experiment Name: At_Drought_Soil_Dry_P Parameter: Treatment Value: Drought vs. No Drought
  misc_feature: MA Experiment ID: 20001556 Result: Up-regulated in Transcription
  misc_feature: MA Experiment 20001556 PARAMETER Experiment Name: At_Drought_Soil_Dry_P Parameter: Age (day) Value: 26
  misc_feature: MA Experiment 20001556 PARAMETER Experiment Name: At_Drought_Soil_Dry_P Parameter: Organism Value: A. thaliana
  misc_feature: MA Experiment 20001556 PARAMETER Experiment Name: At_Drought_Soil_Dry_P Parameter: Plant Line Value: WS
  misc_feature: MA Experiment 20001556 PARAMETER Experiment Name: At_Drought_Soil_Dry_P Parameter: Post Timepoint (hr) Value: None
  misc_feature: MA Experiment 20001556 PARAMETER Experiment Name: At_Drought_Soil_Dry_P Parameter: Post-Treatment Value: None
  misc_feature: MA Experiment 20001556 PARAMETER Experiment Name: At_Drought_Soil_Dry_P Parameter: Timepoint (day) Value: 12
  misc_feature: MA Experiment 20001556 PARAMETER Experiment Name: At_Drought_Soil_Dry_P Parameter: Treatment Value: Drought vs. No Drought
  misc_feature: MA Experiment ID: 20001557 Result: Down-regulated in Transcription
  misc_feature: MA Experiment 20001557 PARAMETER Experiment Name: At_Drought_Soil_Dry_P Parameter: Age (day) Value: 27
  misc_feature: MA Experiment 20001557 PARAMETER Experiment Name: At_Drought_Soil_Dry_P Parameter: Organism Value: A. thaliana
  misc_feature: MA Experiment 20001557 PARAMETER Experiment Name: At_Drought_Soil_Dry_P Parameter: Plant Line Value: WS
  misc_feature: MA Experiment 20001557 PARAMETER Experiment Name: At_Drought_Soil_Dry_P Parameter: Post Timepoint (hr) Value: 3
  misc_feature: MA Experiment 20001557 PARAMETER Experiment Name: At_Drought_Soil_Dry_P Parameter: Post-Treatment Value: Re-Water vs. No Drought
  misc_feature: MA Experiment 20001557 PARAMETER Experiment Name: At_Drought_Soil_Dry_P Parameter: Timepoint (day) Value: 13
  misc_feature: MA Experiment 20001557 PARAMETER Experiment Name: At_Drought_Soil_Dry_P Parameter: Treatment Value: Drought vs. No Drought
  misc_feature: MA Experiment ID: 20001558 Result: Down-regulated in Transcription
  misc_feature: MA Experiment 20001558 PARAMETER Experiment Name: At_Drought_Soil_Dry_P Parameter: Age (day) Value: 27
  misc_feature: MA Experiment 20001558 PARAMETER Experiment Name: At_Drought_Soil_Dry_P Parameter: Organism Value: A. thaliana
  misc_feature: MA Experiment 20001558 PARAMETER Experiment Name: At_Drought_Soil_Dry_P Parameter: Plant Line Value: WS
  misc_feature: MA Experiment 20001558 PARAMETER Experiment Name: At_Drought_Soil_Dry_P Parameter: Post Timepoint (hr) Value: 6
  misc_feature: MA Experiment 20001558 PARAMETER Experiment Name: At_Drought_Soil_Dry_P Parameter: Post-Treatment Value: Re-Water vs. No Drought
  misc_feature: MA Experiment 20001558 PARAMETER Experiment Name: At_Drought_Soil_Dry_P Parameter: Timepoint (day) Value: 13
  misc_feature: MA Experiment 20001558 PARAMETER Experiment Name: At_Drought_Soil_Dry_P Parameter: Treatment Value: Drought vs. No Drought
  misc_feature: MA Experiment ID: 20001560 Result: Down-regulated in Transcription
  misc_feature: MA Experiment 20001560 PARAMETER Experiment Name: At_Drought_Soil_Dry_P Parameter: Age (day) Value: 28
  misc_feature: MA Experiment 20001560 PARAMETER Experiment Name: At_Drought_Soil_Dry_P Parameter: Organism Value: A. thaliana
  misc_feature: MA Experiment 20001560 PARAMETER Experiment Name: At_Drought_Soil_Dry_P Parameter: Plant Line Value: WS
  misc_feature: MA Experiment 20001560 PARAMETER Experiment Name: At_Drought_Soil_Dry_P Parameter: Post Timepoint (hr) Value: None
  misc_feature: MA Experiment 20001560 PARAMETER Experiment Name: At_Drought_Soil_Dry_P Parameter: Post-Treatment Value: None
  misc_feature: MA Experiment 20001560 PARAMETER Experiment Name: At_Drought_Soil_Dry_P Parameter: Timepoint (day) Value: 14
  misc_feature: MA Experiment 20001560 PARAMETER Experiment Name: At_Drought_Soil_Dry_P Parameter: Treatment Value: Drought vs. No Drought
gagactcgctctaagacccagtttgactcgttgatcaacgaaagtgtgagtttgaggtgaaagatgacggcgacgatagatcggaggttatcaacgctgaatccaaacgcgccggtgtttgatccggtggaatttcgtgaggtggaggatttttcaccgaaatggtgggatctagtaacgacttcgaaatggttccgtgacttttggctcagtgctaactctgagaatgagttcctcggcggcgacgatttctcagttatggaagaagagttcgaggagatgatcgcatcgtctgatggtggatccatggctgatacagttacagaagcagatgtggctagttatttgaagatgcttttgaacatagcggagtctacgaaagagaagatttatagatcgaaggtttcgtcttgttcaccaaagtataatcagaagaagtacatgaatccgaactttaattgtcgccggaatcatcatatctatcagccacggtgaagcttctagaaggaacaaagctcttcttcttcttctttcgagatgataatcagagtcgtgtctgtgtttatggctgaatctgatcttttctgctttcttgttttttgtaattctgtgaatattcctactttctataataacatcactttatgttatgagcataaccaaattgaaatcgaaccaggtcgaatc

SEQ ID NO: 88686 - protein, 143 aa, Arabidopsis thaliana; identical to SEQ ID NO: 21510
  peptide (1)..(143): Ceres Seq. ID no. 12711547
  misc_feature (1)..(143): Homolog of NCBI NO: 18414176 NR Description: Expressed protein; protein id: At4g14270.1, by cDNA: 30129., supported by cDNA: gi_15028002, supported by gi_20259214 [Arabidopsis thaliana] >gi|15028003|gb|AAK76532.1|
  misc_feature (1)..(143): Homolog of NCBI NO: 21592596 NR Description: unknown [Arabidopsis thaliana]
  misc_feature (1)..(124): Homolog of NCBI NO: 7485087 NR Description: hypothetical protein - Arabidopsis thaliana hypothetical protein [Arabidopsis thaliana]
  misc_feature (10)..(110): Homolog of NCBI NO: 8489786 NR Description: dehydration-induced protein ERD15 [Lycopersicon
  misc_feature (3)..(71): Homolog of NCBI NO: 15227351 NR Description: ERD15 protein; protein id: At2g41430.1, supported cDNA: 31388., supported by cDNA: gi_13926319, supported by cDNA: supported by cDNA: gi_17473678, supported by cDNA:
  misc_feature (3)..(63): Homolog of NCBI NO: 21592689 NR Description: ERD15 protein [Arabidopsis thaliana]
  misc_feature (9)..(91): Homolog of NCBI NO: 34395186 NR Description: unknown protein [Oryza sativa (japonica
  misc_feature (9)..(91): Homolog of NCBI NO: 34899128 NR Description: P0496C02.30 [Oryza sativa (japonica

SEQ ID NO: 88687 - protein, 78 aa, Arabidopsis thaliana; identical to SEQ ID NO: 21511
  peptide (1)..(78): Ceres Seq. ID no. 12711548
  misc_feature (1)..(78): Homolog of NCBI NO: 18414176 NR Description: Expressed protein; protein id: At4g14270.1, by cDNA: 30129., supported by cDNA: gi_15028002, supported by gi_20259214 [Arabidopsis thaliana] >gi|15028003|gb|AAK76532.1|
  misc_feature (1)..(78): Homolog of NCBI NO: 21592596 NR Description: unknown [Arabidopsis thaliana]
  misc_feature (1)..(59): Homolog of NCBI NO: 7485087 NR Description: hypothetical protein - Arabidopsis thaliana hypothetical protein [Arabidopsis thaliana]
  misc_feature (1)..(45): Homolog of NCBI NO: 8489786 NR Description: dehydration-induced protein ERD15 [Lycopersicon
  misc_feature (1)..(26): Homolog of NCBI NO: 34395186 NR Description: unknown protein [Oryza sativa (japonica
  misc_feature (1)..(26): Homolog of NCBI NO: 34899128 NR Description: P0496C02.30 [Oryza sativa (japonica

SEQ ID NO: 88688 - protein, 71 aa, Arabidopsis thaliana; identical to SEQ ID NO: 21512
  peptide (1)..(71): Ceres Seq. ID no. 12711549
  misc_feature (1)..(71): Homolog of NCBI NO: 18414176 NR Description: Expressed protein; protein id: At4g14270.1, by cDNA: 30129., supported by cDNA: gi_15028002, supported by gi_20259214 [Arabidopsis thaliana] >gi|15028003|gb|AAK76532.1|
  misc_feature (1)..(71): Homolog of NCBI NO: 21592596 NR Description: unknown [Arabidopsis thaliana]
  misc_feature (1)..(52): Homolog of NCBI NO: 7485087 NR Description: hypothetical protein - Arabidopsis thaliana hypothetical protein [Arabidopsis thaliana]
  misc_feature (1)..(38): Homolog of NCBI NO: 8489786 NR Description: dehydration-induced protein ERD15 [Lycopersicon
  misc_feature (1)..(19): Homolog of NCBI NO: 34395186 NR Description: unknown protein [Oryza sativa (japonica
  misc_feature (1)..(19): Homolog of NCBI NO: 34899128 NR Description: P0496C02.30 [Oryza sativa (japonica

SEQ ID NO: 88689 - DNA, 558 bp, Arabidopsis thaliana
  misc_feature (1)..(558): Ceres Seq. ID no. 12711560
  misc_feature: MA Experiment ID: 20000185 Result: Up-regulated in Transcription
  misc_feature: MA Experiment 20000185 PARAMETER Experiment Name: At_Roots__P Parameter: Age (day) Value: 7 vs. 21
  misc_feature: MA Experiment 20000185 PARAMETER Experiment Name: At_Roots__P Parameter: Organism Value: A. thaliana
  misc_feature: MA Experiment 20000185 PARAMETER Experiment Name: At_Roots__P Parameter: Tissue Value: Roots vs. Whole Plant
atgtcggatcttgctaaagacgcatggcgaaagtatctgattcagcttcaagctcatcctttacgaaccaaggcgatcactgcaggggttttagctggatgtagtgatgctatagctcagaagatctctggagttaaacggattcagttccggagattgcttctccttatgttgtatggctttgcttatggaggaccatttggtcactttttccacaaattgatggataccattttcaaagggaagaagggtaattcaactgttgccaaaaaggttttgttggagcaacttacatcatctccttggaacaattttcttttcatgtcttactatggtttagtagttgaaggaaggccatggaagctagtgaagcacaaacttggaaaagattaccctactatccagttaaccgcatggaagttctggcctatcgtgggatgggttaattatcagtatgtgcctctccaattccgtgttttgttcagcagcttcgtcgcctcttgctggagcatatttctgaacttgaaagcgcgatctccggtgatcaaaaacgcgtag

SEQ ID NO: 88690 - protein, 185 aa, Arabidopsis thaliana
  peptide (1)..(185): Ceres Seq. ID no. 12711561
  misc_feature (111)..(179): Pfam Name: Mpv17 / PMP22 family Pfam Description: Mpv17 / PMP22 family
  misc_feature (28)..(185): Homolog of NCBI NO: 30682784 NR Description: expressed protein [Arabidopsis thaliana]
  misc_feature (6)..(179): Homolog of NCBI NO: 15233520 NR Description: PEROXISOMAL MEMBRANE PROTEIN PMP22; protein id: [Arabidopsis thaliana] >gi|11282649|pir||T51590 membrane protein,
  misc_feature (28)..(165): Homolog of NCBI NO: 7485192 NR Description: hypothetical protein d13195c - Arabidopsis >gi|2244787|emb|CAB10210.1| hypothetical protein [Arabidopsis >gi|7268136|emb|CAB78473.1| hypothetical protein [Arabidopsis
  misc_feature (47)..(174): Homolog of NCBI NO: 15230132 NR Description: unknown protein; protein id: At3g24570.1 thaliana] >gi|9294052|dbj|BAB02009.1|
  misc_feature (9)..(56): Homolog of NCBI NO: 15230132 NR Description: unknown protein; protein id: At3g24570.1 thaliana] >gi|9294052|dbj|BAB02009.1|
  misc_feature (47)..(174): Homolog of NCBI NO: 38454114 NR Description: At3g24570 [Arabidopsis thaliana]
  misc_feature (9)..(56): Homolog of NCBI NO: 38454114 NR Description: At3g24570 [Arabidopsis thaliana]
  misc_feature (1)..(173): Homolog of NCBI NO: 10954089 NR Description: 22 kDa peroxisomal membrane protein PMP22 [Mus >gi|12833578|dbj|BAB22578.1| unnamed protein product [Mus
  misc_feature (1)..(173): Homolog of NCBI NO: 6679577 NR Description: peroxisomal membrane protein 2; peroxisomal protein 2, 22 kDa [Mus musculus] >gi|1172540|sp|P42925|PMP2_MOUSE kDa peroxisomal membrane protein (Peroxisomal membrane protein 2)
  misc_feature (47)..(174): Homolog of NCBI NO: 34904256 NR Description: P0452F10.16 [Oryza sativa (japonica
MSDLAKDAWRKYLIQLQAHPLRTKAITAGVLAGCSDAIAQKISGVKRIQFRRLLLLMLYGFAYGGPFGHFFHKLMDTIFKGKKGNSTVAKKVLLEQLTSSPWNNFLFMSYYGLVVEGRPWKLVKHKLGKDYPTIQLTAWKFWPIVGWVNYQYVPLQFRVLFSSFVASCWSIFLNLKARSPVIKNA

SEQ ID NO: 88691 - protein, 129 aa, Arabidopsis thaliana
  peptide (1)..(129): Ceres Seq. ID no. 12711562
  misc_feature (55)..(123): Pfam Name: Mpv17 / PMP22 family Pfam Description: Mpv17 / PMP22 family
  misc_feature (1)..(129): Homolog of NCBI NO: 30682784 NR Description: expressed protein [Arabidopsis thaliana]
  misc_feature (1)..(123): Homolog of NCBI NO: 15233520 NR Description: PEROXISOMAL MEMBRANE PROTEIN PMP22; protein id: [Arabidopsis thaliana] >gi|11282649|pir||T51590 membrane protein,
  misc_feature (1)..(109): Homolog of NCBI NO: 7485192 NR Description: hypothetical protein d13195c - Arabidopsis >gi|2244787|emb|CAB10210.1| hypothetical protein [Arabidopsis >gi|7268136|emb|CAB78473.1| hypothetical protein [Arabidopsis
  misc_feature (1)..(118): Homolog of NCBI NO: 15230132 NR Description: unknown protein; protein id: At3g24570.1 thaliana] >gi|9294052|dbj|BAB02009.1|
  misc_feature (1)..(118): Homolog of NCBI NO: 38454114 NR Description: At3g24570 [Arabidopsis thaliana]
  misc_feature (1)..(117): Homolog of NCBI NO: 10954089 NR Description: 22 kDa peroxisomal membrane protein PMP22 [Mus >gi|12833578|dbj|BAB22578.1| unnamed protein product [Mus
  misc_feature (1)..(117): Homolog of NCBI NO: 6679577 NR Description: peroxisomal membrane protein 2; peroxisomal protein 2, 22 kDa [Mus musculus] >gi|1172540|sp|P42925|PMP2_MOUSE kDa peroxisomal membrane protein (Peroxisomal membrane protein 2)
  misc_feature (1)..(118): Homolog of NCBI NO: 34904256 NR Description: P0452F10.16 [Oryza sativa (japonica
  misc_feature (1)..(117): Homolog of NCBI NO: 13928796 NR Description: peroxisomal membrane protein 2; peroxisomal protein 2, 22 kDa [Rattus norvegicus]
  misc_feature (1)..(121): Homolog of NCBI NO: 6678926 NR Description: Mpv17 transgene, kidney disease mutant [Mus >gi|127297|sp|P19258|MPV1_MOUSE MPV17 PROTEIN
MLYGFAYGGPFGHFFHKLMDTIFKGKKGNSTVAKKVLLEQLTSSPWNNFLFMSYYGLVVEGRPWKLVKHKLGKDYPTIQLTAWKFWPIVGWVNYQYVPLQFRVLFSSFVASCWSIFLNLKARSPVIKNA

SEQ ID NO: 88692 - protein, 111 aa, Arabidopsis thaliana
  peptide (1)..(111): Ceres Seq. ID no. 12711563
  misc_feature (37)..(105): Pfam Name: Mpv17 / PMP22 family Pfam Description: Mpv17 / PMP22 family
  misc_feature (1)..(111): Homolog of NCBI NO: 30682784 NR Description: expressed protein [Arabidopsis thaliana]
  misc_feature (1)..(105): Homolog of NCBI NO: 15233520 NR Description: PEROXISOMAL MEMBRANE PROTEIN PMP22; protein id: [Arabidopsis thaliana] >gi|11282649|pir||T51590 membrane protein,
  misc_feature (1)..(91): Homolog of NCBI NO: 7485192 NR Description: hypothetical protein d13195c - Arabidopsis >gi|2244787|emb|CAB10210.1| hypothetical protein [Arabidopsis >gi|7268136|emb|CAB78473.1| hypothetical protein [Arabidopsis
  misc_feature (1)..(100): Homolog of NCBI NO: 15230132 NR Description: unknown protein; protein id: At3g24570.1 thaliana] >gi|9294052|dbj|BAB02009.1|
  misc_feature (1)..(100): Homolog of NCBI NO: 38454114 NR Description: At3g24570 [Arabidopsis thaliana]
  misc_feature (1)..(99): Homolog of NCBI NO: 10954089 NR Description: 22 kDa peroxisomal membrane protein PMP22 [Mus >gi|12833578|dbj|BAB22578.1| unnamed protein product [Mus
  misc_feature (1)..(99): Homolog of NCBI NO: 6679577 NR Description: peroxisomal membrane protein 2; peroxisomal protein 2, 22 kDa [Mus musculus] >gi|1172540|sp|P42925|PMP2_MOUSE kDa peroxisomal membrane protein (Peroxisomal membrane protein 2)
  misc_feature (1)..(100): Homolog of NCBI NO: 34904256 NR Description: P0452F10.16 [Oryza sativa (japonica
  misc_feature (1)..(99): Homolog of NCBI NO: 13928796 NR Description: peroxisomal membrane protein 2; peroxisomal protein 2, 22 kDa [Rattus norvegicus]
  misc_feature (1)..(103): Homolog of NCBI NO: 6678926 NR Description: Mpv17 transgene, kidney disease mutant [Mus >gi|127297|sp|P19258|MPV1_MOUSE MPV17 PROTEIN
MDTIFKGKKGNSTVAKKVLLEQLTSSPWNNFLFMSYYGLVVEGRPWKLVKHKLGKDYPTIQLTAWKFWPIVGWVNYQYVPLQFRVLFSSFVASCWSIFLNLKARSPVIKNA

SEQ ID NO: 88693 - DNA, 2130 bp, Arabidopsis thaliana
  misc_feature (1)..(2130): Ceres Seq. ID no. 12711630
  misc_feature: MA Experiment ID: 20000184 Result: Down-regulated in Transcription
  misc_feature: MA Experiment 20000184 PARAMETER Experiment Name: At_Shoots__P Parameter: Age (day) Value: 7
  misc_feature: MA Experiment 20000184 PARAMETER Experiment Name: At_Shoots__P Parameter: Tissue Value: Shoots vs. Whole Plant
  misc_feature: MA Experiment ID: 20000495 Result: Down-regulated in Transcription
  misc_feature: MA Experiment 20000495 PARAMETER Experiment Name: At_Guard_Cells_P Parameter: Harvest Date Value: 8/2/2002
  misc_feature: MA Experiment 20000495 PARAMETER Experiment Name: At_Guard_Cells_P Parameter: Organism Value: A. thaliana
  misc_feature: MA Experiment 20000495 PARAMETER Experiment Name: At_Guard_Cells_P Parameter: Tissue Value: Guard Cells vs. Leaves
atggcgagtactagtagtggtggtggtggtggtggtgataagaagaagaagaaaggtttctctgtaaaccctaaagattataaacttatggaagaagttggatatggtgctagtgctgttgttcatcgtgctatttatcttcctactaatgaagttgttgctatcaagtctttggatctcgatcgctgcaatagtaatctggatgatataaggagggaggctcagactatgactttgatagaccatccgaatgttataaagtcgttttgttcgtttgctgttgatcatcatctatgggtcgttatgccatttatggctcagggttcgtgtttgcatctaatgaaagcagcgtatccagatggatttgaagaggcggctatatgttctatgctgaaagaaacacttaaagctcttgattatcttcatagacaagggcatatccatcgagatgttaaggctggaaacatacttcttgatgacactggcgagattaagttaggtgattttggtgtctctgcatgtttgtttgacaatggcgataggcaacgtgcaagaaatacatttgttggtactccatgctggatggcaccggaagtcttgcagccagggagtggatacaattcaaaggctgatatatggtcttttggaataacggcgctggagttggctcacggtcatgcacctttctcaaaatatccccctatgaaggtactcttaatgactatccaaaatgcaccacctggccttgattatgaccgtgataagaagttttcaaagaagatgtccagctgcgctcagtcctttaaagaattggtagcattgtgtctggtgaaagatcaaacaaaaaggccaactgctgaaaaattgttgaaacactcatttttcaagaatgtgaagcctccagagatctgtgtaaaaaaattatttgtcgatttaccacctctttggactcgcgtaaaagctcttcaggccaaggatgctgcacagcttgctttgaaaggaatggcctctgctgaccaggatgctatatcacagagtgaataccaaagaggagtaagtgcttggaacttcaatatcgaagatttgaaagaacaagcatctttgctagatgatgatgacattctaacagagagtagggaagaagaagaatcttttggcgaacagttgcataataaggtgaatgacagagggcaagtatctggtagtcaattgctatctgaaaacatgaatggaaaggaaaaagcttcagatactgaggtggtagaacctatctgtgaagagaaatccactctcaattcaaccacttcttctgtggaacaaccggcatcaagttcagaacaagacgttccacaggccaagggtaagccagtgagactccagactcatagtggaccactttcatccggtgtcgtgttaatcaattcagactcagagaaggttcatggttatgaaaggtctgagagtgaacggcaactgaaatcatcagtccggagggcacccagctttagtggtcctttgaatcttccaaatcgtgcttcagcaaacagtctttcagctcctatcaaatcttctggagatgacaagtcgaaggctaatgtggttcaaatcaaaggaagattttcagtaacatcagaaaacttggatcttgcaagggcatcccctttgagaaaatctgccagtgttgggaattggatacttgattctaaaatgccaacgggccaggccatcaaggagtcaagtagtcatctctcattcattatacctcagcttcaaaatctgttccagcaaaattcaatgcagcaggatcttattatgaatctagtgaataccttacaacaagctgctgaaacaacagatggttctcaaaatggaaagttgccgcctttgcctcgaggatctgacagcaatggaaccgttgtagaacttacagcagctgagcgagagaggttactacttaccaagataaccgagcttcgagctaggttgttcctcttcttcaatcaatcacacctttcttataggagatcaatgtggatgaaagagttgacggaagaacttgaagtagaaaaatcaaaacagacccaactgcagcagaaattgaaatcagtcaccggtcgcgagcaattgtaa

SEQ ID NO: 88694 - protein, 709 aa, Arabidopsis thaliana
  peptide (1)..(709): Ceres Seq. ID no. 12711631
  misc_feature (27)..(295): Pfam Name: Protein kinase domain Pfam Description: Protein kinase domain
  misc_feature (1)..(601): Homolog of NCBI NO: 7486904 NR Description: hypothetical protein T12H20.4 - Arabidopsis >gi|3600036|gb|AAC35524.1| contains similarity to protein kinase
  misc_feature (1)..(709): Homolog of NCBI NO: 25407517 NR Description: hypothetical protein AT4g10730 [imported] - thaliana >gi|7267771|emb|CAB81174.1| putative protein kinase
  misc_feature (2)..(707): Homolog of NCBI NO: 22328895 NR Description: putative protein; protein id: At4g24100.1, by cDNA: gi_20268685 [Arabidopsis thaliana] unknown protein [Arabidopsis thaliana]
  misc_feature (2)..(414): Homolog of NCBI NO: 7487178 NR Description: hypothetical protein T19F6.90 - Arabidopsis >gi|5668638|emb|CAB51653.1| putative protein [Arabidopsis >gi|7269259|emb|CAB81328.1| putative protein [Arabidopsis
  misc_feature (393)..(660): Homolog of NCBI NO: 7487178 NR Description: hypothetical protein T19F6.90 - Arabidopsis >gi|5668638|emb|CAB51653.1| putative protein [Arabidopsis >gi|7269259|emb|CAB81328.1| putative protein [Arabidopsis
  misc_feature (1)..(662): Homolog of NCBI NO: 30681538 NR Description: protein kinase family [Arabidopsis thaliana]
  misc_feature (2)..(404): Homolog of NCBI NO: 2262107 NR Description: Ser/Thr protein kinase isolog [Arabidopsis
  misc_feature (20)..(529): Homolog of NCBI NO: 17998578 NR Description: putative Ste-20 related kinase, 3'-partial [Oryza
  misc_feature (20)..(344): Homolog of NCBI NO: 34902170 NR Description: Putative Ste20-related protein kinase [Oryza
  misc_feature (474)..(662): Homolog of NCBI NO: 34902170 NR Description: Putative Ste20-related protein kinase [Oryza
MASTSSGGGGGGDKKKKKGFSVNPKDYKLMEEVGYGASAVVHRAIYLPTNEVVAIKSLDLDRCNSNLDDIRREAQTMTLIDHPNVIKSFCSFAVDHHLWVVMPFMAQGSCLHLMKAAYPDGFEEAAICSMLKETLKALDYLHRQGHIHRDVKAGNILLDDTGEIKLGDFGVSACLFDNGDRQRARNTFVGTPCWMAPEVLQPGSGYNSKADIWSFGITALELAHGHAPFSKYPPMKVLLMTIQNAPPGLDYDRDKKFSKKMSSCAQSFKELVALCLVKDQTKRPTAEKLLKHSFFKNVKPPEICVKKLFVDLPPLWTRVKALQAKDAAQLALKGMASADQDAISQSEYQRGVSAWNFNIEDLKEQASLLDDDDILTESREEEESFGEQLHNKVNDRGQVSGSQLLSENMNGKEKASDTEVVEPICEEKSTLNSTTSSVEQPASSSEQDVPQAKGKPVRLQTHSGPLSSGVVLINSDSEKVHGYERSESERQLKSSVRRAPSFSGPLNLPNRASANSLSAPIKSSGDDKSKANVVQIKGRFSVTSENLDLARASPLRKSASVGNWILDSKMPTGQAIKESSSHLSFIIPQLQNLFQQNSMQQDLIMNLVNTLQQAAETTDGSQNGKLPPLPRGSDSNGTVVELTAAERERLLLTKITELRARLFLFFNQSHLSYRRSMWMKELTEELEVEKSKQTQLQQKLKSVTGREQL

SEQ ID NO: 88695 - protein, 680 aa, Arabidopsis thaliana
  peptide (1)..(680): Ceres Seq. ID no. 12711632
  misc_feature (1)..(266): Pfam Name: Protein kinase domain Pfam Description: Protein kinase domain
  misc_feature (1)..(572): Homolog of NCBI NO: 7486904 NR Description: hypothetical protein T12H20.4 - Arabidopsis >gi|3600036|gb|AAC35524.1| contains similarity to protein kinase
  misc_feature (1)..(680): Homolog of NCBI NO: 25407517 NR Description: hypothetical protein AT4g10730 [imported] - thaliana >gi|7267771|emb|CAB81174.1| putative protein kinase
  misc_feature (1)..(678): Homolog of NCBI NO: 22328895 NR Description: putative protein; protein id: At4g24100.1, by cDNA: gi_20268685 [Arabidopsis thaliana] unknown protein [Arabidopsis thaliana]
  misc_feature (1)..(385): Homolog of NCBI NO: 7487178 NR Description: hypothetical protein T19F6.90 - Arabidopsis >gi|5668638|emb|CAB51653.1| putative protein [Arabidopsis >gi|7269259|emb|CAB81328.1| putative protein [Arabidopsis
  misc_feature (364)..(631): Homolog of NCBI NO: 7487178 NR Description: hypothetical protein T19F6.90 - Arabidopsis >gi|5668638|emb|CAB51653.1| putative protein [Arabidopsis >gi|7269259|emb|CAB81328.1| putative protein [Arabidopsis
  misc_feature (1)..(633): Homolog of NCBI NO: 30681538 NR Description: protein kinase family [Arabidopsis thaliana]
  misc_feature (1)..(375): Homolog of NCBI NO: 2262107 NR Description: Ser/Thr protein kinase isolog [Arabidopsis
  misc_feature (1)..(500): Homolog of NCBI NO: 17998578 NR Description: putative Ste-20 related kinase, 3'-partial [Oryza
  misc_feature (1)..(315): Homolog of NCBI NO: 34902170 NR Description: Putative Ste20-related protein kinase [Oryza
  misc_feature (445)..(633): Homolog of NCBI NO: 34902170 NR Description: Putative Ste20-related protein kinase [Oryza
MEEVGYGASAVVHRAIYLPTNEVVAIKSLDLDRCNSNLDDIRREAQTMTLIDHPNVIKSFCSFAVDHHLWVVMPFMAQGSCLHLMKAAYPDGFEEAAICSMLKETLKALDYLHRQGHIHRDVKAGNILLDDTGEIKLGDFGVSACLFDNGDRQRARNTFVGTPCWMAPEVLQPGSGYNSKADIWSFGITALELAHGHAPFSKYPPMKVLLMTIQNAPPGLDYDRDKKFSKKMSSCAQSFKELVALCLVKDQTKRPTAEKLLKHSFFKNVKPPEICVKKLFVDLPPLWTRVKALQAKDAAQLALKGMASADQDAISQSEYQRGVSAWNFNIEDLKEQASLLDDDDILTESREEEESFGEQLHNKVNDRGQVSGSQLLSENMNGKEKASDTEVVEPICEEKSTLNSTTSSVEQPASSSEQDVPQAKGKPVRLQTHSGPLSSGVVLINSDSEKVHGYERSESERQLKSSVRRAPSFSGPLNLPNRASANSLSAPIKSSGDDKSKANVVQIKGRFSVTSENLDLARASPLRKSASVGNWILDSKMPTGQAIKESSSHLSFIIPQLQNLFQQNSMQQDLIMNLVNTLQQAAETTDGSQNGKLPPLPRGSDSNGTVVELTAAERERLLLTKITELRARLFLFFNQSHLSYRRSMWMKELTEELEVEKSKQTQLQQKLKSVTGREQL

SEQ ID NO: 88696 - protein, 633 aa, Arabidopsis thaliana
  peptide (1)..(633): Ceres Seq. ID no. 12711633
  misc_feature (1)..(219): Pfam Name: Protein kinase domain Pfam Description: Protein kinase domain
  misc_feature (1)..(525): Homolog of NCBI NO: 7486904 NR Description: hypothetical protein T12H20.4 - Arabidopsis >gi|3600036|gb|AAC35524.1| contains similarity to protein kinase
  misc_feature (1)..(633): Homolog of NCBI NO: 25407517 NR Description: hypothetical protein AT4g10730 [imported] - thaliana >gi|7267771|emb|CAB81174.1| putative protein kinase
  misc_feature (1)..(631): Homolog of NCBI NO: 22328895 NR Description: putative protein; protein id: At4g24100.1, by cDNA: gi_20268685 [Arabidopsis thaliana] unknown protein [Arabidopsis thaliana]
  misc_feature (1)..(338): Homolog of NCBI NO: 7487178 NR Description: hypothetical protein T19F6.90 - Arabidopsis >gi|5668638|emb|CAB51653.1| putative protein [Arabidopsis >gi|7269259|emb|CAB81328.1| putative protein [Arabidopsis
  misc_feature (317)..(584): Homolog of NCBI NO: 7487178 NR Description: hypothetical protein T19F6.90 - Arabidopsis >gi|5668638|emb|CAB51653.1| putative protein [Arabidopsis >gi|7269259|emb|CAB81328.1| putative protein [Arabidopsis
  misc_feature (1)..(586): Homolog of NCBI NO: 30681538 NR Description: protein kinase family [Arabidopsis thaliana]
  misc_feature (1)..(328): Homolog of NCBI NO: 2262107 NR Description: Ser/Thr protein kinase isolog [Arabidopsis
  misc_feature (1)..(453): Homolog of NCBI NO: 17998578 NR Description: putative Ste-20 related kinase, 3'-partial [Oryza
  misc_feature (1)..(268): Homolog of NCBI NO: 34902170 NR Description: Putative Ste20-related protein kinase [Oryza
  misc_feature (398)..(586): Homolog of NCBI NO: 34902170 NR Description: Putative Ste20-related protein kinase [Oryza
MTLIDHPNVIKSFCSFAVDHHLWVVMPFMAQGSCLHLMKAAYPDGFEEAAICSMLKETLKALDYLHRQGHIHRDVKAGNILLDDTGEIKLGDFGVSACLFDNGDRQRARNTFVGTPCWMAPEVLQPGSGYNSKADIWSFGITALELAHGHAPFSKYPPMKVLLMTIQNAPPGLDYDRDKKFSKKMSSCAQSFKELVALCLVKDQTKRPTAEKLLKHSFFKNVKPPEICVKKLFVDLPPLWTRVKALQAKDAAQLALKGMASADQDAISQSEYQRGVSAWNFNIEDLKEQASLLDDDDILTESREEEESFGEQLHNKVNDRGQVSGSQLLSENMNGKEKASDTEVVEPICEEKSTLNSTTSSVEQPASSSEQDVPQAKGKPVRLQTHSGPLSSGVVLINSDSEKVHGYERSESERQLKSSVRRAPSFSGPLNLPNRASANSLSAPIKSSGDDKSKANVVQIKGRFSVTSENLDLARASPLRKSASVGNWILDSKMPTGQAIKESSSHLSFIIPQLQNLFQQNSMQQDLIMNLVNTLQQAAETTDGSQNGKLPPLPRGSDSNGTVVELTAAERERLLLTKITELRARLFLFFNQSHLSYRRSMWMKELTEELEVEKSKQTQLQQKLKSVTGREQL

SEQ ID NO: 88697 - DNA, 2117 bp, Arabidopsis thaliana
  misc_feature (1)..(2117): Ceres Seq. ID no. 12711647
  misc_feature: MA Experiment ID: 20000264 Result: Down-regulated in Transcription
  misc_feature: MA Experiment 20000264 PARAMETER Experiment Name: At_Open_Flower_P Parameter: Age (day) Value: 21
  misc_feature: MA Experiment 20000264 PARAMETER Experiment Name: At_Open_Flower_P Parameter: Plant Line Value: WS
  misc_feature: MA Experiment 20000264 PARAMETER Experiment Name: At_Open_Flower_P Parameter: Tissue Value: Open Flower vs. Whole Plant
  misc_feature: MA Experiment ID: 20000265 Result: Down-regulated in Transcription
  misc_feature: MA Experiment 20000265 PARAMETER Experiment Name: At_Open_Flower_P Parameter: Age (day) Value: 21
  misc_feature: MA Experiment 20000265 PARAMETER Experiment Name: At_Open_Flower_P Parameter: Plant Line Value: WS
  misc_feature: MA Experiment 20000265 PARAMETER Experiment Name: At_Open_Flower_P Parameter: Tissue Value: Closed Flower vs. Whole Plant
aaaaccaaatccgccataactctctctctctctcccacttcccacagagagacacattcatgccagcaatgccaggtctcgtctcagtcaaaactccttccgatacaccgccgctacgtgtagccgtaccagacacgcaacctctctcaaacccgccgcgaactccgatgaagaaaaccccttcctctacaccatctcgatccaaaccatcaccaaatagatccaccggcaaaaaagattccccaaccgtatcctcctccaccgcagccgtaatcgacgtcgacgatccatctctagataatccagatctcggtcctttccttctaaaattagctcgtgacgctattgcttctggtgaaggtcctaacaaagcattagattacgcgatccgagcaactaagtcctttgagagatgttgcgccgccgttgctccgcctattcccggtggtagcgatggtggacctgttcttgatctcgctatgagccttcatgttctcgctgctatttactgtagtctcggccgatttgatgaagctgtaccacctcttgaacgagctattcaagtccctgatccgactcgtggccctgaccactctctcgctgcgttttctggtcatatgcaacttggtgatacgttgtctatgcttggtcagattgatagatctattgcttgttatgaagaaggtcttaagatccagatccagactttgggtgatactgatccacgagttggtgaaacttgcaggtacttagcagaagcatatgttcaagcaatgcagttcaataaagcggaagagttatgcaagaagactctagagattcaccgagcgcatagtgaacctgcttcactggaggaagcagctgataggagattgatggcaattatctgcgaggctaaaggagattatgaaaacgctcttgagcatcttgttcttgctagtatggctatgattgcgagtggacaagaatctgaggttgcatcgattgatgttagtattgggaatatttacatgtcgctgtgccggtttgatgaagctgtgttttcatatcagaaggctcttactgtgtttaaggcttctaaaggagagactcatccgacggttgcgtcagtgtttgttagattggctgagctttaccatagaacagggaaacttcgtgagtctaagtcttactgtgagaatgcgttgaggatatacaataagccggtgcctgggacaactgtggaggagattgctggtggattaactgagatttctgctatttatgagtctgtagatgaacctgaggaagcattgaagctacttcagaagtctatgaaattgcttgaggataagccaggacagcagagcgccattgcagggttagaggcacggatgggagttatgtattacacagtggggaggtacgaggacgcaagaaacgcgtttgagagcgctgtgacaaagctacgggcagcaggtgagaaatctgccttcttcggtgttgtattaaaccagatgggactagcctgcgttcagcttttcaagattgatgaagcgggtgagctgtttgaagaagcaagaggtattcttgaacaagaacgtggaccgtgcgatcaggacactctcggtgtttatagcaatctagctgctacctatgacgctatgggaaggatagaggatgcgattgagatattagagcaggttctgaagctgagagaggaaaagctcgggactgcgaatccggattttgaagacgagaagaaacgtttggccgagcttttgaaggaagctgggcggtcgcggaactacaaagccaagtcgctccagaatctgattgatccaaatgcaagacctccgaagaaagagtcttctgctaagaaatggcccagcctcggtttcaagttctgaggaaaaaattatcatataaaataaatcatccacatatatattcaatattttattttattgttattgttatattttttatctgatctattttctgtatcataatctgaggttgatgaattaatttcatgtatagtgtttttatttgagtttggtgaaatactgccaagatggtgagctgtttgtttgagtttgaaatttctttaattcaatcacttttttcttcttctg

SEQ ID NO: 88698 - protein, 628 aa, Arabidopsis thaliana
  peptide (1)..(628): Ceres Seq. ID no. 12711648
  misc_feature (244)..(277): Pfam Name: TPR Domain Pfam Description: TPR Domain
  misc_feature (94)..(608): Homolog of NCBI NO: 19387245 NR Description: putative kinesin light chain gene [Oryza sativa
  misc_feature (71)..(608): Homolog of NCBI NO: 20152971 NR Description: similar to A. thaliana protein BAB01483 similar
  misc_feature (52)..(608): Homolog of NCBI NO: 15232873 NR Description: hypothetical protein; protein id: At3g27960.1 thaliana] >gi|9294312|dbj|BAB01483.1| contains similarity to
  misc_feature (52)..(608): Homolog of NCBI NO: 33589662 NR Description: At3g27960 [Arabidopsis thaliana]
  misc_feature (94)..(606): Homolog of NCBI NO: 9802538 NR Description: F17L21.29 [Arabidopsis thaliana]
  misc_feature (94)..(606): Homolog of NCBI NO: 15223528 NR Description: hypothetical protein; protein id: At1g27500.1
  misc_feature (94)..(606): Homolog of NCBI NO: 26450936 NR Description: unknown protein [Arabidopsis thaliana]
  misc_feature (97)..(611): Homolog of NCBI NO: 25408142 NR Description: probable kinesin light chain [imported] - thaliana >gi|4432819|gb|AAD20669.1| putative kinesin light chain
  misc_feature (97)..(611): Homolog of NCBI NO: 30684882 NR Description: tetratricopeptide repeat (TPR)-containing protein thaliana] >gi|17380952|gb|AAL36288.1| putative kinesin light
  misc_feature (150)..(613): Homolog of NCBI NO: 27261475 NR Description: Hypothetical protein [Oryza sativa (japonica
NQIRHNSLSLSHFPQRDTFMPAMPGLVSVKTPSDTPPLRVAVPDTQPLSNPPRTPMKKTPSSTPSRSKPSPNRSTGKKDSPTVSSSTAAVIDVDDPSLDNPDLGPFLLKLARDAIASGEGPNKALDYAIRATKSFERCCAAVAPPIPGGSDGGPVLDLAMSLHVLAAIYCSLGRFDEAVPPLERAIQVPDPTRGPDHSLAAFSGHMQLGDTLSMLGQIDRSIACYEEGLKIQIQTLGDTDPRVGETCRYLAEAYVQAMQFNKAEELCKKTLEIHRAHSEPASLEEAADRRLMAIICEAKGDYENALEHLVLASMAMIASGQESEVASIDVSIGNIYMSLCRFDEAVFSYQKALTVFKASKGETHPTVASVFVRLAELYHRTGKLRESKSYCENALRIYNKPVPGTTVEEIAGGLTEISAIYESVDEPEEALKLLQKSMKLLEDKPGQQSAIAGLEARMGVMYYTVGRYEDARNAFESAVTKLRAAGEKSAFFGVVLNQMGLACVQLFKIDEAGELFEEARGILEQERGPCDQDTLGVYSNLAATYDAMGRIEDAIEILEQVLKLREEKLGTANPDFEDEKKRLAELLKEAGRSRNYKAKSLQNLIDPNARPPKKESSAKKWPSLGFKF

SEQ ID NO: 88699 - protein, 609 aa, Arabidopsis thaliana; identical to SEQ ID NO: 26334
  peptide (1)..(609): Ceres Seq. ID no. 12711649
  misc_feature (225)..(258): Pfam Name: TPR Domain Pfam Description: TPR Domain
  misc_feature (75)..(589): Homolog of NCBI NO: 19387245 NR Description: putative kinesin light chain gene [Oryza sativa
  misc_feature (52)..(589): Homolog of NCBI NO: 20152971 NR Description: similar to A. thaliana protein BAB01483 similar
  misc_feature (33)..(589): Homolog of NCBI NO: 15232873 NR Description: hypothetical protein; protein id: At3g27960.1 thaliana] >gi|9294312|dbj|BAB01483.1| contains similarity to
  misc_feature (33)..(589): Homolog of NCBI NO: 33589662 NR Description: At3g27960 [Arabidopsis thaliana]
  misc_feature (75)..(587): Homolog of NCBI NO: 9802538 NR Description: F17L21.29 [Arabidopsis thaliana]
  misc_feature (75)..(587): Homolog of NCBI NO: 15223528 NR Description: hypothetical protein; protein id: At1g27500.1
  misc_feature (75)..(587): Homolog of NCBI NO: 26450936 NR Description: unknown protein [Arabidopsis thaliana]
  misc_feature (78)..(592): Homolog of NCBI NO: 25408142 NR Description: probable kinesin light chain [imported] - thaliana >gi|4432819|gb|AAD20669.1| putative kinesin light chain
  misc_feature (78)..(592): Homolog of NCBI NO: 30684882 NR Description: tetratricopeptide repeat (TPR)-containing protein thaliana] >gi|17380952|gb|AAL36288.1| putative kinesin light
  misc_feature (131)..(594): Homolog of NCBI NO: 27261475 NR Description: Hypothetical protein [Oryza sativa (japonica

SEQ ID NO: 88700 - protein, 606 aa, Arabidopsis thaliana; identical to SEQ ID NO: 26335
  peptide (1)..(606): Ceres Seq. ID no. 12711650
  misc_feature (222)..(255): Pfam Name: TPR Domain Pfam Description: TPR Domain
  misc_feature (72)..(586): Homolog of NCBI NO: 19387245 NR Description: putative kinesin light chain gene [Oryza sativa
  misc_feature (49)..(586): Homolog of NCBI NO: 20152971 NR Description: similar to A. thaliana protein BAB01483 similar
  misc_feature (30)..(586): Homolog of NCBI NO: 15232873 NR Description: hypothetical protein; protein id: At3g27960.1 thaliana] >gi|9294312|dbj|BAB01483.1| contains similarity to
  misc_feature (30)..(586): Homolog of NCBI NO: 33589662 NR Description: At3g27960 [Arabidopsis thaliana]
  misc_feature (72)..(584): Homolog of NCBI NO: 9802538 NR Description: F17L21.29 [Arabidopsis thaliana]
  misc_feature (72)..(584): Homolog of NCBI NO: 15223528 NR Description: hypothetical protein; protein id: At1g27500.1
  misc_feature (72)..(584): Homolog of NCBI NO: 26450936 NR Description: unknown protein [Arabidopsis thaliana]
  misc_feature (75)..(589): Homolog of NCBI NO: 25408142 NR Description: probable kinesin light chain [imported] - thaliana >gi|4432819|gb|AAD20669.1| putative kinesin light chain
  misc_feature (75)..(589): Homolog of NCBI NO: 30684882 NR Description: tetratricopeptide repeat (TPR)-containing protein thaliana] >gi|17380952|gb|AAL36288.1| putative kinesin light
  misc_feature (128)..(591): Homolog of NCBI NO: 27261475 NR Description: Hypothetical protein [Oryza sativa (japonica

SEQ ID NO: 88701 - DNA, 1053 bp, Arabidopsis thaliana
  misc_feature (1)..(1053): Ceres Seq. ID no. 12711675
  misc_feature: MA Experiment ID: 20000166 Result: Up-regulated in Transcription
  misc_feature: MA Experiment 20000166 PARAMETER Experiment Name: At_100uM_ABA_P Parameter: Age (day) Value: 14
  misc_feature: MA Experiment 20000166 PARAMETER Experiment Name: At_100uM_ABA_P Parameter: Organism Value: A. thaliana
  misc_feature: MA Experiment 20000166 PARAMETER Experiment Name: At_100uM_ABA_P Parameter: Plant Line Value: WS
  misc_feature: MA Experiment 20000166 PARAMETER Experiment Name: At_100uM_ABA_P Parameter: Timepoint (hr) Value: 1
  misc_feature: MA Experiment 20000166 PARAMETER Experiment Name: At_100uM_ABA_P Parameter: Tissue Value: Aerial
  misc_feature: MA Experiment 20000166 PARAMETER Experiment Name: At_100uM_ABA_P Parameter: Treatment Value: 100uM ABA vs. No Treatment
  misc_feature: MA Experiment ID: 20000169 Result: Up-regulated in Transcription
  misc_feature: MA Experiment 20000169 PARAMETER Experiment Name: At_100uM_ABA_P Parameter: Age (day) Value: 14
  misc_feature: MA Experiment 20000169 PARAMETER Experiment Name: At_100uM_ABA_P Parameter: Organism Value: A. thaliana
  misc_feature: MA Experiment 20000169 PARAMETER Experiment Name: At_100uM_ABA_P Parameter: Plant Line Value: WS
  misc_feature: MA Experiment 20000169 PARAMETER Experiment Name: At_100uM_ABA_P Parameter: Timepoint (hr) Value: 6
  misc_feature: MA Experiment 20000169 PARAMETER Experiment Name: At_100uM_ABA_P Parameter: Tissue Value: Aerial
  misc_feature: MA Experiment 20000169 PARAMETER Experiment Name: At_100uM_ABA_P Parameter: Treatment Value: 100uM ABA vs. No Treatment
  misc_feature: MA Experiment ID: 20000182 Result: Up-regulated in Transcription
  misc_feature: MA Experiment 20000182 PARAMETER Experiment Name: At_2mM_SA_P Parameter: Age (day) Value: 14
  misc_feature: MA Experiment 20000182 PARAMETER Experiment Name: At_2mM_SA_P Parameter: Organism Value: A. thaliana
  misc_feature: MA Experiment 20000182 PARAMETER Experiment Name: At_2mM_SA_P Parameter: Plant Line Value: WS
  misc_feature: MA Experiment 20000182 PARAMETER Experiment Name: At_2mM_SA_P Parameter: Timepoint (hr) Value: 6
  misc_feature: MA Experiment 20000182 PARAMETER Experiment Name: At_2mM_SA_P Parameter: Tissue Value: Aerial
  misc_feature: MA Experiment 20000182 PARAMETER Experiment Name: At_2mM_SA_P Parameter: Treatment Value: 2mM SA vs. No Treatment
  misc_feature: MA Experiment ID: 20000184 Result: Down-regulated in Transcription
  misc_feature: MA Experiment 20000184 PARAMETER Experiment Name: At_Shoots__P Parameter: Age (day) Value: 7
  misc_feature: MA Experiment 20000184 PARAMETER Experiment Name: At_Shoots__P Parameter: Tissue Value: Shoots vs. Whole Plant
  misc_feature: MA Experiment ID: 20000185 Result: Up-regulated in Transcription
  misc_feature: MA Experiment 20000185 PARAMETER Experiment Name: At_Roots__P Parameter: Age (day) Value: 7 vs. 21
  misc_feature: MA Experiment 20000185 PARAMETER Experiment Name: At_Roots__P Parameter: Organism Value: A. thaliana
  misc_feature: MA Experiment 20000185 PARAMETER Experiment Name: At_Roots__P Parameter: Tissue Value: Roots vs. Whole Plant
  misc_feature: MA Experiment ID: 20000234 Result: Down-regulated in Transcription
  misc_feature: MA Experiment 20000234 PARAMETER Experiment Name: At_Siliques_P Parameter: Age (day) Value: 21
  misc_feature: MA Experiment 20000234 PARAMETER Experiment Name: At_Siliques_P Parameter: Organism Value: A. thaliana
  misc_feature: MA Experiment 20000234 PARAMETER Experiment Name: At_Siliques_P Parameter: Plant Line Value: WS
  misc_feature: MA Experiment 20000234 PARAMETER Experiment Name: At_Siliques_P Parameter: Tissue Value: Less Than 5mm Siliques vs. Whole Plant
  misc_feature: MA Experiment ID: 20000235 Result: Down-regulated in Transcription
  misc_feature: MA Experiment 20000235 PARAMETER Experiment Name: At_Siliques_P Parameter: Age (day) Value: 21
  misc_feature: MA Experiment 20000235 PARAMETER Experiment Name: At_Siliques_P Parameter: Organism Value: A. thaliana
  misc_feature: MA Experiment 20000235 PARAMETER Experiment Name: At_Siliques_P Parameter: Plant Line Value: WS
  misc_feature: MA Experiment 20000235 PARAMETER Experiment Name: At_Siliques_P Parameter: Tissue Value: 5-10mm Siliques vs. Whole Plant
  misc_feature: MA Experiment ID: 20000264 Result: Up-regulated in Transcription
  misc_feature: MA Experiment 20000264 PARAMETER Experiment Name: At_Open_Flower_P Parameter: Age (day) Value: 21
  misc_feature: MA Experiment 20000264 PARAMETER Experiment Name: At_Open_Flower_P Parameter: Plant Line Value: WS
  misc_feature: MA Experiment 20000264 PARAMETER Experiment Name: At_Open_Flower_P Parameter: Tissue Value: Open Flower vs. Whole Plant
  misc_feature: MA Experiment ID: 20000267 Result: Up-regulated in Transcription
  misc_feature: MA Experiment 20000267 PARAMETER Experiment Name: At_Drought_P Parameter: Age (day) Value: 7
  misc_feature: MA Experiment 20000267 PARAMETER Experiment Name: At_Drought_P Parameter: Organism Value: A. thaliana
  misc_feature: MA Experiment 20000267 PARAMETER Experiment Name: At_Drought_P Parameter: Plant Line Value: WS
  misc_feature: MA Experiment 20000267 PARAMETER Experiment Name: At_Drought_P Parameter: Timepoint (hr) Value: 6
  misc_feature: MA Experiment 20000267 PARAMETER Experiment Name: At_Drought_P Parameter: Tissue Value: Whole Plant
  misc_feature: MA Experiment 20000267 PARAMETER Experiment Name: At_Drought_P Parameter: Treatment Value: Drought vs. No Drought
  misc_feature: MA Experiment ID: 20000268 Result: Up-regulated in Transcription
  misc_feature: MA Experiment 20000268 PARAMETER Experiment Name: At_100mM_NaCl__P Parameter: Age (day) Value: 14
  misc_feature: MA Experiment 20000268 PARAMETER Experiment Name: At_100mM_NaCl__P Parameter: Organism Value: A. thaliana
  misc_feature: MA Experiment 20000268 PARAMETER Experiment Name: At_100mM_NaCl__P Parameter: Plant Line Value: WS
  misc_feature: MA Experiment 20000268 PARAMETER Experiment Name: At_100mM_NaCl__P Parameter: Timepoint (hr) Value: 6
  misc_feature: MA Experiment 20000268 PARAMETER Experiment Name: At_100mM_NaCl__P Parameter: Tissue Value: Whole Plant
  misc_feature: MA Experiment 20000268 PARAMETER Experiment Name: At_100mM_NaCl__P Parameter: Treatment Value: 100mM NaCl vs. No Treatment
  misc_feature: MA Experiment ID: 20000436 Result: Up-regulated in Transcription
  misc_feature: MA Experiment 20000436 PARAMETER Experiment Name: At_Drought_P Parameter: Age (day) Value: 7
  misc_feature: MA Experiment 20000436 PARAMETER Experiment Name: At_Drought_P Parameter: Organism Value: A. thaliana
  misc_feature: MA Experiment 20000436 PARAMETER Experiment Name: At_Drought_P Parameter: Plant Line Value: WS
  misc_feature: MA Experiment 20000436 PARAMETER Experiment Name: At_Drought_P Parameter: Timepoint (hr) Value: 12
  misc_feature: MA Experiment 20000436 PARAMETER Experiment Name: At_Drought_P Parameter: Tissue Value: Whole Plant
  misc_feature: MA Experiment 20000436 PARAMETER Experiment Name: At_Drought_P Parameter: Treatment Value: Drought vs. No Drought
  misc_feature: MA Experiment ID: 20000437 Result: Up-regulated in Transcription
  misc_feature: MA Experiment 20000437 PARAMETER Experiment Name: At_Drought_P Parameter: Age (day) Value: 8
  misc_feature: MA Experiment 20000437 PARAMETER Experiment Name: At_Drought_P Parameter: Organism Value: A. thaliana
  misc_feature: MA Experiment 20000437 PARAMETER Experiment Name: At_Drought_P Parameter: Plant Line Value: WS
  misc_feature: MA Experiment 20000437 PARAMETER Experiment Name: At_Drought_P Parameter: Timepoint (hr) Value: 24
  misc_feature: MA Experiment 20000437 PARAMETER Experiment Name: At_Drought_P Parameter: Tissue Value: Whole Plant
  misc_feature: MA Experiment 20000437 PARAMETER Experiment Name: At_Drought_P Parameter: Treatment Value: Drought vs. No Drought
  misc_feature: MA Experiment ID: 20000438 Result: Down-regulated in Transcription
  misc_feature: MA Experiment 20000438 PARAMETER Experiment Name: At_Shoots__P Parameter: Age (day) Value: 14
  misc_feature: MA Experiment 20000438 PARAMETER Experiment Name: At_Shoots__P Parameter: Tissue Value: Shoots vs. Whole Plant
  misc_feature: MA Experiment ID: 20000445 Result: Up-regulated in Transcription
  misc_feature: MA Experiment 20000445 PARAMETER Experiment Name: At_100uM_NAA__P Parameter: Age (day) Value: 14
  misc_feature: MA Experiment 20000445 PARAMETER Experiment Name: At_100uM_NAA__P Parameter: Organism Value: A. thaliana
  misc_feature: MA Experiment 20000445 PARAMETER Experiment Name: At_100uM_NAA__P Parameter: Plant Line Value: WS
  misc_feature: MA Experiment 20000445 PARAMETER Experiment Name: At_100uM_NAA__P Parameter: Timepoint (hr) Value: 6
  misc_feature: MA Experiment 20000445 PARAMETER Experiment Name: At_100uM_NAA__P Parameter: Tissue Value: Aerial
  misc_feature: MA Experiment 20000445 PARAMETER Experiment Name: At_100uM_NAA__P Parameter: Treatment Value: 100uM NAA vs. No Treatment
  misc_feature: MA Experiment ID: 20000453 Result: Up-regulated in Transcription
  misc_feature: MA Experiment 20000453 PARAMETER Experiment Name: At_100uM_ABA_P Parameter: Age (day) Value: 15
  misc_feature: MA Experiment 20000453 PARAMETER Experiment Name: At_100uM_ABA_P Parameter: Organism Value: A. thaliana
  misc_feature: MA Experiment 20000453 PARAMETER Experiment Name: At_100uM_ABA_P Parameter: Plant Line Value: WS
  misc_feature: MA Experiment 20000453 PARAMETER Experiment Name: At_100uM_ABA_P Parameter: Timepoint (hr) Value: 24
  misc_feature: MA Experiment 20000453 PARAMETER Experiment Name: At_100uM_ABA_P Parameter: Tissue Value: Aerial
  misc_feature: MA Experiment 20000453 PARAMETER Experiment Name: At_100uM_ABA_P Parameter: Treatment Value: 100uM ABA vs. No Treatment
  misc_feature: MA Experiment ID: 20000527 Result: Down-regulated in Transcription
  misc_feature: MA Experiment 20000527 PARAMETER Experiment Name: At_10percent_PEG_P Parameter: Age (day) Value: 20
  misc_feature: MA Experiment 20000527 PARAMETER Experiment Name: At_10percent_PEG_P Parameter: Organism Value: A. thaliana
  misc_feature: MA Experiment 20000527 PARAMETER Experiment Name: At_10percent_PEG_P Parameter: Plant Line Value: WS
  misc_feature: MA Experiment 20000527 PARAMETER Experiment Name: At_10percent_PEG_P Parameter: Timepoint (day) Value: 20
  misc_feature: MA Experiment 20000527 PARAMETER Experiment Name: At_10percent_PEG_P Parameter: Tissue Value: Whole Plant
  misc_feature: MA Experiment 20000527 PARAMETER Experiment Name: At_10percent_PEG_P Parameter: Treatment Value: 10percent PEG vs. No Treatment
  misc_feature: MA Experiment ID: 20000794 Result: Up-regulated in Transcription
  misc_feature: MA Experiment 20000794 PARAMETER Experiment Name: At_Petals_P Parameter: Age (day) Value: 23-25 days
  misc_feature: MA Experiment 20000794 PARAMETER Experiment Name: At_Petals_P Parameter: Plant Line Value: WS
  misc_feature: MA Experiment 20000794 PARAMETER Experiment Name: At_Petals_P Parameter: Tissue Value: Petals vs. Whole plant
  misc_feature: MA Experiment ID: 20001757 Result: Down-regulated in Transcription
  misc_feature: MA Experiment 20001757 PARAMETER Experiment Name: At_50mM_NH4NO3_L-to-H_P Parameter: Timepoint (hr) Value: 6
  misc_feature: MA Experiment 20001757 PARAMETER Experiment Name: At_50mM_NH4NO3_L-to-H_P Parameter: Tissue Value: Leaf
  misc_feature: MA Experiment 20001757 PARAMETER Experiment Name: At_50mM_NH4NO3_L-to-H_P Parameter: Treatment Value: 50mM NH4NO3 vs 100mM Mannitol
  misc_feature: MA Experiment ID: 20001904 Result: Up-regulated in Transcription
  misc_feature: MA Experiment 20001904 PARAMETER Experiment Name: At_Drought_Reproduction_P Parameter: Age (day) Value: 37
  misc_feature: MA Experiment 20001904 PARAMETER Experiment Name: At_Drought_Reproduction_P Parameter: Organism Value: A. thaliana
  misc_feature: MA Experiment 20001904 PARAMETER Experiment Name: At_Drought_Reproduction_P Parameter: Plant Line Value: WS
  misc_feature: MA Experiment 20001904 PARAMETER Experiment Name: At_Drought_Reproduction_P Parameter: Timepoint (day) Value: 7
  misc_feature: MA Experiment 20001904 PARAMETER Experiment Name: At_Drought_Reproduction_P Parameter: Tissue Value: Rosettes
  misc_feature: MA Experiment 20001904 PARAMETER Experiment Name: At_Drought_Reproduction_P Parameter: Treatment Value: Drought vs. No Drought
  misc_feature: MA Experiment ID: 20001906 Result: Up-regulated in Transcription
  misc_feature: MA Experiment 20001906 PARAMETER Experiment Name: At_Drought_Reproduction_P Parameter: Age (day) Value: 35
  misc_feature: MA Experiment 20001906 PARAMETER Experiment Name: At_Drought_Reproduction_P Parameter: Organism Value: A. thaliana
  misc_feature: MA Experiment 20001906 PARAMETER Experiment Name: At_Drought_Reproduction_P Parameter: Plant Line Value: WS
  misc_feature: MA Experiment 20001906 PARAMETER Experiment Name: At_Drought_Reproduction_P Parameter: Timepoint (day) Value: 5
  misc_feature: MA Experiment 20001906 PARAMETER Experiment Name: At_Drought_Reproduction_P Parameter: Tissue Value: Siliques
  misc_feature: MA Experiment 20001906 PARAMETER Experiment Name: At_Drought_Reproduction_P Parameter: Treatment Value: Drought vs. No Drought
  misc_feature: MA Experiment ID: 20001908 Result: Up-regulated in Transcription
  misc_feature: MA Experiment 20001908 PARAMETER Experiment Name: At_Drought_Reproduction_P Parameter: Age (day) Value: 40
  misc_feature: MA Experiment 20001908 PARAMETER Experiment Name: At_Drought_Reproduction_P Parameter: Organism Value: A. thaliana
  misc_feature: MA Experiment 20001908 PARAMETER Experiment Name: At_Drought_Reproduction_P Parameter: Plant Line Value: WS
  misc_feature: MA Experiment 20001908 PARAMETER Experiment Name: At_Drought_Reproduction_P Parameter: Timepoint (day) Value: 10
  misc_feature: MA Experiment 20001908 PARAMETER Experiment Name: At_Drought_Reproduction_P Parameter: Tissue Value: Siliques
  misc_feature: MA Experiment 20001908 PARAMETER Experiment Name: At_Drought_Reproduction_P Parameter: Treatment Value: Drought vs. No Drought
atggctagaaacgttctagtaagcggtggtgctggatacatcggtagtcacacggtgcttcaacttcttctcggtggttactccgtcgtagttgttgataatctcgataattcctccgccgtctctcttcaacgtgtgaagaaactcgcggctgaacacggagaacgcctctccttccaccaggtggatcttcgagacaggtctgctcttgagaagatattctcagaaacaaagtttgatgcagtgatacattttgctggacttaaagcagttggtgagagtgtagagaagcctttgctttattataataataatcttgttggtactattactcttttggaagttatggctcaacatggctgcaaaaatcttgtgttttcatcatcagcaactgtgtatggctctccaaaagaagttccttgtacagaggagtttccaatttctgctttgaacccatatggacgaacaaagctattcattgaggaaatctgccgcgatgtatacggttctgacccggaatggaagattatattgcttaggtatttcaatcctgttggtgcacatcctagtggtgacattggtgaagaccctcgtggtattccaaacaatctcatgccctttgtacaacaagtggctgttggtaggagacctcatctcactgtctttggaaatgattacaatacaaaagatggaacaggggttcgagattacattcatgttattgatttagctgatggacacatagcggctctacgtaagctagaagattgcaagatcggttgtgaagtgtacaatctcggaacaggaaatggaacatcagttcttgaaatggttgatgcttttgaaaaagcatccggaaagaaaatccctctggtgatcgcgggacgtcgaccgggagatgctgaagttgtatacgcctcgacggaaagagcagaaagtgaattgaattggaaggccaaatatgggattgaggagatgtgtagagatttgtggaactgggctagtaataatccttatggatatgattcctcttctgaagacaactctcattaa

SEQ ID NO: 88702 - protein, 350 aa, Arabidopsis thaliana; identical to SEQ ID NO: 29867
  peptide (1)..(350): Ceres Seq. ID no. 12711676
  misc_feature (5)..(338): Pfam Name: NAD dependent epimerase/dehydratase family Pfam Description: NAD dependent epimerase/dehydratase family
  misc_feature (1)..(350): Homolog of NCBI NO: 12643850 NR Description: Probable UDP-glucose 4-epimerase At4g10960
  misc_feature (1)..(350): Homolog of NCBI NO: 15236988 NR Description: UDP-galactose 4-epimerase - like protein; protein At4g10960.1, supported by cDNA: 15608., supported by cDNA:
  misc_feature (1)..(350): Homolog of NCBI NO: 21553659 NR Description: UDP-galactose 4-epimerase-like protein
  misc_feature (1)..(349): Homolog of NCBI NO: 15236663 NR Description: UDPglucose 4-epimerase - like protein; protein
  misc_feature (1)..(349): Homolog of NCBI NO: 21536846 NR Description: UDPglucose 4-epimerase-like protein [Arabidopsis
  misc_feature (2)..(350): Homolog of NCBI NO: 11386775 NR Description: UDP-glucose 4-epimerase GEPI48 (Galactowaldenase)
  misc_feature (1)..(344): Homolog of NCBI NO: 15217653 NR Description: UDP-galactose 4-epimerase, putative; protein id:
  misc_feature (62)..(235): Homolog of NCBI NO: 6633809 NR Description: F1N19.2 [Arabidopsis thaliana]
  misc_feature (234)..(344): Homolog of NCBI NO: 6633809 NR Description: F1N19.2 [Arabidopsis thaliana]
  misc_feature (1)..(62): Homolog of NCBI NO: 6633809 NR Description: F1N19.2 [Arabidopsis thaliana]

SEQ ID NO: 88703 - protein, 235 aa, Arabidopsis thaliana
  peptide (1)..(235): Ceres Seq. ID no. 12711677
  misc_feature (1)..(223): Pfam Name: NAD dependent epimerase/dehydratase family Pfam Description: NAD dependent epimerase/dehydratase family
  misc_feature (1)..(235): Homolog of NCBI NO: 12643850 NR Description: Probable UDP-glucose 4-epimerase At4g10960
  misc_feature (1)..(235): Homolog of NCBI NO: 15236988 NR Description: UDP-galactose 4-epimerase - like protein; protein At4g10960.1, supported by cDNA: 15608., supported by cDNA:
  misc_feature (1)..(235): Homolog of NCBI NO: 21553659 NR Description: UDP-galactose 4-epimerase-like protein
  misc_feature (1)..(234): Homolog of NCBI NO: 15236663 NR Description: UDPglucose 4-epimerase - like protein; protein
  misc_feature (1)..(234): Homolog of NCBI NO: 21536846 NR Description: UDPglucose 4-epimerase-like protein [Arabidopsis
  misc_feature (1)..(235): Homolog of NCBI NO: 11386775 NR Description: UDP-glucose 4-epimerase GEPI48 (Galactowaldenase)
  misc_feature (1)..(229): Homolog of NCBI NO: 15217653 NR Description: UDP-galactose 4-epimerase, putative; protein id:
  misc_feature (1)..(120): Homolog of NCBI NO: 6633809 NR Description: F1N19.2 [Arabidopsis thaliana]
  misc_feature (119)..(229): Homolog of NCBI NO: 6633809 NR Description: F1N19.2 [Arabidopsis thaliana]
  misc_feature (1)..(234): Homolog of NCBI NO: 32130594 NR Description: UDP-glucose-4-epimerase [Zea mays]
MAQHGCKNLVFSSSATVYGSPKEVPCTEEFPISALNPYGRTKLFIEEICRDVYGSDPEWKIILLRYFNPVGAHPSGDIGEDPRGIPNNLMPFVQQVAVGRRPHLTVFGNDYNTKDGTGVRDYIHVIDLADGHIAALRKLEDCKIGCEVYNLGTGNGTSVLEMVDAFEKASGKKIPLVIAGRRPGDAEVVYASTERAESELNWKAKYGIEEMCRDLWNWASNNPYGYDSSSEDNSH

SEQ ID NO: 88704 - DNA, 693 bp, Arabidopsis thaliana
  misc_feature (1)..(693): Ceres Seq. ID no. 12711694
  misc_feature: MA Experiment ID: 20000180 Result: Down-regulated in Transcription
  misc_feature: MA Experiment 20000180 PARAMETER Experiment Name: At_Germinating_Seeds_P Parameter: Age (hr) Value: 24 vs. 0
  misc_feature: MA Experiment 20000180 PARAMETER Experiment Name: At_Germinating_Seeds_P Parameter: Tissue Value: Germinating Seeds
  misc_feature: MA Experiment ID: 20000439 Result: Up-regulated in Transcription
  misc_feature: MA Experiment 20000439 PARAMETER Experiment Name: At_Roots__P Parameter: Age (day) Value: 14 vs. 21
  misc_feature: MA Experiment 20000439 PARAMETER Experiment Name: At_Roots__P Parameter: Organism Value: A. thaliana
  misc_feature: MA Experiment 20000439 PARAMETER Experiment Name: At_Roots__P Parameter: Tissue Value: Roots vs. Whole Plant
  misc_feature: MA Experiment ID: 20000794 Result: Down-regulated in Transcription
  misc_feature: MA Experiment 20000794 PARAMETER Experiment Name: At_Petals_P Parameter: Age (day) Value: 23-25 days
  misc_feature: MA Experiment 20000794 PARAMETER Experiment Name: At_Petals_P Parameter: Plant Line Value: WS
  misc_feature: MA Experiment 20000794 PARAMETER Experiment Name: At_Petals_P Parameter: Tissue Value: Petals vs. Whole plant
  misc_feature: MA Experiment ID: 20001556 Result: Up-regulated in Transcription
  misc_feature: MA Experiment 20001556 PARAMETER Experiment Name: At_Drought_Soil_Dry_P Parameter: Age (day) Value: 26
  misc_feature: MA Experiment 20001556 PARAMETER Experiment Name: At_Drought_Soil_Dry_P Parameter: Organism Value: A. thaliana
  misc_feature: MA Experiment 20001556 PARAMETER Experiment Name: At_Drought_Soil_Dry_P Parameter: Plant Line Value: WS
  misc_feature: MA Experiment 20001556 PARAMETER Experiment Name: At_Drought_Soil_Dry_P Parameter: Post Timepoint (hr) Value: None
  misc_feature: MA Experiment 20001556 PARAMETER Experiment Name: At_Drought_Soil_Dry_P Parameter: Post-Treatment Value: None
  misc_feature: MA Experiment 20001556 PARAMETER Experiment Name: At_Drought_Soil_Dry_P Parameter: Timepoint (day) Value: 12
  misc_feature: MA Experiment 20001556 PARAMETER Experiment Name: At_Drought_Soil_Dry_P Parameter: Treatment Value: Drought vs. No Drought
  misc_feature: MA Experiment ID: 20001558 Result: Up-regulated in Transcription
  misc_feature: MA Experiment 20001558 PARAMETER Experiment Name: At_Drought_Soil_Dry_P Parameter: Age (day) Value: 27
  misc_feature: MA Experiment 20001558 PARAMETER Experiment Name: At_Drought_Soil_Dry_P Parameter: Organism Value: A. thaliana
  misc_feature: MA Experiment 20001558 PARAMETER Experiment Name: At_Drought_Soil_Dry_P Parameter: Plant Line Value: WS
  misc_feature: MA Experiment 20001558 PARAMETER Experiment Name: At_Drought_Soil_Dry_P Parameter: Post Timepoint (hr) Value: 6
  misc_feature: MA Experiment 20001558 PARAMETER Experiment Name: At_Drought_Soil_Dry_P Parameter: Post-Treatment Value: Re-Water vs. No Drought
  misc_feature: MA Experiment 20001558 PARAMETER Experiment Name: At_Drought_Soil_Dry_P Parameter: Timepoint (day) Value: 13
  misc_feature: MA Experiment 20001558 PARAMETER Experiment Name: At_Drought_Soil_Dry_P Parameter: Treatment Value: Drought vs. No Drought
  misc_feature: MA Experiment ID: 20001757 Result: Up-regulated in Transcription
  misc_feature: MA Experiment 20001757 PARAMETER Experiment Name: At_50mM_NH4NO3_L-to-H_P Parameter: Timepoint (hr) Value: 6
  misc_feature: MA Experiment 20001757 PARAMETER Experiment Name: At_50mM_NH4NO3_L-to-H_P Parameter: Tissue Value: Leaf
  misc_feature: MA Experiment 20001757 PARAMETER Experiment Name: At_50mM_NH4NO3_L-to-H_P Parameter: Treatment Value: 50mM NH4NO3 vs 100mM Mannitol
atgaactcactcgccattagagtctccaaggttctcagatcctcttcaatatctcctttagcaataagtgctgagagaggctctaagtcgtggttctctactggtcctatcgatgaaggtgtagaagaagattttgaagaaaatgttacagaaaggcctgagcttcaacctcatggagttgatcctcgtaaaggttggggatttcgcggtgttcatagggcgattatttgtgggaaagtagggcaagcaccgttacagaagatcttaaggaacgggcggacagtaacgatctttacagtaggaacaggtgggatgtttgatcagaggcttgtaggagctactaatcagccaaaaccagctcagtggcatagaatcgctgtgcacaacgaagtgcttggctcttacgctgtccaaaaactcgctaaaaactcgtcggtttatgtggaaggtgatattgagactagagtgtataatgatagcatcagcagtgaagtgaagagtatccctgagatttgcgttcgtcgtgatggtaagattcggatgatcaaatatggtgaaagcattagcaaaatctcttttgatgagctaactaatattcgcaaagaaaaaagagatagttgcttgtgttttaatatttgtttcacatttggcagaagaaggattgatttagtcggagcaagaatattccggtga

SEQ ID NO: 88705 - protein, 230 aa, Arabidopsis thaliana
  peptide (1)..(230): Ceres Seq. ID no. 12711695
  misc_feature (71)..(177): Pfam Name: Single-strand binding protein family Pfam Description: Single-strand binding protein family
  misc_feature (1)..(177): Homolog of NCBI NO: 7487337 NR Description: hypothetical protein T22B4.40 - Arabidopsis >gi|4850285|emb|CAB43041.1| putative protein [Arabidopsis >gi|7267804|emb|CAB81207.1| putative protein [Arabidopsis
  misc_feature (1)..(196): Homolog of NCBI NO: 30681642 NR Description: expressed protein [Arabidopsis thaliana] unknown protein [Arabidopsis thaliana]
  misc_feature (105)..(177): Homolog of NCBI NO: 3600051 NR Description: contains similarity to the single-strand binding
  misc_feature (46)..(199): Homolog of NCBI NO: 15229675 NR Description: hypothetical protein; protein id: At3g18580.1 thaliana] >gi|9294319|dbj|BAB02216.1| contains similarity to
  misc_feature (8)..(179): Homolog of NCBI NO: 34911652 NR Description: P0510C12.16 [Oryza sativa (japonica
  misc_feature (69)..(192): Homolog of NCBI NO: 37525024 NR Description: hypothetical protein [Photorhabdus luminescens laumondii TTO1] >gi|36784450|emb|CAE13334.1| unnamed protein
  misc_feature (71)..(182): Homolog of NCBI NO: 23014489 NR Description: hypothetical protein [Magnetospirillum
  misc_feature (71)..(174): Homolog of NCBI NO: 22959712 NR Description: hypothetical protein [Rhodobacter sphaeroides]
  misc_feature (71)..(182): Homolog of NCBI NO: 22964744 NR Description: hypothetical protein [Rhodopseudomonas palustris]
  misc_feature (71)..(182): Homolog of NCBI NO: 16125716 NR Description: single-strand binding protein [Caulobacter
MNSLAIRVSKVLRSSSISPLAISAERGSKSWFSTGPIDEGVEEDFEENVTERPELQPHGVDPRKGWGFRGVHRAIICGKVGQAPLQKILRNGRTVTIFTVGTGGMFDQRLVGATNQPKPAQWHRIAVHNEVLGSYAVQKLAKNSSVYVEGDIETRVYNDSISSEVKSIPEICVRRDGKIRMIKYGESISKISFDELTNIRKEKRDSCLCFNICFTFGRRRIDLVGARIFR

SEQ ID NO: 88706 - protein, 126 aa, Arabidopsis thaliana
  peptide (1)..(126): Ceres Seq. ID no. 12711696
  misc_feature (1)..(73): Pfam Name: Single-strand binding protein family Pfam Description: Single-strand binding protein family
  misc_feature (1)..(73): Homolog of NCBI NO: 7487337 NR Description: hypothetical protein T22B4.40 - Arabidopsis >gi|4850285|emb|CAB43041.1| putative protein [Arabidopsis >gi|7267804|emb|CAB81207.1| putative protein [Arabidopsis
  misc_feature (1)..(92): Homolog of NCBI NO: 30681642 NR Description: expressed protein [Arabidopsis thaliana] unknown protein [Arabidopsis thaliana]
  misc_feature (1)..(73): Homolog of NCBI NO: 3600051 NR Description: contains similarity to the single-strand binding
  misc_feature (1)..(95): Homolog of NCBI NO: 15229675 NR Description: hypothetical protein; protein id: At3g18580.1 thaliana] >gi|9294319|dbj|BAB02216.1| contains similarity to
  misc_feature (1)..(75): Homolog of NCBI NO: 34911652 NR Description: P0510C12.16 [Oryza sativa (japonica
  misc_feature (1)..(88): Homolog of NCBI NO: 37525024 NR Description: hypothetical protein [Photorhabdus luminescens laumondii TTO1] >gi|36784450|emb|CAE13334.1| unnamed protein
  misc_feature (1)..(78): Homolog of NCBI NO: 23014489 NR Description: hypothetical protein [Magnetospirillum
  misc_feature (1)..(70): Homolog of NCBI NO: 22959712 NR Description: hypothetical protein [Rhodobacter sphaeroides]
  misc_feature (1)..(78): Homolog of NCBI NO: 22964744 NR Description: hypothetical protein [Rhodopseudomonas palustris]
  misc_feature (1)..(78): Homolog of NCBI NO: 16125716 NR Description: single-strand binding protein [Caulobacter
MFDQRLVGATNQPKPAQWHRIAVHNEVLGSYAVQKLAKNSSVYVEGDIETRVYNDSISSEVKSIPEICVRRDGKIRMIKYGESISKISFDELTNIRKEKRDSCLCFNICFTFGRRRIDLVGARIFR

SEQ ID NO: 88707 - DNA, 2790 bp, Arabidopsis thaliana
  misc_feature (1)..(2790): Ceres Seq. ID no. 12711701
  misc_feature: MA Experiment ID: 20000495 Result: Down-regulated in Transcription
  misc_feature: MA Experiment 20000495 PARAMETER Experiment Name: At_Guard_Cells_P Parameter: Harvest Date Value: 8/2/2002
  misc_feature: MA Experiment 20000495 PARAMETER Experiment Name: At_Guard_Cells_P Parameter: Organism Value: A. thaliana
  misc_feature: MA Experiment 20000495 PARAMETER Experiment Name: At_Guard_Cells_P Parameter: Tissue Value: Guard Cells vs. Leaves
  misc_feature: MA Experiment ID: 20000496 Result: Down-regulated in Transcription
  misc_feature: MA Experiment 20000496 PARAMETER Experiment Name: At_Guard_Cells_P Parameter: Harvest Date Value: 7/19/2002
  misc_feature: MA Experiment 20000496 PARAMETER Experiment Name: At_Guard_Cells_P Parameter: Organism Value: Canola
  misc_feature: MA Experiment 20000496 PARAMETER Experiment Name: At_Guard_Cells_P Parameter: Tissue Value: Guard Cells vs. Leaves
  misc_feature: MA Experiment ID: 20001451 Result: Down-regulated in Transcription
  misc_feature: MA Experiment 20001451 PARAMETER Experiment Name: At_Far-red-induction_P Parameter: Age (day) Value: 7
  misc_feature: MA Experiment 20001451 PARAMETER Experiment Name: At_Far-red-induction_P Parameter: Light Value: Far-red vs. White
  misc_feature: MA Experiment 20001451 PARAMETER Experiment Name: At_Far-red-induction_P Parameter: Organism Value: A. thaliana
  misc_feature: MA Experiment 20001451 PARAMETER Experiment Name: At_Far-red-induction_P Parameter: Plant Line Value: Columbia
  misc_feature: MA Experiment 20001451 PARAMETER Experiment Name: At_Far-red-induction_P Parameter: Timepoint (hr) Value: 24
  misc_feature: MA Experiment 20001451 PARAMETER Experiment Name: At_Far-red-induction_P Parameter: Tissue Value: Whole Plant
  misc_feature: MA Experiment ID: 20001560 Result: Down-regulated in Transcription
  misc_feature: MA Experiment 20001560 PARAMETER Experiment Name: At_Drought_Soil_Dry_P Parameter: Age (day) Value: 28
  misc_feature: MA Experiment 20001560 PARAMETER Experiment Name: At_Drought_Soil_Dry_P Parameter: Organism Value: A. thaliana
  misc_feature: MA Experiment 20001560 PARAMETER Experiment Name: At_Drought_Soil_Dry_P Parameter: Plant Line Value: WS
  misc_feature: MA Experiment 20001560 PARAMETER Experiment Name: At_Drought_Soil_Dry_P Parameter: Post Timepoint (hr) Value: None
  misc_feature: MA Experiment 20001560 PARAMETER Experiment Name: At_Drought_Soil_Dry_P Parameter: Post-Treatment Value: None
  misc_feature: MA Experiment 20001560 PARAMETER Experiment Name: At_Drought_Soil_Dry_P Parameter: Timepoint (day) Value: 14
  misc_feature: MA Experiment 20001560 PARAMETER Experiment Name: At_Drought_Soil_Dry_P Parameter: Treatment Value: Drought vs. No Drought
atggatgagggatcagtaggggatgtgagtaggattgatgaagctgatgttgctcaccttcaattcaagaatagtgagcagtcgtttaaaccggagaacattgaagtccgggaagtaaaagaagtgcaggttcagagagaagctggttctcctgattgttcttatggtgtaatagcagattttttagatggtaagaatggtggtgaccatgtggagcttatagggaatgaaccatgttctagccggcagaatacaaatgatgagggggatgttgtcgaggagttgactgttaaaacttgtgagggatcgagtatggctatagttggtagaccaagtagtagagctagattagagatgaatcgcagtcagtttctgcatcgttttccgctagacggtgatttaccgggtagtagttctatgagtaagaaggtaattgacaggggaacagtaagtatcttgagaaatgctgggaaaatgtctttgcctgagacttcaaatggacaactggctattattgctgttaatggagaagctaatgaacatttgacaaatgttgaacgaaatcctgtacctgtagaggcattgtctcatgaaggcatcaagacaaagatgttatcgcagtctgggttttctcagttttttgttagaaaaacattgaaagggaagggagttactttcagaggcccgccaaacaatagatctaaagcgaggaatatggatcagcaaactgtagctagttctggtagcgctttagtaatagctaatacttcagcaaagatttctagcagcatccctttggcggcttatgatggttctcaacgagagtcttttgacagcaacatgaacaaagagactttaagtcaactcgaaaaccctctggttagaagacggttaggagatacttctagtctctctatccctgcaaagaagcagaaatcaagtggaccaagctctagacagtggcctatgtttcaacgagctggtggcgtcaatatccaaactgaaaataatgatggcgcgatacaggagtttcatttcagatctagtcaacctcattgtagtacagttgcctgcccttttacttcagtgagtgagcagttggaagagaaatggtatgcgagccctgaggagctcaggggtgacatgcgttcagcctcttcaaacatctatagtttgggtattcttctttatgagttgctgagccaatttcagtgtgaaagagctcgtgaggctgcaatgtctgatatccgacaccgcattcttcctcccaaatttctgtcggagaatccaaaggaagctgggttttgtctttggttacttcatccagaatcttcatgccgaccatcaaccaggcaatgcttatctttatccattgaacaagaggacacagagtctgaactcttgcagcatttccttttcttgtcccaagagaaaaggcagaagcatgctggaaatttgatggaagaaattgcgtccgtagaagcagatatcgaggaaattgtcaagagacgttgtgccatagggcctccgtccctggaagaagcttctagctcatctcctgcttctagtgtacctgaaatgagactgatcaggaacattaatcagcttgaaagcgcttatttcgctgcaaggatagacgcacatctccctgaagcacgttataggttacgcccagatagagatctgctaagaaatagtgataatactgtagcagaagtagaaaacagtgagacttggagctcagatgatcgtgttggagcgttctttgatgggttatgcaaatatgctcgatatagtaagtttgaaactcggggtgtgctgaggaccagtgagttgaacaacacttcaaatgtgatttgttctctgggttttgatcgggacgaggattattttgccacagctggtgtgtcgaaaaaaattaagatatatgagttcaattcccttttcaacgaatctgttgacattcattatccagccatagaaatgccaaatagatcaaagcttagcggcgtttgctggaacaactacattaggaactacctagcttcctctgattatgatggtattgtcaagttatgggatgtgacaacaggacaggccatttcacatttcatagagcatgagaagagggcttggtctgttgacttctctgaagcttgtccgacaaaattagccagtggaagcgatgattgttctgtgaagctatggaacatcaatgagaggaactgcttaggaacaatcaggaacattgcaaacgtttgttgtgtgcaattttctccacagtcctctcacttgctagcctttggatcatcagacttcagaacctactgctatgatctaaggaatttaagaactccttggtgcatactgtcaggacacaacaaagcagttagctatgcgaagttcttggataatgaaactcttgtaacagcatcaactgataacacgttaaagctttgggatcttaagaaaaccactcacggtggcctctcaacaaatgcttgcagcttaacttttggcggccatacaaatgagaagaactttgttggtttgtctacttctgatggatatatagcttgtggctctgagacaaatgaggtttatgcctatcaccggtctcttcccatgccaattacctcgtacaagtttggttctattgatccaatatcaggtaaggagatagaggaggacaacaacctgttcgtttcaagcgtttgctggagaaaaagatcgaatatggttgtttcagctagctcaaatgggtcaatcaaagttctacagttggtctga

SEQ ID NO: 88708 - protein, 929 aa, Arabidopsis thaliana
  peptide (1)..(929): Ceres Seq. ID no. 12711702
  misc_feature (371)..(453): Pfam Name: Protein kinase domain Pfam Description: Protein kinase domain
  misc_feature (552)..(929): Homolog of NCBI NO: 30681665 NR Description: WD-40 repeat protein family [Arabidopsis thaliana]
  misc_feature (552)..(929): Homolog of NCBI NO: 7487340 NR Description: hypothetical protein T22B4.90 - Arabidopsis >gi|4850290|emb|CAB43046.1| COP1 like protein [Arabidopsis >gi|7267810|emb|CAB81212.1| COP1 like protein [Arabidopsis
  misc_feature (1)..(274): Homolog of NCBI NO: 7486346 NR Description: hypothetical protein F2P3.14 - Arabidopsis >gi|3600060|gb|AAC35547.1| contains similarity to protein kinases
  misc_feature (271)..(453): Homolog of NCBI NO: 7486346 NR Description: hypothetical protein F2P3.14 - Arabidopsis >gi|3600060|gb|AAC35547.1| contains similarity to protein kinases
  misc_feature (455)..(929): Homolog of NCBI NO: 30690337 NR Description: photomorphogenesis repressor protein -related thaliana] >gi|4809171|gb|AAD30124.1|AF135455_1 phytochrome A
  misc_feature (362)..(503): Homolog of NCBI NO: 30690337 NR Description: photomorphogenesis repressor protein -related thaliana] >gi|4809171|gb|AAD30124.1|AF135455_1 phytochrome A
  misc_feature (455)..(929): Homolog of NCBI NO: 25408984 NR Description: probable photomorphogenesis repressor protein - Arabidopsis thaliana >gi|4559377|gb|AAD23037.1| putative
  misc_feature (465)..(503): Homolog of NCBI NO: 25408984 NR Description: probable photomorphogenesis repressor protein - Arabidopsis thaliana >gi|4559377|gb|AAD23037.1| putative
  misc_feature (487)..(740): Homolog of NCBI NO: 7486345 NR Description: hypothetical protein F2P3.13 - Arabidopsis
  misc_feature (409)..(929): Homolog of NCBI NO: 15219179 NR Description: phytochrome A supressor spa1, putative; protein At1g53090.1 [Arabidopsis thaliana] >gi|14532798|gb|AAK64180.1| phytochrome A supressor spa1 protein [Arabidopsis thaliana]
MDEGSVGDVSRIDEADVAHLQFKNSEQSFKPENIEVREVKEVQVQREAGSPDCSYGVIADFLDGKNGGDHVELIGNEPCSSRQNTNDEGDVVEELTVKTCEGSSMAIVGRPSSRARLEMNRSQFLHRFPLDGDLPGSSSMSKKVIDRGTVSILRNAGKMSLPETSNGQLAIIAVNGEANEHLTNVERNPVPVEALSHEGIKTKMLSQSGFSQFFVRKTLKGKGVTFRGPPNNRSKARNMDQQTVASSGSALVIANTSAKISSSIPLAAYDGSQRESFDSNMNKETLSQLENPLVRRRLGDTSSLSIPAKKQKSSGPSSRQWPMFQRAGGVNIQTENNDGAIQEFHFRSSQPHCSTVACPFTSVSEQLEEKWYASPEELRGDMRSASSNIYSLGILLYELLSQFQCERAREAAMSDIRHRILPPKFLSENPKEAGFCLWLLHPESSCRPSTRQCLSLSIEQEDTESELLQHFLFLSQEKRQKHAGNLMEEIASVEADIEEIVKRRCAIGPPSLEEASSSSPASSVPEMRLIRNINQLESAYFAARIDAHLPEARYRLRPDRDLLRNSDNTVAEVENSETWSSDDRVGAFFDGLCKYARYSKFETRGVLRTSELNNTSNVICSLGFDRDEDYFATAGVSKKIKIYEFNSLFNESVDIHYPAIEMPNRSKLSGVCWNNYIRNYLASSDYDGIVKLWDVTTGQAISHFIEHEKRAWSVDFSEACPTKLASGSDDCSVKLWNINERNCLGTIRNIANVCCVQFSPQSSHLLAFGSSDFRTYCYDLRNLRTPWCILSGHNKAVSYAKFLDNETLVTASTDNTLKLWDLKKTTHGGLSTNACSLTFGGHTNEKNFVGLSTSDGYIACGSETNEVYAYHRSLPMPITSYKFGSIDPISGKEIEEDNNLFVSSVCWRKRSNMVVSASSNGSIKVLQLV

SEQ ID NO: 88709 - protein, 825 aa, Arabidopsis thaliana
  peptide (1)..(825): Ceres Seq. ID no. 12711703
  misc_feature (267)..(349): Pfam Name: Protein kinase domain Pfam Description: Protein kinase domain
  misc_feature (448)..(825): Homolog of NCBI NO: 30681665 NR Description: WD-40 repeat protein family [Arabidopsis thaliana]
  misc_feature (448)..(825): Homolog of NCBI NO: 7487340 NR Description: hypothetical protein T22B4.90 - Arabidopsis >gi|4850290|emb|CAB43046.1| COP1 like protein [Arabidopsis >gi|7267810|emb|CAB81212.1| COP1 like protein [Arabidopsis
  misc_feature (1)..(170): Homolog of NCBI NO: 7486346 NR Description: hypothetical protein F2P3.14 - Arabidopsis >gi|3600060|gb|AAC35547.1| contains similarity to protein kinases
  misc_feature (167)..(349): Homolog of NCBI NO: 7486346 NR Description: hypothetical protein F2P3.14 - Arabidopsis >gi|3600060|gb|AAC35547.1| contains similarity to protein kinases
  misc_feature (351)..(825): Homolog of NCBI NO: 30690337 NR Description: photomorphogenesis repressor protein -related thaliana] >gi|4809171|gb|AAD30124.1|AF135455_1 phytochrome A
  misc_feature (258)..(399): Homolog of NCBI NO: 30690337 NR Description: photomorphogenesis repressor protein -related thaliana] >gi|4809171|gb|AAD30124.1|AF135455_1 phytochrome A
  misc_feature (351)..(825): Homolog of NCBI NO: 25408984 NR Description: probable photomorphogenesis repressor protein - Arabidopsis thaliana >gi|4559377|gb|AAD23037.1| putative
  misc_feature (361)..(399): Homolog of NCBI NO: 25408984 NR Description: probable photomorphogenesis repressor protein - Arabidopsis thaliana >gi|4559377|gb|AAD23037.1| putative
  misc_feature (383)..(636): Homolog of NCBI NO: 7486345 NR Description: hypothetical protein F2P3.13 - Arabidopsis
  misc_feature (305)..(825): Homolog of NCBI NO: 15219179 NR Description: phytochrome A supressor spa1, putative; protein At1g53090.1 [Arabidopsis thaliana] >gi|14532798|gb|AAK64180.1| phytochrome A supressor spa1 protein [Arabidopsis thaliana]
MAIVGRPSSRARLEMNRSQFLHRFPLDGDLPGSSSMSKKVIDRGTVSILRNAGKMSLPETSNGQLAIIAVNGEANEHLTNVERNPVPVEALSHEGIKTKMLSQSGFSQFFVRKTLKGKGVTFRGPPNNRSKARNMDQQTVASSGSALVIANTSAKISSSIPLAAYDGSQRESFDSNMNKETLSQLENPLVRRRLGDTSSLSIPAKKQKSSGPSSRQWPMFQRAGGVNIQTENNDGAIQEFHFRSSQPHCSTVACPFTSVSEQLEEKWYASPEELRGDMRSASSNIYSLGILLYELLSQFQCERAREAAMSDIRHRILPPKFLSENPKEAGFCLWLLHPESSCRPSTRQCLSLSIEQEDTESELLQHFLFLSQEKRQKHAGNLMEEIASVEADIEEIVKRRCAIGPPSLEEASSSSPASSVPEMRLIRNINQLESAYFAARIDAHLPEARYRLRPDRDLLRNSDNTVAEVENSETWSSDDRVGAFFDGLCKYARYSKFETRGVLRTSELNNTSNVICSLGFDRDEDYFATAGVSKKIKIYEFNSLFNESVDIHYPAIEMPNRSKLSGVCWNNYIRNYLASSDYDGIVKLWDVTTGQAISHFIEHEKRAWSVDFSEACPTKLASGSDDCSVKLWNINERNCLGTIRNIANVCCVQFSPQSSHLLAFGSSDFRTYCYDLRNLRTPWCILSGHNKAVSYAKFLDNETLVTASTDNTLKLWDLKKTTHGGLSTNACSLTFGGHTNEKNFVGLSTSDGYIACGSETNEVYAYHRSLPMPITSYKFGSIDPISGKEIEEDNNLFVSSVCWRKRSNMVVSASSNGSIKVLQLV

SEQ ID NO: 88710 - protein, 811 aa, Arabidopsis thaliana
  peptide (1)..(811): Ceres Seq. ID no. 12711704
  misc_feature (253)..(335): Pfam Name: Protein kinase domain Pfam Description: Protein kinase domain
  misc_feature (434)..(811): Homolog of NCBI NO: 30681665 NR Description: WD-40 repeat protein family [Arabidopsis thaliana]
  misc_feature (434)..(811): Homolog of NCBI NO: 7487340 NR Description: hypothetical protein T22B4.90 - Arabidopsis >gi|4850290|emb|CAB43046.1| COP1 like protein [Arabidopsis >gi|7267810|emb|CAB81212.1| COP1 like protein [Arabidopsis
  misc_feature (1)..(156): Homolog of NCBI NO: 7486346 NR Description: hypothetical protein F2P3.14 - Arabidopsis >gi|3600060|gb|AAC35547.1| contains similarity to protein kinases
  misc_feature (153)..(335): Homolog of NCBI NO: 7486346 NR Description: hypothetical protein F2P3.14 - Arabidopsis >gi|3600060|gb|AAC35547.1| contains similarity to protein kinases
  misc_feature (337)..(811): Homolog of NCBI NO: 30690337 NR Description: photomorphogenesis repressor protein -related thaliana] >gi|4809171|gb|AAD30124.1|AF135455_1 phytochrome A
  misc_feature (244)..(385): Homolog of NCBI NO: 30690337 NR Description: photomorphogenesis repressor protein -related thaliana] >gi|4809171|gb|AAD30124.1|AF135455_1 phytochrome A
  misc_feature (337)..(811): Homolog of NCBI NO: 25408984 NR Description: probable photomorphogenesis repressor protein - Arabidopsis thaliana >gi|4559377|gb|AAD23037.1| putative
  misc_feature (347)..(385): Homolog of NCBI NO: 25408984 NR Description: probable photomorphogenesis repressor protein - Arabidopsis thaliana >gi|4559377|gb|AAD23037.1| putative
  misc_feature (369)..(622): Homolog of NCBI NO: 7486345 NR Description: hypothetical protein F2P3.13 - Arabidopsis
  misc_feature (291)..(811): Homolog of NCBI NO: 15219179 NR Description: phytochrome A supressor spa1, putative; protein At1g53090.1 [Arabidopsis thaliana] >gi|14532798|gb|AAK64180.1| phytochrome A supressor spa1 protein [Arabidopsis thaliana]
MNRSQFLHRFPLDGDLPGSSSMSKKVIDRGTVSILRNAGKMSLPETSNGQLAIIAVNGEANEHLTNVERNPVPVEALSHEGIKTKMLSQSGFSQFFVRKTLKGKGVTFRGPPNNRSKARNMDQQTVASSGSALVIANTSAKISSSIPLAAYDGSQRESFDSNMNKETLSQLENPLVRRRLGDTSSLSIPAKKQKSSGPSSRQWPMFQRAGGVNIQTENNDGAIQEFHFRSSQPHCSTVACPFTSVSEQLEEKWYASPEELRGDMRSASSNIYSLGILLYELLSQFQCERAREAAMSDIRHRILPPKFLSENPKEAGFCLWLLHPESSCRPSTRQCLSLSIEQEDTESELLQHFLFLSQEKRQKHAGNLMEEIASVEADIEEIVKRRCAIGPPSLEEASSSSPASSVPEMRLIRNINQLESAYFAARIDAHLPEARYRLRPDRDLLRNSDNTVAEVENSETWSSDDRVGAFFDGLCKYARYSKFETRGVLRTSELNNTSNVICSLGFDRDEDYFATAGVSKKIKIYEFNSLFNESVDIHYPAIEMPNRSKLSGVCWNNYIRNYLASSDYDGIVKLWDVTTGQAISHFIEHEKRAWSVDFSEACPTKLASGSDDCSVKLWNINERNCLGTIRNIANVCCVQFSPQSSHLLAFGSSDFRTYCYDLRNLRTPWCILSGHNKAVSYAKFLDNETLVTASTDNTLKLWDLKKTTHGGLSTNACSLTFGGHTNEKNFVGLSTSDGYIACGSETNEVYAYHRSLPMPITSYKFGSIDPISGKEIEEDNNLFVSSVCWRKRSNMVVSASSNGSIKVLQLV

SEQ ID NO: 88711 - DNA, 2829 bp, Arabidopsis thaliana
  misc_feature (1)..(2829): Ceres Seq. ID no. 12711713
  misc_feature: MA Experiment ID: 20000439 Result: Up-regulated in Transcription
  misc_feature: MA Experiment 20000439 PARAMETER Experiment Name: At_Roots__P Parameter: Age (day) Value: 14 vs. 21
  misc_feature: MA Experiment 20000439 PARAMETER Experiment Name: At_Roots__P Parameter: Organism Value: A. thaliana
  misc_feature: MA Experiment 20000439 PARAMETER Experiment Name: At_Roots__P Parameter: Tissue Value: Roots vs. Whole Plant
atgtcaatgtcattttccggcgggactcacaacgatcgttggggctccgatttagcttccgccggagaattcacccaaagctttccatccttaccagcaacatactcaccctcaccctcctcctcctcctcctccggcgaagagctcctagaagtaacaatcgaattcccaagcggcgtaataataaacatcgactccgttaccggaaccggcaccgatatttcaggtaccgatctagagatcacctcttgctcggattccggttcaggatcaaggtcgcttagcttaggatggagcgcgtcgtcggagagactgacggcggggacgaactcaaagcagcagatccagaagatctcacggcgtggttacggttattcgtctcggtctgcaccggaaccggtggttccacacagaggcgaaattaccgattcggttaatctccctcgagctttatctcagcgaccaactagacctaatcgggatggatcgggtacagagagagcgattcatggtttgaaattcataagcagcaaagaaaatggaatcgttgattggaacgatgttcaaaacaatttcgctcatctttctaaagatggttatcttttcaaaagtgattttgctcattgcataggtttggagaatgaaaattccaaagagtttgcagacgagttgttcgacgcattgtgtaggagaagaagaataatggttgataagatcaatcttcaagaattatacgagttttggtaccaaattacagacgaaagcttcgattctcgtcttcaaatcttcttcaacatggttaaaaatggagatggtagaatcacagagaatgaagtaaaagagattattatactaagtgcatcggcaaataatctatcgaggttgcgagaacgagcagaggaatatgccgcactgatcatggaagaacttgcaccagatggactctattctcagtacatagaggtgttaaaggacctagagatactgctactagagaaggacatatctcatagttacagcctaccgttcagccagacgagccgagccttaagccagaacctaaaggatagaagatggagaatgagcagaaacttgctttactctttgcaagataattggaagaggatttgggttttgacattgtggtttgtgatcatggcctggttatttatgtggaaatgctatcagtacaaacacaaagacgcattccatgtaatgggttactgccttgtcatggcaaaaggcgcagctgagacactgaaattcaacatggctcttattcttttgccggtctgtagaaataccatcacctatctcagatccaccgctttgtcccactcagtgcctttcgatgactgcattaattttcacaagacgatctctgtagcaatcattagtgcaatgcttcttcatgcaaccagccacctcgcctgtgacttcccaaggattctagcatctactgatacagattacaaaagatacttggttaagtactttggtgtgaccagacccacatactttggtttggtgaatactcctgtgggaatcactggaattataatggttgcttttatgttaattgcattcacattagccagtagaagatgcaggcggaacttaactaagttgccgaagccatttgacaaactaaccggatataatgccttctggtattcacatcacttacttctaactgtttacgtccttttagtcatccacggtgtttccctctatctcgagcataaatggtaccgcaaaacggtatggatgtatcttgctgtaccagttttactctatgttggtgagaggatctttagatttttccgttccaggctttacacagtcgaaatctgtaaggttgtaatttatcccggaaacgttgttgtgctacgcatgtctaagcctacatcatttgattacaagagtggacaatatgtatttgttcagtgtccatcagtatcaaaatttgagtggcatccattttctattacttcttcccctggagatgattatctcagcattcacattcgtcagcgcggtgattggacagaagggattaagaaggcattctcagtggtatgtcatgcccctgaagctggaaaaagcggacttctcagagcagatgtaccaaaccaaagaagttttccagagctgttgatagatggaccttatggcgctccagcgcaagaccattggaagtatgatgtggtattactggttggccttggaatcggcgcaacacctttcgttagcattttgagagatctactcaataacattattaagcaacaggaacaagctgaatgcatctcaggtagttgtagtaacagcaacatctcgtcggatcacagtttcagttgcttaaactcagaagctgcgagtcggattccgcaaactcaacggaagacgctgaataccaagaatgcttacttttactgggtaacacgagaacaaggctcgttcgattggttcaaagaaatcatgaacgagattgctgattcagatagaaagggtgttattgagatgcacaactacttgactagcgtctacgaagaaggagatactcgatccaatcttctcactatgatccaaacgttaaaccatgccaaaaatggcgtcgacattttttcaggaaccaaggtaaggacacattttgggaggccaaaatggaagaaagttttatcaaagattagcaccaaacataggaacgcaagaattggagtgttctattgtggagttccaagtttggggaaggaactttcaacactctgccatgaatttaaccagacgggaattaccaggttcgatttccacaaagaacagttctaa

SEQ ID NO: 88712 - protein, 942 aa, Arabidopsis thaliana
  peptide (1)..(942): Ceres Seq. ID no. 12711714
  misc_feature (406)..(941): Pfam Name: Ferric reductase like transmembrane component Pfam Description: Ferric reductase like transmembrane component
  misc_feature (45)..(942): Homolog of NCBI NO: 28268678 NR Description: respiratory burst oxidase homolog [Nicotiana
  misc_feature (55)..(942): Homolog of NCBI NO: 17384016 NR Description: NADPH oxidase [Nicotiana tabacum]
  misc_feature (65)..(942): Homolog of NCBI NO: 16549087 NR Description: respiratory burst oxidase homolog [Solanum
  misc_feature (215)..(942): Homolog of NCBI NO: 4585142 NR Description: NADPH oxidase; gp91; phox homolog [Lycopersicon
  misc_feature (66)..(211): Homolog of NCBI NO: 4585142 NR Description: NADPH oxidase; gp91; phox homolog [Lycopersicon
  misc_feature (11)..(942): Homolog of NCBI NO: 18407959 NR Description: cytochrome b245 beta chain homolog RbohAp108, protein id: At1g64060.1, supported by cDNA: gi_2654867, supported
  misc_feature (11)..(942): Homolog of NCBI NO: 3242456 NR Description: Atrboh F [Arabidopsis thaliana]
  misc_feature (11)..(846): Homolog of NCBI NO: 25354658 NR Description: protein F22C12.18 [imported] - Arabidopsis >gi|6692109|gb|AAF24574.1|AC007764_16 F22C12.18 [Arabidopsis
  misc_feature (837)..(942): Homolog of NCBI NO: 25354658 NR Description: protein F22C12.18 [imported] - Arabidopsis >gi|6692109|gb|AAF24574.1|AC007764_16 F22C12.18 [Arabidopsis
  misc_feature (7)..(942): Homolog of NCBI NO: 34910200 NR Description: cytochrome b245 beta chain homolog rbohA [Oryza
MSMSFSGGTHNDRWGSDLASAGEFTQSFPSLPATYSPSPSSSSSSGEELLEVTIEFPSGVIINIDSVTGTGTDISGTDLEITSCSDSGSGSRSLSLGWSASSERLTAGTNSKQQIQKISRRGYGYSSRSAPEPVVPHRGEITDSVNLPRALSQRPTRPNRDGSGTERAIHGLKFISSKENGIVDWNDVQNNFAHLSKDGYLFKSDFAHCIGLENENSKEFADELFDALCRRRRIMVDKINLQELYEFWYQITDESFDSRLQIFFNMVKNGDGRITENEVKEIIILSASANNLSRLRERAEEYAALIMEELAPDGLYSQYIEVLKDLEILLLEKDISHSYSLPFSQTSRALSQNLKDRRWRMSRNLLYSLQDNWKRIWVLTLWFVIMAWLFMWKCYQYKHKDAFHVMGYCLVMAKGAAETLKFNMALILLPVCRNTITYLRSTALSHSVPFDDCINFHKTISVAIISAMLLHATSHLACDFPRILASTDTDYKRYLVKYFGVTRPTYFGLVNTPVGITGIIMVAFMLIAFTLASRRCRRNLTKLPKPFDKLTGYNAFWYSHHLLLTVYVLLVIHGVSLYLEHKWYRKTVWMYLAVPVLLYVGERIFRFFRSRLYTVEICKVVIYPGNVVVLRMSKPTSFDYKSGQYVFVQCPSVSKFEWHPFSITSSPGDDYLSIHIRQRGDWTEGIKKAFSVVCHAPEAGKSGLLRADVPNQRSFPELLIDGPYGAPAQDHWKYDVVLLVGLGIGATPFVSILRDLLNNIIKQQEQAECISGSCSNSNISSDHSFSCLNSEAASRIPQTQRKTLNTKNAYFYWVTREQGSFDWFKEIMNEIADSDRKGVIEMHNYLTSVYEEGDTRSNLLTMIQTLNHAKNGVDIFSGTKVRTHFGRPKWKKVLSKISTKHRNARIGVFYCGVPSLGKELSTLCHEFNQTGITRFDFHKEQF

SEQ ID NO: 88713 - protein, 940 aa, Arabidopsis thaliana
  peptide (1)..(940): Ceres Seq. ID no. 12711715
  misc_feature (404)..(939): Pfam Name: Ferric reductase like transmembrane component Pfam Description: Ferric reductase like transmembrane component
  misc_feature (43)..(940): Homolog of NCBI NO: 28268678 NR Description: respiratory burst oxidase homolog [Nicotiana
  misc_feature (53)..(940): Homolog of NCBI NO: 17384016 NR Description: NADPH oxidase [Nicotiana tabacum]
  misc_feature (63)..(940): Homolog of NCBI NO: 16549087 NR Description: respiratory burst oxidase homolog [Solanum
  misc_feature (213)..(940): Homolog of NCBI NO: 4585142 NR Description: NADPH oxidase; gp91; phox homolog [Lycopersicon
  misc_feature (64)..(209): Homolog of NCBI NO: 4585142 NR Description: NADPH oxidase; gp91; phox homolog [Lycopersicon
  misc_feature (9)..(940): Homolog of NCBI NO: 18407959 NR Description: cytochrome b245 beta chain homolog RbohAp108, protein id: At1g64060.1, supported by cDNA: gi_2654867, supported
  misc_feature (9)..(940): Homolog of NCBI NO: 3242456 NR Description: Atrboh F [Arabidopsis thaliana]
  misc_feature (9)..(844): Homolog of NCBI NO: 25354658 NR Description: protein F22C12.18 [imported] - Arabidopsis >gi|6692109|gb|AAF24574.1|AC007764_16 F22C12.18 [Arabidopsis
  misc_feature (835)..(940): Homolog of NCBI NO: 25354658 NR Description: protein F22C12.18 [imported] - Arabidopsis >gi|6692109|gb|AAF24574.1|AC007764_16 F22C12.18 [Arabidopsis
  misc_feature (5)..(940): Homolog of NCBI NO: 34910200 NR Description: cytochrome b245 beta chain homolog rbohA [Oryza
MSFSGGTHNDRWGSDLASAGEFTQSFPSLPATYSPSPSSSSSSGEELLEVTIEFPSGVIINIDSVTGTGTDISGTDLEITSCSDSGSGSRSLSLGWSASSERLTAGTNSKQQIQKISRRGYGYSSRSAPEPVVPHRGEITDSVNLPRALSQRPTRPNRDGSGTERAIHGLKFISSKENGIVDWNDVQNNFAHLSKDGYLFKSDFAHCIGLENENSKEFADELFDALCRRRRIMVDKINLQELYEFWYQITDESFDSRLQIFFNMVKNGDGRITENEVKEIIILSASANNLSRLRERAEEYAALIMEELAPDGLYSQYIEVLKDLEILLLEKDISHSYSLPFSQTSRALSQNLKDRRWRMSRNLLYSLQDNWKRIWVLTLWFVIMAWLFMWKCYQYKHKDAFHVMGYCLVMAKGAAETLKFNMALILLPVCRNTITYLRSTALSHSVPFDDCINFHKTISVAIISAMLLHATSHLACDFPRILASTDTDYKRYLVKYFGVTRPTYFGLVNTPVGITGIIMVAFMLIAFTLASRRCRRNLTKLPKPFDKLTGYNAFWYSHHLLLTVYVLLVIHGVSLYLEHKWYRKTVWMYLAVPVLLYVGERIFRFFRSRLYTVEICKVVIYPGNVVVLRMSKPTSFDYKSGQYVFVQCPSVSKFEWHPFSITSSPGDDYLSIHIRQRGDWTEGIKKAFSVVCHAPEAGKSGLLRADVPNQRSFPELLIDGPYGAPAQDHWKYDVVLLVGLGIGATPFVSILRDLLNNIIKQQEQAECISGSCSNSNISSDHSFSCLNSEAASRIPQTQRKTLNTKNAYFYWVTREQGSFDWFKEIMNEIADSDRKGVIEMHNYLTSVYEEGDTRSNLLTMIQTLNHAKNGVDIFSGTKVRTHFGRPKWKKVLSKISTKHRNARIGVFYCGVPSLGKELSTLCHEFNQTGITRFDFHKEQF

SEQ ID NO: 88714 - protein, 708 aa, Arabidopsis thaliana
  peptide (1)..(708): Ceres Seq. ID no. 12711716
  misc_feature (172)..(707): Pfam Name: Ferric reductase like transmembrane component Pfam Description: Ferric reductase like transmembrane component
  misc_feature (1)..(708): Homolog of NCBI NO: 28268678 NR Description: respiratory burst oxidase homolog [Nicotiana
  misc_feature (1)..(708): Homolog of NCBI NO: 17384016 NR Description: NADPH oxidase [Nicotiana tabacum]
  misc_feature (1)..(708): Homolog of NCBI NO: 16549087 NR Description: respiratory burst oxidase homolog [Solanum
  misc_feature (1)..(708): Homolog of NCBI NO: 4585142 NR Description: NADPH oxidase; gp91; phox homolog [Lycopersicon
  misc_feature (1)..(708): Homolog of NCBI NO: 18407959 NR Description: cytochrome b245 beta chain homolog RbohAp108, protein id: At1g64060.1, supported by cDNA: gi_2654867, supported
  misc_feature (1)..(708): Homolog of NCBI NO: 3242456 NR Description: Atrboh F [Arabidopsis thaliana]
  misc_feature (1)..(612): Homolog of NCBI NO: 25354658 NR Description: protein F22C12.18 [imported] - Arabidopsis >gi|6692109|gb|AAF24574.1|AC007764_16 F22C12.18 [Arabidopsis
  misc_feature (603)..(708): Homolog of NCBI NO: 25354658 NR Description: protein F22C12.18 [imported] - Arabidopsis >gi|6692109|gb|AAF24574.1|AC007764_16 F22C12.18 [Arabidopsis
  misc_feature (1)..(708): Homolog of NCBI NO: 34910200 NR Description: cytochrome b245 beta chain homolog rbohA [Oryza
  misc_feature (1)..(708): Homolog of NCBI NO: 18389310 NR Description: respiratory burst oxidase protein F [Solanum
MVDKINLQELYEFWYQITDESFDSRLQIFFNMVKNGDGRITENEVKEIIILSASANNLSRLRERAEEYAALIMEELAPDGLYSQYIEVLKDLEILLLEKDISHSYSLPFSQTSRALSQNLKDRRWRMSRNLLYSLQDNWKRIWVLTLWFVIMAWLFMWKCYQYKHKDAFHVMGYCLVMAKGAAETLKFNMALILLPVCRNTITYLRSTALSHSVPFDDCINFHKTISVAIISAMLLHATSHLACDFPRILASTDTDYKRYLVKYFGVTRPTYFGLVNTPVGITGIIMVAFMLIAFTLASRRCRRNLTKLPKPFDKLTGYNAFWYSHHLLLTVYVLLVIHGVSLYLEHKWYRKTVWMYLAVPVLLYVGERIFRFFRSRLYTVEICKVVIYPGNVVVLRMSKPTSFDYKSGQYVFVQCPSVSKFEWHPFSITSSPGDDYLSIHIRQRGDWTEGIKKAFSVVCHAPEAGKSGLLRADVPNQRSFPELLIDGPYGAPAQDHWKYDVVLLVGLGIGATPFVSILRDLLNNIIKQQEQAECISGSCSNSNISSDHSFSCLNSEAASRIPQTQRKTLNTKNAYFYWVTREQGSFDWFKEIMNEIADSDRKGVIEMHNYLTSVYEEGDTRSNLLTMIQTLNHAKNGVDIFSGTKVRTHFGRPKWKKVLSKISTKHRNARIGVFYCGVPSLGKELSTLCHEFNQTGITRFDFHKEQF

SEQ ID NO: 88715 - DNA, 954 bp, Arabidopsis thaliana
  misc_feature (1)..(954): Ceres Seq. ID no. 12711753
  misc_feature: MA Experiment ID: 20000173 Result: Down-regulated in Transcription
  misc_feature: MA Experiment 20000173 PARAMETER Experiment Name: At_42deg_Heat_P Parameter: Age (day) Value: 14
  misc_feature: MA Experiment 20000173 PARAMETER Experiment Name: At_42deg_Heat_P Parameter: Organism Value: A. thaliana
  misc_feature: MA Experiment 20000173 PARAMETER Experiment Name: At_42deg_Heat_P Parameter: Plant Line Value: WS
  misc_feature: MA Experiment 20000173 PARAMETER Experiment Name: At_42deg_Heat_P Parameter: Temperature (deg C) Value: 42 vs. 22
  misc_feature: MA Experiment 20000173 PARAMETER Experiment Name: At_42deg_Heat_P Parameter: Timepoint (hr) Value: 6
  misc_feature: MA Experiment 20000173 PARAMETER Experiment Name: At_42deg_Heat_P Parameter: Tissue Value: Aerial
  misc_feature: MA Experiment ID: 20000179 Result: Up-regulated in Transcription
  misc_feature: MA Experiment 20000179 PARAMETER Experiment Name: At_Germinating_Seeds_P Parameter: Age (hr) Value: 6 vs. 0
  misc_feature: MA Experiment 20000179 PARAMETER Experiment Name: At_Germinating_Seeds_P Parameter: Tissue Value: Germinating Seeds
  misc_feature: MA Experiment ID: 20000184 Result: Down-regulated in Transcription
  misc_feature: MA Experiment 20000184 PARAMETER Experiment Name: At_Shoots__P Parameter: Age (day) Value: 7
  misc_feature: MA Experiment 20000184 PARAMETER Experiment Name: At_Shoots__P Parameter: Tissue Value: Shoots vs. Whole Plant
  misc_feature: MA Experiment ID: 20000224 Result: Down-regulated in Transcription
  misc_feature: MA Experiment ID: 20000234 Result: Down-regulated in Transcription
  misc_feature: MA Experiment 20000234 PARAMETER Experiment Name: At_Siliques_P Parameter: Age (day) Value: 21
  misc_feature: MA Experiment 20000234 PARAMETER Experiment Name: At_Siliques_P Parameter: Organism Value: A. thaliana
  misc_feature: MA Experiment 20000234 PARAMETER Experiment Name: At_Siliques_P Parameter: Plant Line Value: WS
  misc_feature: MA Experiment 20000234 PARAMETER Experiment Name: At_Siliques_P Parameter: Tissue Value: Less Than 5mm Siliques vs. Whole Plant
  misc_feature: MA Experiment ID: 20000235 Result: Down-regulated in Transcription
  misc_feature: MA Experiment 20000235 PARAMETER Experiment Name: At_Siliques_P Parameter: Age (day) Value: 21
  misc_feature: MA Experiment 20000235 PARAMETER Experiment Name: At_Siliques_P Parameter: Organism Value: A. thaliana
  misc_feature: MA Experiment 20000235 PARAMETER Experiment Name: At_Siliques_P Parameter: Plant Line Value: WS
  misc_feature: MA Experiment 20000235 PARAMETER Experiment Name: At_Siliques_P Parameter: Tissue Value: 5-10mm Siliques vs. Whole Plant
  misc_feature: MA Experiment ID: 20000264 Result: Down-regulated in Transcription
  misc_feature: MA Experiment 20000264 PARAMETER Experiment Name: At_Open_Flower_P Parameter: Age (day) Value: 21
  misc_feature: MA Experiment 20000264 PARAMETER Experiment Name: At_Open_Flower_P Parameter: Plant Line Value: WS
  misc_feature: MA Experiment 20000264 PARAMETER Experiment Name: At_Open_Flower_P Parameter: Tissue Value: Open Flower vs. Whole Plant
  misc_feature: MA Experiment ID: 20000265 Result: Down-regulated in Transcription
  misc_feature: MA Experiment 20000265 PARAMETER Experiment Name: At_Open_Flower_P Parameter: Age (day) Value: 21
  misc_feature: MA Experiment 20000265 PARAMETER Experiment Name: At_Open_Flower_P Parameter: Plant Line Value: WS
  misc_feature: MA Experiment 20000265 PARAMETER Experiment Name: At_Open_Flower_P Parameter: Tissue Value: Closed Flower vs. Whole Plant
  misc_feature: MA Experiment ID: 20000286 Result: Down-regulated in Transcription
  misc_feature: MA Experiment 20000286 PARAMETER Experiment Name: At_Open_Flower_P Parameter: Age (day) Value: 21
  misc_feature: MA Experiment 20000286 PARAMETER Experiment Name: At_Open_Flower_P Parameter: Plant Line Value: WS
  misc_feature: MA Experiment 20000286 PARAMETER Experiment Name: At_Open_Flower_P Parameter: Tissue Value: Half Open vs. Whole Plant
  misc_feature: MA Experiment ID: 20000451 Result: Up-regulated in Transcription
  misc_feature: MA Experiment 20000451 PARAMETER Experiment Name: At_CS6879_Shoots-Roots_P Parameter: Age (day) Value: 14
  misc_feature: MA Experiment 20000451 PARAMETER Experiment Name: At_CS6879_Shoots-Roots_P Parameter: Organism Value: A. thaliana
  misc_feature: MA Experiment 20000451 PARAMETER Experiment Name: At_CS6879_Shoots-Roots_P Parameter: Plant Line Value: CS6879 vs. WS
  misc_feature: MA Experiment 20000451 PARAMETER Experiment Name: At_CS6879_Shoots-Roots_P Parameter: Tissue Value: Roots
  misc_feature: MA Experiment ID: 20000452 Result: Up-regulated in Transcription
  misc_feature: MA Experiment 20000452 PARAMETER Experiment Name: At_CS6879_Shoots-Roots_P Parameter: Age (day) Value: 14
  misc_feature: MA Experiment 20000452 PARAMETER Experiment Name: At_CS6879_Shoots-Roots_P Parameter: Organism Value: A. thaliana
  misc_feature: MA Experiment 20000452 PARAMETER Experiment Name: At_CS6879_Shoots-Roots_P Parameter: Plant Line Value: CS6879 vs. WS
  misc_feature: MA Experiment 20000452 PARAMETER Experiment Name: At_CS6879_Shoots-Roots_P Parameter: Tissue Value: Shoots
  misc_feature: MA Experiment ID: 20000496 Result: Up-regulated in Transcription
  misc_feature: MA Experiment 20000496 PARAMETER Experiment Name: At_Guard_Cells_P Parameter: Harvest Date Value: 7/19/2002
  misc_feature: MA Experiment 20000496 PARAMETER Experiment Name: At_Guard_Cells_P Parameter: Organism Value: Canola
  misc_feature: MA Experiment 20000496 PARAMETER Experiment Name: At_Guard_Cells_P Parameter: Tissue Value: Guard Cells vs. Leaves
  misc_feature: MA Experiment ID: 20000573 Result: Down-regulated in Transcription
  misc_feature: MA Experiment 20000573 PARAMETER Experiment Name: At_100uM_ABA_Mutants__P Parameter: Organism Value: A. thaliana
  misc_feature: MA Experiment 20000573 PARAMETER Experiment Name: At_100uM_ABA_Mutants__P Parameter: Plant Line Value: CS22 vs. Ler wt
  misc_feature: MA Experiment 20000573 PARAMETER Experiment Name: At_100uM_ABA_Mutants__P Parameter: Timepoint (hr) Value: N/A
  misc_feature: MA Experiment 20000573 PARAMETER Experiment Name: At_100uM_ABA_Mutants__P Parameter: Tissue Value: Whole Plant
  misc_feature: MA Experiment 20000573 PARAMETER Experiment Name: At_100uM_ABA_Mutants__P Parameter: Treatment Value: None
  misc_feature: MA Experiment ID: 20000574 Result: Down-regulated in Transcription
  misc_feature: MA Experiment 20000574 PARAMETER Experiment Name: At_100uM_ABA_Mutants__P Parameter: Organism Value: A. thaliana
  misc_feature: MA Experiment 20000574 PARAMETER Experiment Name: At_100uM_ABA_Mutants__P Parameter: Plant Line Value: CS23 vs. Ler wt
  misc_feature: MA Experiment 20000574 PARAMETER Experiment Name: At_100uM_ABA_Mutants__P Parameter: Timepoint (hr) Value: N/A
  misc_feature: MA Experiment 20000574 PARAMETER Experiment Name: At_100uM_ABA_Mutants__P Parameter: Tissue Value: Whole Plant
  misc_feature: MA Experiment 20000574 PARAMETER Experiment Name: At_100uM_ABA_Mutants__P Parameter: Treatment Value: None
  misc_feature: MA Experiment ID: 20000794 Result: Down-regulated in Transcription
  misc_feature: MA Experiment 20000794 PARAMETER Experiment Name: At_Petals_P Parameter: Age (day) Value: 23-25 days
  misc_feature: MA Experiment 20000794 PARAMETER Experiment Name: At_Petals_P Parameter: Plant Line Value: WS
  misc_feature: MA Experiment 20000794 PARAMETER Experiment Name: At_Petals_P Parameter: Tissue Value: Petals vs. Whole plant
atgtggcctttttggtggaaaggagcatctgggttctctgctcgttccacagctgaagaagtcactcatggaatcgatggtactggtctcactgctatcgtcacaggagcatcaagtggtattggggaagagactactcgtgttcttgctcttcgtggtgttcatgttgtaatggcggtaaggaatacagattctggtaatcaagtcagagataagatacttaaggaaatacctcaggctaagattgatgtaatgaagttggatcttagctctatggcttctgtcaggagctttgcatcagagtatcagtctttggaccttcccttgaatcttctcatcaataatgcggggattatggcatgtcccttcttgctttctagcgacaacattgaattacagtttgcaaccaatcatttgggtcattttctgttgacaaaccttcttttggagaggatgaagaaaacagctagtgaaagcaatagagaaggaagaattgttattgtctcatcagaaggtcatcgatttgcttaccgggaaggtgttcagtttgacaaaataaatgatgaagcaaggtacaatactttgcaagcatatggtcagtcaaagctcggtaacatcttgcacgctactgagctcgctaggctattcaaggaacaaggtgtgaatatcactgctaattcacttcatcctggatccattatgaccaatcttttacgctaccacagcttcataaatacaattggtaatgcggtggggaagtatgtgctgaagagcattccacagggagcggcaactacctgttatgctgcgcttcatcctcaggcaaaaggagtgagtggagaatacttgatggacaacaacatatctgaccctaattctcagggtaaagacaaagatctggccaaaaaactatgggagtttagcttgaggctaactggtgaagaagaatcatag

SEQ ID NO: 88716 - protein, 317 aa, Arabidopsis thaliana
  peptide (1)..(317): Ceres Seq. ID no. 12711754
  misc_feature (1)..(317): Homolog of NCBI NO: 15233359 NR Description: putative protein; protein id: At4g11410.1
  misc_feature (1)..(315): Homolog of NCBI NO: 30686197 NR Description: short-chain dehydrogenase/reductase family
  misc_feature (1)..(315): Homolog of NCBI NO: 23297050 NR Description: unknown protein [Arabidopsis thaliana]
  misc_feature (1)..(315): Homolog of NCBI NO: 18416145 NR Description: putative protein; protein id: At4g23430.1,
  misc_feature (8)..(311): Homolog of NCBI NO: 34895876 NR Description: P0009G03.18 [Oryza sativa (japonica
  misc_feature (1)..(308): Homolog of NCBI NO: 37536622 NR Description: putative WW-domain oxidoreductase [Oryza sativa
  misc_feature (7)..(311): Homolog of NCBI NO: 18413950 NR Description: putative protein; protein id: At5g02540.1, by cDNA: 26538., supported by cDNA: gi_20260301 [Arabidopsis
  misc_feature (7)..(311): Homolog of NCBI NO: 21554820 NR Description: putativepod-specific dehydrogenase SAC25
  misc_feature (7)..(311): Homolog of NCBI NO: 20260302 NR Description: putative protein [Arabidopsis thaliana]
  misc_feature (8)..(311): Homolog of NCBI NO: 629592 NR Description: hypothetical protein - rape
MWPFWWKGASGFSARSTAEEVTHGIDGTGLTAIVTGASSGIGEETTRVLALRGVHVVMAVRNTDSGNQVRDKILKEIPQAKIDVMKLDLSSMASVRSFASEYQSLDLPLNLLINNAGIMACPFLLSSDNIELQFATNHLGHFLLTNLLLERMKKTASESNREGRIVIVSSEGHRFAYREGVQFDKINDEARYNTLQAYGQSKLGNILHATELARLFKEQGVNITANSLHPGSIMTNLLRYHSFINTIGNAVGKYVLKSIPQGAATTCYAALHPQAKGVSGEYLMDNNISDPNSQGKDKDLAKKLWEFSLRLTGEEES

SEQ ID NO: 88717 - protein, 260 aa, Arabidopsis thaliana
  peptide (1)..(260): Ceres Seq. ID no. 12711755
  misc_feature (1)..(260): Homolog of NCBI NO: 15233359 NR Description: putative protein; protein id: At4g11410.1
  misc_feature (1)..(258): Homolog of NCBI NO: 30686197 NR Description: short-chain dehydrogenase/reductase family
  misc_feature (1)..(258): Homolog of NCBI NO: 23297050 NR Description: unknown protein [Arabidopsis thaliana]
  misc_feature (1)..(258): Homolog of NCBI NO: 18416145 NR Description: putative protein; protein id: At4g23430.1,
  misc_feature (1)..(254): Homolog of NCBI NO: 34895876 NR Description: P0009G03.18 [Oryza sativa (japonica
  misc_feature (1)..(251): Homolog of NCBI NO: 37536622 NR Description: putative WW-domain oxidoreductase [Oryza sativa
  misc_feature (1)..(254): Homolog of NCBI NO: 18413950 NR Description: putative protein; protein id: At5g02540.1, by cDNA: 26538., supported by cDNA: gi_20260301 [Arabidopsis
  misc_feature (1)..(254): Homolog of NCBI NO: 21554820 NR Description: putativepod-specific dehydrogenase SAC25
  misc_feature (1)..(254): Homolog of NCBI NO: 20260302 NR Description: putative protein [Arabidopsis thaliana]
  misc_feature (1)..(254): Homolog of NCBI NO: 629592 NR Description: hypothetical protein - rape
MAVRNTDSGNQVRDKILKEIPQAKIDVMKLDLSSMASVRSFASEYQSLDLPLNLLINNAGIMACPFLLSSDNIELQFATNHLGHFLLTNLLLERMKKTASESNREGRIVIVSSEGHRFAYREGVQFDKINDEARYNTLQAYGQSKLGNILHATELARLFKEQGVNITANSLHPGSIMTNLLRYHSFINTIGNAVGKYVLKSIPQGAATTCYAALHPQAKGVSGEYLMDNNISDPNSQGKDKDLAKKLWEFSLRLTGEEES

SEQ ID NO: 88718 - protein, 233 aa, Arabidopsis thaliana
  peptide (1)..(233): Ceres Seq. ID no. 12711756
  misc_feature (1)..(233): Homolog of NCBI NO: 15233359 NR Description: putative protein; protein id: At4g11410.1
  misc_feature (1)..(231): Homolog of NCBI NO: 30686197 NR Description: short-chain dehydrogenase/reductase family
  misc_feature (1)..(231): Homolog of NCBI NO: 23297050 NR Description: unknown protein [Arabidopsis thaliana]
  misc_feature (1)..(231): Homolog of NCBI NO: 18416145 NR Description: putative protein; protein id: At4g23430.1,
  misc_feature (1)..(227): Homolog of NCBI NO: 34895876 NR Description: P0009G03.18 [Oryza sativa (japonica
  misc_feature (1)..(224): Homolog of NCBI NO: 37536622 NR Description: putative WW-domain oxidoreductase [Oryza sativa
  misc_feature (1)..(227): Homolog of NCBI NO: 18413950 NR Description: putative protein; protein id: At5g02540.1, by cDNA: 26538., supported by cDNA: gi_20260301 [Arabidopsis
  misc_feature (1)..(227): Homolog of NCBI NO: 21554820 NR Description: putativepod-specific dehydrogenase SAC25
  misc_feature (1)..(227): Homolog of NCBI NO: 20260302 NR Description: putative protein [Arabidopsis thaliana]
  misc_feature (1)..(227): Homolog of NCBI NO: 629592 NR Description: hypothetical protein - rape
MKLDLSSMASVRSFASEYQSLDLPLNLLINNAGIMACPFLLSSDNIELQFATNHLGHFLLTNLLLERMKKTASESNREGRIVIVSSEGHRFAYREGVQFDKINDEARYNTLQAYGQSKLGNILHATELARLFKEQGVNITANSLHPGSIMTNLLRYHSFINTIGNAVGKYVLKSIPQGAATTCYAALHPQAKGVSGEYLMDNNISDPNSQGKDKDLAKKLWEFSLRLTGEEES

SEQ ID NO: 88719 - DNA, 2094 bp, Arabidopsis thaliana
  misc_feature (1)..(2094): Ceres Seq. ID no. 12711764
  misc_feature: MA Experiment ID: 20000166 Result: Down-regulated in Transcription
  misc_feature: MA Experiment 20000166 PARAMETER Experiment Name: At_100uM_ABA_P Parameter: Age (day) Value: 14
  misc_feature: MA Experiment 20000166 PARAMETER Experiment Name: At_100uM_ABA_P Parameter: Organism Value: A. thaliana
  misc_feature: MA Experiment 20000166 PARAMETER Experiment Name: At_100uM_ABA_P Parameter: Plant Line Value: WS
  misc_feature: MA Experiment 20000166 PARAMETER Experiment Name: At_100uM_ABA_P Parameter: Timepoint (hr) Value: 1
  misc_feature: MA Experiment 20000166 PARAMETER Experiment Name: At_100uM_ABA_P Parameter: Tissue Value: Aerial
  misc_feature: MA Experiment 20000166 PARAMETER Experiment Name: At_100uM_ABA_P Parameter: Treatment Value: 100uM ABA vs. No Treatment
  misc_feature: MA Experiment ID: 20000184 Result: Up-regulated in Transcription
  misc_feature: MA Experiment 20000184 PARAMETER Experiment Name: At_Shoots__P Parameter: Age (day) Value: 7
  misc_feature: MA Experiment 20000184 PARAMETER Experiment Name: At_Shoots__P Parameter: Tissue Value: Shoots vs. Whole Plant
  misc_feature: MA Experiment ID: 20000436 Result: Down-regulated in Transcription
  misc_feature: MA Experiment 20000436 PARAMETER Experiment Name: At_Drought_P Parameter: Age (day) Value: 7
  misc_feature: MA Experiment 20000436 PARAMETER Experiment Name: At_Drought_P Parameter: Organism Value: A. thaliana
  misc_feature: MA Experiment 20000436 PARAMETER Experiment Name: At_Drought_P Parameter: Plant Line Value: WS
  misc_feature: MA Experiment 20000436 PARAMETER Experiment Name: At_Drought_P Parameter: Timepoint (hr) Value: 12
  misc_feature: MA Experiment 20000436 PARAMETER Experiment Name: At_Drought_P Parameter: Tissue Value: Whole Plant
  misc_feature: MA Experiment 20000436 PARAMETER Experiment Name: At_Drought_P Parameter: Treatment Value: Drought vs. No Drought
  misc_feature: MA Experiment ID: 20000453 Result: Down-regulated in Transcription
  misc_feature: MA Experiment 20000453 PARAMETER Experiment Name: At_100uM_ABA_P Parameter: Age (day) Value: 15
  misc_feature: MA Experiment 20000453 PARAMETER Experiment Name: At_100uM_ABA_P Parameter: Organism Value: A. thaliana
  misc_feature: MA Experiment 20000453 PARAMETER Experiment Name: At_100uM_ABA_P Parameter: Plant Line Value: WS
  misc_feature: MA Experiment 20000453 PARAMETER Experiment Name: At_100uM_ABA_P Parameter: Timepoint (hr) Value: 24
  misc_feature: MA Experiment 20000453 PARAMETER Experiment Name: At_100uM_ABA_P Parameter: Tissue Value: Aerial
  misc_feature: MA Experiment 20000453 PARAMETER Experiment Name: At_100uM_ABA_P Parameter: Treatment Value: 100uM ABA vs. No Treatment
  misc_feature: MA Experiment ID: 20001554 Result: Down-regulated in Transcription
  misc_feature: MA Experiment 20001554 PARAMETER Experiment Name: At_Drought_Soil_Dry_P Parameter: Age (day) Value: 21
  misc_feature: MA Experiment 20001554 PARAMETER Experiment Name: At_Drought_Soil_Dry_P Parameter: Organism Value: A. thaliana
  misc_feature: MA Experiment 20001554 PARAMETER Experiment Name: At_Drought_Soil_Dry_P Parameter: Plant Line Value: WS
  misc_feature: MA Experiment 20001554 PARAMETER Experiment Name: At_Drought_Soil_Dry_P Parameter: Post Timepoint (hr) Value: None
  misc_feature: MA Experiment 20001554 PARAMETER Experiment Name: At_Drought_Soil_Dry_P Parameter: Post-Treatment Value: None
  misc_feature: MA Experiment 20001554 PARAMETER Experiment Name: At_Drought_Soil_Dry_P Parameter: Timepoint (day) Value: 7
  misc_feature: MA Experiment 20001554 PARAMETER Experiment Name: At_Drought_Soil_Dry_P Parameter: Treatment Value: Drought vs. No Drought
  misc_feature: MA Experiment ID: 20001555 Result: Down-regulated in Transcription
  misc_feature: MA Experiment 20001555 PARAMETER Experiment Name: At_Drought_Soil_Dry_P Parameter: Age (day) Value: 24
  misc_feature: MA Experiment 20001555 PARAMETER Experiment Name: At_Drought_Soil_Dry_P Parameter: Organism Value: A. thaliana
  misc_feature: MA Experiment 20001555 PARAMETER Experiment Name: At_Drought_Soil_Dry_P Parameter: Plant Line Value: WS
  misc_feature: MA Experiment 20001555 PARAMETER Experiment Name: At_Drought_Soil_Dry_P Parameter: Post Timepoint (hr) Value: None
  misc_feature: MA Experiment 20001555 PARAMETER Experiment Name: At_Drought_Soil_Dry_P Parameter: Post-Treatment Value: None
  misc_feature: MA Experiment 20001555 PARAMETER Experiment Name: At_Drought_Soil_Dry_P Parameter: Timepoint (day) Value: 10
  misc_feature: MA Experiment 20001555 PARAMETER Experiment Name: At_Drought_Soil_Dry_P Parameter: Treatment Value: Drought vs. No Drought
  misc_feature: MA Experiment ID: 20001556 Result: Down-regulated in Transcription
  misc_feature: MA Experiment 20001556 PARAMETER Experiment Name: At_Drought_Soil_Dry_P Parameter: Age (day) Value: 26
  misc_feature: MA Experiment 20001556 PARAMETER Experiment Name: At_Drought_Soil_Dry_P Parameter: Organism Value: A. thaliana
  misc_feature: MA Experiment 20001556 PARAMETER Experiment Name: At_Drought_Soil_Dry_P Parameter: Plant Line Value: WS
  misc_feature: MA Experiment 20001556 PARAMETER Experiment Name: At_Drought_Soil_Dry_P Parameter: Post Timepoint (hr) Value: None
  misc_feature: MA Experiment 20001556 PARAMETER Experiment Name: At_Drought_Soil_Dry_P Parameter: Post-Treatment Value: None
  misc_feature: MA Experiment 20001556 PARAMETER Experiment Name: At_Drought_Soil_Dry_P Parameter: Timepoint (day) Value: 12
  misc_feature: MA Experiment 20001556 PARAMETER Experiment Name: At_Drought_Soil_Dry_P Parameter: Treatment Value: Drought vs. No Drought
atgcgtcaaaataatctcttctcattgatcttctggcttgtccctgtgagcttaattattgttgtctctgcacagttatgctcggagaagtttggaacttttacaccaggtggtacatttgacaagaaccgccgaatcattctctcatctcttccatctgaagtcacagctcaagatggcttctacaacgcttcgattggaacagatcctgaccaactctacgcaatggggatgtgcatcccaggtgctaaacaaaagctttgtagggattgtatcatggacgtcacaagacagttaatacagacatgtcccaaccagacagcagcaattcactggtcaggtggagggaaaactgtatgtatggcacgttactataaccagccgtcttctagaccattggatttggaatcagtttctattggttataacgttggaaatctcagcacaaacttaacagattttgatagattatgggagcgattgatagctcatatggtgactaaagcttcatcagcatcaataaaatatttatcatttgataacagtagattctatgcagctgatgaaacaaacttgacaaattctcaaatggtctacgctttgatgcaatgcacgccagacgtctctccttccaactgtaacacttgtttaaaacaaagtgttgatgactatgttggttgttgtcatgggaagcaaggcggctatgtgtatcggcctagttgcattttccggtgggatctataccctttcaatggcgcctttgatcttcttacgctagcgcctccaccctcatctcagctgcaatccccacctccagtgaccaacaaagatgaaaaaacgattcatacaggaactatcattgggattgtcattgtcgttgcaatggtcataatcatggctctgcttgctctaggggtttctgtttgcaggagtagaaaaaaatatcaagcttttgcctcagaaactgccgatgatattacaacagttggatatctccagtttgatattaaagacattgaagctgcaacaagtaactttttggcgagtaacaagattggtcaaggtggtttcggcgaagtttacaagggtacgttatcaaatggaactgaagttgcagtcaagaggctgtcaagaacttcagatcaaggtgaattggagttcaagaacgaggtgcttcttgtagcaaaacttcagcaccggaatctcgttaggcttctcggttttgctctgcaaggagaagaaaagatactcgtctttgagtttgttcccaacaagagcctcgattatttcctcttcgacccaacaaaaaagggtcagctggactggacaagacggtacaacatcattggagggattacacgagggcttctctatcttcatcaagactctaggctcaccatcatacaccgtgacatcaaagcgagtaacattcttttagatgctgatatgaacccgaaaatagcggatttcgggatggctaggaatttcagagatcatcaaactgaagacagtacaggaagagtcgttggaaccttcggttacatgcctccagaatatgttgcgcatggccaattctctaccaaatccgatgtctatagcttcggagtattgattctagagattgttagtggcaggaagaatagcagcttctatcagatggatggttctgtttgcaacttggtcacatatgtttggagactttggaacactgattcatctttagagctcgtagatccggcgattagcggaagctatgagaaagatgaagtcactagatgcatccatatcggacttttatgcgttcaagaaaatcctgtgaatcgaccagcattgtctacaatattccaaatgctcactaatagctccattactctaaatgtccctcaaccacctggatttttcttcaggaacagacctgagtcagacacattacgccgtggattggagccagaccaatataacaatgaatctgttacttgttctatcgacaatgcaacaatcactacactcctcggtaaaactcttgcttctgcactctgttgtattacctcaactctattttcaaagtcaatgtatagaaacactgaggattga

SEQ ID NO: 88720 - protein, 697 aa, Arabidopsis thaliana
  peptide (1)..(697): Ceres Seq. ID no. 12711765
  misc_feature (4)..(668): Homolog of NCBI NO: 15233389 NR Description: serine/threonine kinase-like protein; protein id:
  misc_feature (1)..(661): Homolog of NCBI NO: 30686091 NR Description: serine/threonine kinase - like protein
  misc_feature (310)..(670): Homolog of NCBI NO: 30686129 NR Description: serine/threonine kinase - like protein
  misc_feature (1)..(321): Homolog of NCBI NO: 30686129 NR Description: serine/threonine kinase - like protein
  misc_feature (1)..(661): Homolog of NCBI NO: 4127461 NR Description: receptor-like protein kinase, RLK3 [Arabidopsis
  misc_feature (11)..(668): Homolog of NCBI NO: 7488201 NR Description: probable serine/threonine-specific protein kinase
  misc_feature (11)..(668): Homolog of NCBI NO: 15233396 NR Description: serine/threonine kinase-like protein (fragment);
  misc_feature (22)..(668): Homolog of NCBI NO: 15233391 NR Description: serine/threonine kinase-like protein; protein id:
  misc_feature (6)..(668): Homolog of NCBI NO: 4008012 NR Description: receptor-like protein kinase [Arabidopsis
  misc_feature (6)..(690): Homolog of NCBI NO: 15236444 NR Description: protein kinase - like protein; protein id:
MRQNNLFSLIFWLVPVSLIIVVSAQLCSEKFGTFTPGGTFDKNRRIILSSLPSEVTAQDGFYNASIGTDPDQLYAMGMCIPGAKQKLCRDCIMDVTRQLIQTCPNQTAAIHWSGGGKTVCMARYYNQPSSRPLDLESVSIGYNVGNLSTNLTDFDRLWERLIAHMVTKASSASIKYLSFDNSRFYAADETNLTNSQMVYALMQCTPDVSPSNCNTCLKQSVDDYVGCCHGKQGGYVYRPSCIFRWDLYPFNGAFDLLTLAPPPSSQLQSPPPVTNKDEKTIHTGTIIGIVIVVAMVIIMALLALGVSVCRSRKKYQAFASETADDITTVGYLQFDIKDIEAATSNFLASNKIGQGGFGEVYKGTLSNGTEVAVKRLSRTSDQGELEFKNEVLLVAKLQHRNLVRLLGFALQGEEKILVFEFVPNKSLDYFLFDPTKKGQLDWTRRYNIIGGITRGLLYLHQDSRLTIIHRDIKASNILLDADMNPKIADFGMARNFRDHQTEDSTGRVVGTFGYMPPEYVAHGQFSTKSDVYSFGVLILEIVSGRKNSSFYQMDGSVCNLVTYVWRLWNTDSSLELVDPAISGSYEKDEVTRCIHIGLLCVQENPVNRPALSTIFQMLTNSSITLNVPQPPGFFFRNRPESDTLRRGLEPDQYNNESVTCSIDNATITTLLGKTLASALCCITSTLFSKSMYRNTED

SEQ ID NO: 88721 - protein, 622 aa, Arabidopsis thaliana
  peptide (1)..(622): Ceres Seq. ID no. 12711766
  misc_feature (1)..(593): Homolog of NCBI NO: 15233389 NR Description: serine/threonine kinase-like protein; protein id:
  misc_feature (1)..(586): Homolog of NCBI NO: 30686091 NR Description: serine/threonine kinase - like protein
  misc_feature (235)..(595): Homolog of NCBI NO: 30686129 NR Description: serine/threonine kinase - like protein
  misc_feature (1)..(246): Homolog of NCBI NO: 30686129 NR Description: serine/threonine kinase - like protein
  misc_feature (1)..(586): Homolog of NCBI NO: 4127461 NR Description: receptor-like protein kinase, RLK3 [Arabidopsis
  misc_feature (1)..(593): Homolog of NCBI NO: 7488201 NR Description: probable serine/threonine-specific protein kinase
  misc_feature (1)..(593): Homolog of NCBI NO: 15233396 NR Description: serine/threonine kinase-like protein (fragment);
  misc_feature (1)..(593): Homolog of NCBI NO: 15233391 NR Description: serine/threonine kinase-like protein; protein id:
  misc_feature (1)..(593): Homolog of NCBI NO: 4008012 NR Description: receptor-like protein kinase [Arabidopsis
  misc_feature (1)..(615): Homolog of NCBI NO: 15236444 NR Description: protein kinase - like protein; protein id:
MGMCIPGAKQKLCRDCIMDVTRQLIQTCPNQTAAIHWSGGGKTVCMARYYNQPSSRPLDLESVSIGYNVGNLSTNLTDFDRLWERLIAHMVTKASSASIKYLSFDNSRFYAADETNLTNSQMVYALMQCTPDVSPSNCNTCLKQSVDDYVGCCHGKQGGYVYRPSCIFRWDLYPFNGAFDLLTLAPPPSSQLQSPPPVTNKDEKTIHTGTIIGIVIVVAMVIIMALLALGVSVCRSRKKYQAFASETADDITTVGYLQFDIKDIEAATSNFLASNKIGQGGFGEVYKGTLSNGTEVAVKRLSRTSDQGELEFKNEVLLVAKLQHRNLVRLLGFALQGEEKILVFEFVPNKSLDYFLFDPTKKGQLDWTRRYNIIGGITRGLLYLHQDSRLTIIHRDIKASNILLDADMNPKIADFGMARNFRDHQTEDSTGRVVGTFGYMPPEYVAHGQFSTKSDVYSFGVLILEIVSGRKNSSFYQMDGSVCNLVTYVWRLWNTDSSLELVDPAISGSYEKDEVTRCIHIGLLCVQENPVNRPALSTIFQMLTNSSITLNVPQPPGFFFRNRPESDTLRRGLEPDQYNNESVTCSIDNATITTLLGKTLASALCCITSTLFSKSMYRNTED

SEQ ID NO: 88722 - protein, 620 aa, Arabidopsis thaliana
  peptide (1)..(620): Ceres Seq. ID no. 12711767
  misc_feature (1)..(591): Homolog of NCBI NO: 15233389 NR Description: serine/threonine kinase-like protein; protein id:
  misc_feature (1)..(584): Homolog of NCBI NO: 30686091 NR Description: serine/threonine kinase - like protein
  misc_feature (233)..(593): Homolog of NCBI NO: 30686129 NR Description: serine/threonine kinase - like protein
  misc_feature (1)..(244): Homolog of NCBI NO: 30686129 NR Description: serine/threonine kinase - like protein
  misc_feature (1)..(584): Homolog of NCBI NO: 4127461 NR Description: receptor-like protein kinase, RLK3 [Arabidopsis
  misc_feature (1)..(591): Homolog of NCBI NO: 7488201 NR Description: probable serine/threonine-specific protein kinase
  misc_feature (1)..(591): Homolog of NCBI NO: 15233396 NR Description: serine/threonine kinase-like protein (fragment);
  misc_feature (1)..(591): Homolog of NCBI NO: 15233391 NR Description: serine/threonine kinase-like protein; protein id:
  misc_feature (1)..(591): Homolog of NCBI NO: 4008012 NR Description: receptor-like protein kinase [Arabidopsis
  misc_feature (1)..(613): Homolog of NCBI NO: 15236444 NR Description: protein kinase - like protein; protein id:
MCIPGAKQKLCRDCIMDVTRQLIQTCPNQTAAIHWSGGGKTVCMARYYNQPSSRPLDLESVSIGYNVGNLSTNLTDFDRLWERLIAHMVTKASSASIKYLSFDNSRFYAADETNLTNSQMVYALMQCTPDVSPSNCNTCLKQSVDDYVGCCHGKQGGYVYRPSCIFRWDLYPFNGAFDLLTLAPPPSSQLQSPPPVTNKDEKTIHTGTIIGIVIVVAMVIIMALLALGVSVCRSRKKYQAFASETADDITTVGYLQFDIKDIEAATSNFLASNKIGQGGFGEVYKGTLSNGTEVAVKRLSRTSDQGELEFKNEVLLVAKLQHRNLVRLLGFALQGEEKILVFEFVPNKSLDYFLFDPTKKGQLDWTRRYNIIGGITRGLLYLHQDSRLTIIHRDIKASNILLDADMNPKIADFGMARNFRDHQTEDSTGRVVGTFGYMPPEYVAHGQFSTKSDVYSFGVLILEIVSGRKNSSFYQMDGSVCNLVTYVWRLWNTDSSLELVDPAISGSYEKDEVTRCIHIGLLCVQENPVNRPALSTIFQMLTNSSITLNVPQPPGFFFRNRPESDTLRRGLEPDQYNNESVTCSIDNATITTLLGKTLASALCCITSTLFSKSMYRNTED

SEQ ID NO: 88723 - DNA, 2007 bp, Arabidopsis thaliana
  misc_feature (1)..(2007): Ceres Seq. ID no. 12711778
  misc_feature: MA Experiment ID: 20000171 Result: Down-regulated in Transcription
  misc_feature: MA Experiment 20000171 PARAMETER Experiment Name: At_42deg_Heat_P Parameter: Age (day) Value: 14
  misc_feature: MA Experiment 20000171 PARAMETER Experiment Name: At_42deg_Heat_P Parameter: Organism Value: A. thaliana
  misc_feature: MA Experiment 20000171 PARAMETER Experiment Name: At_42deg_Heat_P Parameter: Plant Line Value: WS
  misc_feature: MA Experiment 20000171 PARAMETER Experiment Name: At_42deg_Heat_P Parameter: Temperature (deg C) Value: 42 vs. 22
  misc_feature: MA Experiment 20000171 PARAMETER Experiment Name: At_42deg_Heat_P Parameter: Timepoint (hr) Value: 1
  misc_feature: MA Experiment 20000171 PARAMETER Experiment Name: At_42deg_Heat_P Parameter: Tissue Value: Aerial
  misc_feature: MA Experiment ID: 20000173 Result: Down-regulated in Transcription
  misc_feature: MA Experiment 20000173 PARAMETER Experiment Name: At_42deg_Heat_P Parameter: Age (day) Value: 14
  misc_feature: MA Experiment 20000173 PARAMETER Experiment Name: At_42deg_Heat_P Parameter: Organism Value: A. thaliana
  misc_feature: MA Experiment 20000173 PARAMETER Experiment Name: At_42deg_Heat_P Parameter: Plant Line Value: WS
  misc_feature: MA Experiment 20000173 PARAMETER Experiment Name: At_42deg_Heat_P Parameter: Temperature (deg C) Value: 42 vs. 22
  misc_feature: MA Experiment 20000173 PARAMETER Experiment Name: At_42deg_Heat_P Parameter: Timepoint (hr) Value: 6
  misc_feature: MA Experiment 20000173 PARAMETER Experiment Name: At_42deg_Heat_P Parameter: Tissue Value: Aerial
  misc_feature: MA Experiment ID: 20000182 Result: Up-regulated in Transcription
  misc_feature: MA Experiment 20000182 PARAMETER Experiment Name: At_2mM_SA_P Parameter: Age (day) Value: 14
  misc_feature: MA Experiment 20000182 PARAMETER Experiment Name: At_2mM_SA_P Parameter: Organism Value: A. thaliana
  misc_feature: MA Experiment 20000182 PARAMETER Experiment Name: At_2mM_SA_P Parameter: Plant Line Value: WS
  misc_feature: MA Experiment 20000182 PARAMETER Experiment Name: At_2mM_SA_P Parameter: Timepoint (hr) Value: 6
  misc_feature: MA Experiment 20000182 PARAMETER Experiment Name: At_2mM_SA_P Parameter: Tissue Value: Aerial
  misc_feature: MA Experiment 20000182 PARAMETER Experiment Name: At_2mM_SA_P Parameter: Treatment Value: 2mM SA vs. No Treatment
  misc_feature: MA Experiment ID: 20000185 Result: Up-regulated in Transcription
  misc_feature: MA Experiment 20000185 PARAMETER Experiment Name: At_Roots__P Parameter: Age (day) Value: 7 vs. 21
  misc_feature: MA Experiment 20000185 PARAMETER Experiment Name: At_Roots__P Parameter: Organism Value: A. thaliana
  misc_feature: MA Experiment 20000185 PARAMETER Experiment Name: At_Roots__P Parameter: Tissue Value: Roots vs. Whole Plant
  misc_feature: MA Experiment ID: 20000436 Result: Down-regulated in Transcription
  misc_feature: MA Experiment 20000436 PARAMETER Experiment Name: At_Drought_P Parameter: Age (day) Value: 7
  misc_feature: MA Experiment 20000436 PARAMETER Experiment Name: At_Drought_P Parameter: Organism Value: A. thaliana
  misc_feature: MA Experiment 20000436 PARAMETER Experiment Name: At_Drought_P Parameter: Plant Line Value: WS
  misc_feature: MA Experiment 20000436 PARAMETER Experiment Name: At_Drought_P Parameter: Timepoint (hr) Value: 12
  misc_feature: MA Experiment 20000436 PARAMETER Experiment Name: At_Drought_P Parameter: Tissue Value: Whole Plant
  misc_feature: MA Experiment 20000436 PARAMETER Experiment Name: At_Drought_P Parameter: Treatment Value: Drought vs. No Drought
  misc_feature: MA Experiment ID: 20000437 Result: Down-regulated in Transcription
  misc_feature: MA Experiment 20000437 PARAMETER Experiment Name: At_Drought_P Parameter: Age (day) Value: 8
  misc_feature: MA Experiment 20000437 PARAMETER Experiment Name: At_Drought_P Parameter: Organism Value: A. thaliana
  misc_feature: MA Experiment 20000437 PARAMETER Experiment Name: At_Drought_P Parameter: Plant Line Value: WS
  misc_feature: MA Experiment 20000437 PARAMETER Experiment Name: At_Drought_P Parameter: Timepoint (hr) Value: 24
  misc_feature: MA Experiment 20000437 PARAMETER Experiment Name: At_Drought_P Parameter: Tissue Value: Whole Plant
  misc_feature: MA Experiment 20000437 PARAMETER Experiment Name: At_Drought_P Parameter: Treatment Value: Drought vs. No Drought
  misc_feature: MA Experiment ID: 20000439 Result: Up-regulated in Transcription
  misc_feature: MA Experiment 20000439 PARAMETER Experiment Name: At_Roots__P Parameter: Age (day) Value: 14 vs. 21
  misc_feature: MA Experiment 20000439 PARAMETER Experiment Name: At_Roots__P Parameter: Organism Value: A. thaliana
  misc_feature: MA Experiment 20000439 PARAMETER Experiment Name: At_Roots__P Parameter: Tissue Value: Roots vs. Whole Plant
  misc_feature: MA Experiment ID: 20001555 Result: Down-regulated in Transcription
  misc_feature: MA Experiment 20001555 PARAMETER Experiment Name: At_Drought_Soil_Dry_P Parameter: Age (day) Value: 24
  misc_feature: MA Experiment 20001555 PARAMETER Experiment Name: At_Drought_Soil_Dry_P Parameter: Organism Value: A. thaliana
  misc_feature: MA Experiment 20001555 PARAMETER Experiment Name: At_Drought_Soil_Dry_P Parameter: Plant Line Value: WS
  misc_feature: MA Experiment 20001555 PARAMETER Experiment Name: At_Drought_Soil_Dry_P Parameter: Post Timepoint (hr) Value: None
  misc_feature: MA Experiment 20001555 PARAMETER Experiment Name: At_Drought_Soil_Dry_P Parameter: Post-Treatment Value: None
  misc_feature: MA Experiment 20001555 PARAMETER Experiment Name: At_Drought_Soil_Dry_P Parameter: Timepoint (day) Value: 10
  misc_feature: MA Experiment 20001555 PARAMETER Experiment Name: At_Drought_Soil_Dry_P Parameter: Treatment Value: Drought vs. No Drought
  misc_feature: MA Experiment ID: 20001556 Result: Down-regulated in Transcription
  misc_feature: MA Experiment 20001556 PARAMETER Experiment Name: At_Drought_Soil_Dry_P Parameter: Age (day) Value: 26
  misc_feature: MA Experiment 20001556 PARAMETER Experiment Name: At_Drought_Soil_Dry_P Parameter: Organism Value: A. thaliana
  misc_feature: MA Experiment 20001556 PARAMETER Experiment Name: At_Drought_Soil_Dry_P Parameter: Plant Line Value: WS
  misc_feature: MA Experiment 20001556 PARAMETER Experiment Name: At_Drought_Soil_Dry_P Parameter: Post Timepoint (hr) Value: None
  misc_feature: MA Experiment 20001556 PARAMETER Experiment Name: At_Drought_Soil_Dry_P Parameter: Post-Treatment Value: None
  misc_feature: MA Experiment 20001556 PARAMETER Experiment Name: At_Drought_Soil_Dry_P Parameter: Timepoint (day) Value: 12
  misc_feature: MA Experiment 20001556 PARAMETER Experiment Name: At_Drought_Soil_Dry_P Parameter: Treatment Value: Drought vs. No Drought
  misc_feature: MA Experiment ID: 20001904 Result: Down-regulated in Transcription
  misc_feature: MA Experiment 20001904 PARAMETER Experiment Name: At_Drought_Reproduction_P Parameter: Age (day) Value: 37
  misc_feature: MA Experiment 20001904 PARAMETER Experiment Name: At_Drought_Reproduction_P Parameter: Organism Value: A. thaliana
  misc_feature: MA Experiment 20001904 PARAMETER Experiment Name: At_Drought_Reproduction_P Parameter: Plant Line Value: WS
  misc_feature: MA Experiment 20001904 PARAMETER Experiment Name: At_Drought_Reproduction_P Parameter: Timepoint (day) Value: 7
  misc_feature: MA Experiment 20001904 PARAMETER Experiment Name: At_Drought_Reproduction_P Parameter: Tissue Value: Rosettes
  misc_feature: MA Experiment 20001904 PARAMETER Experiment Name: At_Drought_Reproduction_P Parameter: Treatment Value: Drought vs. No Drought
atgtctttgtcttcttgttatctttaccagcttataaggcatgaagctaaagatttcgtttttaccaacttcttgatttttctcataagcttagattctgttactgctcaagaaatctgtttcagtggattctttaaacccaatagtacatacgatttaaaccgtcgtcaaatcctctctactctttcttctaatgtcacaagtcacaacggctttttcaactccaagtttggtcaagctcccaatagagtcttcatcaatggcatgtgcatccctgggactaaaccagagacttgttcagattgtattaaaggtgcatcagacaagatatcagagagttgtcctaacaaaacagatgcttatacatggcctgattgttgtatggtacgttattccaacgtttctttctctggttcactcgttatggaaccttctgaaactctctatcatacgggagatatcgaagatacaggcactaatttaacagtgtttgatagaatttgggaagagttaatgctccgtacaataactgcagcttcattgactgaggttgcttcattgactactttccaaaccatgtatgcgatgatgcaatgtacgccggatgtttcttcgaaagattgtgagttttgtttgaagacaagtgttggtgattatgagtcatgttgccgtggtaaacaaggtggtgcggtgataagaccaagttgctttgtccggtgggatttgtatccttatgctggagcttttgaaaatgttacatttccaccgcctccaccgcagtctttacctcagccaccggtttctttgattcctcctccagttagcgatagggcaaatacaaccatcaaagggattattgtggctattgttgttcctatcattgttatcttggtttcacttgttgtactactcgtggtttgcagaagaaagaagtcatataaaacaactgaggttcaagctactgatgagatcacaacaacacactcactgcagtttagttttaagacaattgaagctgcaactgacaagttttcggacagtaacatgatcgggcgaggtggatttggtgaagtttacaggggaaagctttcaagtggacctgaagtagcagtgaagagactgtcgaaaacatcaggacaaggcgcggaagagttcaagaatgaggctgttcttgtgtcgaagcttcaacataagaatctggtcaggcttcttggattttgtttggaaggagaagaaaagatactcgtctatgagtttgtacccaacaaaagccttgactattttctctttgaccctgcaaaacaaggtgaactagattggacaagacggtacaatatcattggggggattgctcgaggaattctatatcttcatcaagattcacggcttacaatcatacaccgtgatctcaaagcgagtaacattctcttagatgctgatatgaaccccaaaattgcagattttggcatggcgaggatttttggagttgatcaaagtcaagccaacacaagaagaatcgccggaacatttggttatatgtctccagaatatgcaatgcgtggccatttctccatgaagtctgatgtctatagctttggagtattggtactagagattataagtggcaaaaagaatagcagtttctacaacattgatgattctggtagcaatttggtaacacacgcttggagactttggagaaatgggtcaccgttagaactggtggatccaaccataggagaaagttatcagagtagcgaggctactagatgcatccatatcgcactattatgtgttcaagaagatcctgcagatcgtccattgttaccagcgatcatcatgatgcttactagtagcacaaccactttacatgtgcctcgagcgcccggattttgcctaagcgggcgtgatctggaacaggatggtgtagagtataccgaatccacaagcaggtctattcctggttctatcaatgatgcatcgattacagagttctatcctcgttga

SEQ ID NO: 88724 - protein, 668 aa, Arabidopsis thaliana
  peptide (1)..(668): Ceres Seq. ID no. 12711779
  misc_feature (19)..(652): Homolog of NCBI NO: 4127461 NR Description: receptor-like protein kinase, RLK3 [Arabidopsis
  misc_feature (24)..(664): Homolog of NCBI NO: 15236444 NR Description: protein kinase - like protein; protein id:
  misc_feature (26)..(668): Homolog of NCBI NO: 15233389 NR Description: serine/threonine kinase-like protein; protein id:
  misc_feature (183)..(668): Homolog of NCBI NO: 4008012 NR Description: receptor-like protein kinase [Arabidopsis
  misc_feature (24)..(180): Homolog of NCBI NO: 4008012 NR Description: receptor-like protein kinase [Arabidopsis
  misc_feature (26)..(668): Homolog of NCBI NO: 15233391 NR Description: serine/threonine kinase-like protein; protein id:
  misc_feature (324)..(668): Homolog of NCBI NO: 15236421 NR Description: serine /threonine kinase - like protein; protein At4g23200.1 [Arabidopsis thaliana] >gi|7488197|pir||T04837
  misc_feature (24)..(270): Homolog of NCBI NO: 15236421 NR Description: serine /threonine kinase - like protein; protein At4g23200.1 [Arabidopsis thaliana] >gi|7488197|pir||T04837
  misc_feature (43)..(663): Homolog of NCBI NO: 15233387 NR Description: serine/threonine kinase-like protein; protein id:
  misc_feature (24)..(644): Homolog of NCBI NO: 15236451 NR Description: serine/threonine kinase - like protein; protein At4g23300.1 [Arabidopsis thaliana] >gi|7488191|pir||T04847
MSLSSCYLYQLIRHEAKDFVFTNFLIFLISLDSVTAQEICFSGFFKPNSTYDLNRRQILSTLSSNVTSHNGFFNSKFGQAPNRVFINGMCIPGTKPETCSDCIKGASDKISESCPNKTDAYTWPDCCMVRYSNVSFSGSLVMEPSETLYHTGDIEDTGTNLTVFDRIWEELMLRTITAASLTEVASLTTFQTMYAMMQCTPDVSSKDCEFCLKTSVGDYESCCRGKQGGAVIRPSCFVRWDLYPYAGAFENVTFPPPPPQSLPQPPVSLIPPPVSDRANTTIKGIIVAIVVPIIVILVSLVVLLVVCRRKKSYKTTEVQATDEITTTHSLQFSFKTIEAATDKFSDSNMIGRGGFGEVYRGKLSSGPEVAVKRLSKTSGQGAEEFKNEAVLVSKLQHKNLVRLLGFCLEGEEKILVYEFVPNKSLDYFLFDPAKQGELDWTRRYNIIGGIARGILYLHQDSRLTIIHRDLKASNILLDADMNPKIADFGMARIFGVDQSQANTRRIAGTFGYMSPEYAMRGHFSMKSDVYSFGVLVLEIISGKKNSSFYNIDDSGSNLVTHAWRLWRNGSPLELVDPTIGESYQSSEATRCIHIALLCVQEDPADRPLLPAIIMMLTSSTTTLHVPRAPGFCLSGRDLEQDGVEYTESTSRSIPGSINDASITEFYPR

SEQ ID NO: 88725 - protein, 580 aa, Arabidopsis thaliana
  peptide (1)..(580): Ceres Seq. ID no. 12711780
  misc_feature (1)..(564): Homolog of NCBI NO: 4127461 NR Description: receptor-like protein kinase, RLK3 [Arabidopsis
  misc_feature (1)..(576): Homolog of NCBI NO: 15236444 NR Description: protein kinase - like protein; protein id:
  misc_feature (1)..(580): Homolog of NCBI NO: 15233389 NR Description: serine/threonine kinase-like protein; protein id:
  misc_feature (95)..(580): Homolog of NCBI NO: 4008012 NR Description: receptor-like protein kinase [Arabidopsis
  misc_feature (1)..(92): Homolog of NCBI NO: 4008012 NR Description: receptor-like protein kinase [Arabidopsis
  misc_feature (1)..(580): Homolog of NCBI NO: 15233391 NR Description: serine/threonine kinase-like protein; protein id:
  misc_feature (236)..(580): Homolog of NCBI NO: 15236421 NR Description: serine /threonine kinase - like protein; protein At4g23200.1 [Arabidopsis thaliana] >gi|7488197|pir||T04837
  misc_feature (1)..(182): Homolog of NCBI NO: 15236421 NR Description: serine /threonine kinase - like protein; protein At4g23200.1 [Arabidopsis thaliana] >gi|7488197|pir||T04837
  misc_feature (1)..(575): Homolog of NCBI NO: 15233387 NR Description: serine/threonine kinase-like protein; protein id:
  misc_feature (1)..(556): Homolog of NCBI NO: 15236451 NR Description: serine/threonine kinase - like protein; protein At4g23300.1 [Arabidopsis thaliana] >gi|7488191|pir||T04847
MCIPGTKPETCSDCIKGASDKISESCPNKTDAYTWPDCCMVRYSNVSFSGSLVMEPSETLYHTGDIEDTGTNLTVFDRIWEELMLRTITAASLTEVASLTTFQTMYAMMQCTPDVSSKDCEFCLKTSVGDYESCCRGKQGGAVIRPSCFVRWDLYPYAGAFENVTFPPPPPQSLPQPPVSLIPPPVSDRANTTIKGIIVAIVVPIIVILVSLVVLLVVCRRKKSYKTTEVQATDEITTTHSLQFSFKTIEAATDKFSDSNMIGRGGFGEVYRGKLSSGPEVAVKRLSKTSGQGAEEFKNEAVLVSKLQHKNLVRLLGFCLEGEEKILVYEFVPNKSLDYFLFDPAKQGELDWTRRYNIIGGIARGILYLHQDSRLTIIHRDLKASNILLDADMNPKIADFGMARIFGVDQSQANTRRIAGTFGYMSPEYAMRGHFSMKSDVYSFGVLVLEIISGKKNSSFYNIDDSGSNLVTHAWRLWRNGSPLELVDPTIGESYQSSEATRCIHIALLCVQEDPADRPLLPAIIMMLTSSTTTLHVPRAPGFCLSGRDLEQDGVEYTESTSRSIPGSINDASITEFYPR

SEQ ID NO: 88726 - protein, 541 aa, Arabidopsis thaliana
  peptide (1)..(541): Ceres Seq. ID no. 12711781
  misc_feature (1)..(525): Homolog of NCBI NO: 4127461 NR Description: receptor-like protein kinase, RLK3 [Arabidopsis
  misc_feature (1)..(537): Homolog of NCBI NO: 15236444 NR Description: protein kinase - like protein; protein id:
  misc_feature (1)..(541): Homolog of NCBI NO: 15233389 NR Description: serine/threonine kinase-like protein; protein id:
  misc_feature (56)..(541): Homolog of NCBI NO: 4008012 NR Description: receptor-like protein kinase [Arabidopsis
  misc_feature (1)..(53): Homolog of NCBI NO: 4008012 NR Description: receptor-like protein kinase [Arabidopsis
  misc_feature (1)..(541): Homolog of NCBI NO: 15233391 NR Description: serine/threonine kinase-like protein; protein id:
  misc_feature (197)..(541): Homolog of NCBI NO: 15236421 NR Description: serine /threonine kinase - like protein; protein At4g23200.1 [Arabidopsis thaliana] >gi|7488197|pir||T04837
  misc_feature (1)..(143): Homolog of NCBI NO: 15236421 NR Description: serine /threonine kinase - like protein; protein At4g23200.1 [Arabidopsis thaliana] >gi|7488197|pir||T04837
  misc_feature (1)..(536): Homolog of NCBI NO: 15233387 NR Description: serine/threonine kinase-like protein; protein id:
  misc_feature (1)..(517): Homolog of NCBI NO: 15236451 NR Description: serine/threonine kinase - like protein; protein At4g23300.1 [Arabidopsis thaliana] >gi|7488191|pir||T04847
MVRYSNVSFSGSLVMEPSETLYHTGDIEDTGTNLTVFDRIWEELMLRTITAASLTEVASLTTFQTMYAMMQCTPDVSSKDCEFCLKTSVGDYESCCRGKQGGAVIRPSCFVRWDLYPYAGAFENVTFPPPPPQSLPQPPVSLIPPPVSDRANTTIKGIIVAIVVPIIVILVSLVVLLVVCRRKKSYKTTEVQATDEITTTHSLQFSFKTIEAATDKFSDSNMIGRGGFGEVYRGKLSSGPEVAVKRLSKTSGQGAEEFKNEAVLVSKLQHKNLVRLLGFCLEGEEKILVYEFVPNKSLDYFLFDPAKQGELDWTRRYNIIGGIARGILYLHQDSRLTIIHRDLKASNILLDADMNPKIADFGMARIFGVDQSQANTRRIAGTFGYMSPEYAMRGHFSMKSDVYSFGVLVLEIISGKKNSSFYNIDDSGSNLVTHAWRLWRNGSPLELVDPTIGESYQSSEATRCIHIALLCVQEDPADRPLLPAIIMMLTSSTTTLHVPRAPGFCLSGRDLEQDGVEYTESTSRSIPGSINDASITEFYPR

SEQ ID NO: 88727 - DNA, 624 bp, Arabidopsis thaliana
  misc_feature (1)..(624): Ceres Seq. ID no. 12711851
  misc_feature: MA Experiment ID: 20000185 Result: Down-regulated in Transcription
  misc_feature: MA Experiment 20000185 PARAMETER Experiment Name: At_Roots__P Parameter: Age (day) Value: 7 vs. 21
  misc_feature: MA Experiment 20000185 PARAMETER Experiment Name: At_Roots__P Parameter: Organism Value: A. thaliana
  misc_feature: MA Experiment 20000185 PARAMETER Experiment Name: At_Roots__P Parameter: Tissue Value: Roots vs. Whole Plant
  misc_feature: MA Experiment ID: 20000234 Result: Down-regulated in Transcription
  misc_feature: MA Experiment 20000234 PARAMETER Experiment Name: At_Siliques_P Parameter: Age (day) Value: 21
  misc_feature: MA Experiment 20000234 PARAMETER Experiment Name: At_Siliques_P Parameter: Organism Value: A. thaliana
  misc_feature: MA Experiment 20000234 PARAMETER Experiment Name: At_Siliques_P Parameter: Plant Line Value: WS
  misc_feature: MA Experiment 20000234 PARAMETER Experiment Name: At_Siliques_P Parameter: Tissue Value: Less Than 5mm Siliques vs. Whole Plant
  misc_feature: MA Experiment ID: 20000235 Result: Down-regulated in Transcription
  misc_feature: MA Experiment 20000235 PARAMETER Experiment Name: At_Siliques_P Parameter: Age (day) Value: 21
  misc_feature: MA Experiment 20000235 PARAMETER Experiment Name: At_Siliques_P Parameter: Organism Value: A. thaliana
  misc_feature: MA Experiment 20000235 PARAMETER Experiment Name: At_Siliques_P Parameter: Plant Line Value: WS
  misc_feature: MA Experiment 20000235 PARAMETER Experiment Name: At_Siliques_P Parameter: Tissue Value: 5-10mm Siliques vs. Whole Plant
  misc_feature: MA Experiment ID: 20000264 Result: Down-regulated in Transcription
  misc_feature: MA Experiment 20000264 PARAMETER Experiment Name: At_Open_Flower_P Parameter: Age (day) Value: 21
  misc_feature: MA Experiment 20000264 PARAMETER Experiment Name: At_Open_Flower_P Parameter: Plant Line Value: WS
  misc_feature: MA Experiment 20000264 PARAMETER Experiment Name: At_Open_Flower_P Parameter: Tissue Value: Open Flower vs. Whole Plant
  misc_feature: MA Experiment ID: 20000265 Result: Down-regulated in Transcription
  misc_feature: MA Experiment 20000265 PARAMETER Experiment Name: At_Open_Flower_P Parameter: Age (day) Value: 21
  misc_feature: MA Experiment 20000265 PARAMETER Experiment Name: At_Open_Flower_P Parameter: Plant Line Value: WS
  misc_feature: MA Experiment 20000265 PARAMETER Experiment Name: At_Open_Flower_P Parameter: Tissue Value: Closed Flower vs. Whole Plant
  misc_feature: MA Experiment ID: 20000286 Result: Down-regulated in Transcription
  misc_feature: MA Experiment 20000286 PARAMETER Experiment Name: At_Open_Flower_P Parameter: Age (day) Value: 21
  misc_feature: MA Experiment 20000286 PARAMETER Experiment Name: At_Open_Flower_P Parameter: Plant Line Value: WS
  misc_feature: MA Experiment 20000286 PARAMETER Experiment Name: At_Open_Flower_P Parameter: Tissue Value: Half Open vs. Whole Plant
  misc_feature: MA Experiment ID: 20000794 Result: Down-regulated in Transcription
  misc_feature: MA Experiment 20000794 PARAMETER Experiment Name: At_Petals_P Parameter: Age (day) Value: 23-25 days
  misc_feature: MA Experiment 20000794 PARAMETER Experiment Name: At_Petals_P Parameter: Plant Line Value: WS
  misc_feature: MA Experiment 20000794 PARAMETER Experiment Name: At_Petals_P Parameter: Tissue Value: Petals vs. Whole plant
  misc_feature: MA Experiment ID: 20001248 Result: Up-regulated in Transcription
  misc_feature: MA Experiment 20001248 PARAMETER Experiment Name: At_Far-red-induction_P Parameter: Age (day) Value: 7
  misc_feature: MA Experiment 20001248 PARAMETER Experiment Name: At_Far-red-induction_P Parameter: Light Value: Far-red vs. White
  misc_feature: MA Experiment 20001248 PARAMETER Experiment Name: At_Far-red-induction_P Parameter: Organism Value: A. thaliana
  misc_feature: MA Experiment 20001248 PARAMETER Experiment Name: At_Far-red-induction_P Parameter: Plant Line Value: Columbia
  misc_feature: MA Experiment 20001248 PARAMETER Experiment Name: At_Far-red-induction_P Parameter: Timepoint (hr) Value: 4
  misc_feature: MA Experiment 20001248 PARAMETER Experiment Name: At_Far-red-induction_P Parameter: Tissue Value: Whole Plant
  misc_feature: MA Experiment ID: 20001450 Result: Up-regulated in Transcription
  misc_feature: MA Experiment 20001450 PARAMETER Experiment Name: At_Far-red-induction_P Parameter: Age (day) Value: 7
  misc_feature: MA Experiment 20001450 PARAMETER Experiment Name: At_Far-red-induction_P Parameter: Light Value: Far-red vs. White
  misc_feature: MA Experiment 20001450 PARAMETER Experiment Name: At_Far-red-induction_P Parameter: Organism Value: A. thaliana
  misc_feature: MA Experiment 20001450 PARAMETER Experiment Name: At_Far-red-induction_P Parameter: Plant Line Value: Columbia
  misc_feature: MA Experiment 20001450 PARAMETER Experiment Name: At_Far-red-induction_P Parameter: Timepoint (hr) Value: 8
  misc_feature: MA Experiment 20001450 PARAMETER Experiment Name: At_Far-red-induction_P Parameter: Tissue Value: Whole Plant
  misc_feature: MA Experiment ID: 20001555 Result: Down-regulated in Transcription
  misc_feature: MA Experiment 20001555 PARAMETER Experiment Name: At_Drought_Soil_Dry_P Parameter: Age (day) Value: 24
  misc_feature: MA Experiment 20001555 PARAMETER Experiment Name: At_Drought_Soil_Dry_P Parameter: Organism Value: A. thaliana
  misc_feature: MA Experiment 20001555 PARAMETER Experiment Name: At_Drought_Soil_Dry_P Parameter: Plant Line Value: WS
  misc_feature: MA Experiment 20001555 PARAMETER Experiment Name: At_Drought_Soil_Dry_P Parameter: Post Timepoint (hr) Value: None
  misc_feature: MA Experiment 20001555 PARAMETER Experiment Name: At_Drought_Soil_Dry_P Parameter: Post-Treatment Value: None
  misc_feature: MA Experiment 20001555 PARAMETER Experiment Name: At_Drought_Soil_Dry_P Parameter: Timepoint (day) Value: 10
  misc_feature: MA Experiment 20001555 PARAMETER Experiment Name: At_Drought_Soil_Dry_P Parameter: Treatment Value: Drought vs. No Drought
  misc_feature: MA Experiment ID: 20001556 Result: Down-regulated in Transcription
  misc_feature: MA Experiment 20001556 PARAMETER Experiment Name: At_Drought_Soil_Dry_P Parameter: Age (day) Value: 26
  misc_feature: MA Experiment 20001556 PARAMETER Experiment Name: At_Drought_Soil_Dry_P Parameter: Organism Value: A. thaliana
  misc_feature: MA Experiment 20001556 PARAMETER Experiment Name: At_Drought_Soil_Dry_P Parameter: Plant Line Value: WS
  misc_feature: MA Experiment 20001556 PARAMETER Experiment Name: At_Drought_Soil_Dry_P Parameter: Post Timepoint (hr) Value: None
  misc_feature: MA Experiment 20001556 PARAMETER Experiment Name: At_Drought_Soil_Dry_P Parameter: Post-Treatment Value: None
  misc_feature: MA Experiment 20001556 PARAMETER Experiment Name: At_Drought_Soil_Dry_P Parameter: Timepoint (day) Value: 12
  misc_feature: MA Experiment 20001556 PARAMETER Experiment Name: At_Drought_Soil_Dry_P Parameter: Treatment Value: Drought vs. No Drought
  misc_feature: MA Experiment ID: 20001557 Result: Down-regulated in Transcription
  misc_feature: MA Experiment 20001557 PARAMETER Experiment Name: At_Drought_Soil_Dry_P Parameter: Age (day) Value: 27
  misc_feature: MA Experiment 20001557 PARAMETER Experiment Name: At_Drought_Soil_Dry_P Parameter: Organism Value: A. thaliana
  misc_feature: MA Experiment 20001557 PARAMETER Experiment Name: At_Drought_Soil_Dry_P Parameter: Plant Line Value: WS
  misc_feature: MA Experiment 20001557 PARAMETER Experiment Name: At_Drought_Soil_Dry_P Parameter: Post Timepoint (hr) Value: 3
  misc_feature: MA Experiment 20001557 PARAMETER Experiment Name: At_Drought_Soil_Dry_P Parameter: Post-Treatment Value: Re-Water vs. No Drought
  misc_feature: MA Experiment 20001557 PARAMETER Experiment Name: At_Drought_Soil_Dry_P Parameter: Timepoint (day) Value: 13
  misc_feature: MA Experiment 20001557 PARAMETER Experiment Name: At_Drought_Soil_Dry_P Parameter: Treatment Value: Drought vs. No Drought
atgtacgggagaaaagggtatcagcttatcaaagattttgccaccggagagaagggtcagctcaaacctttcaacagcaaactctttgatgaaacaatcgaagagtgtgaccagaatcaccatcttatccagtccttgataaggaaaatgcaacaagaaggtttggatgttcagaacaacagaaacgctgaccactatggagcactaattcaccaccttgctttgatccggaacaagcgctgcctcatggcttatgtgtacaaccgagcagaaattgtgcgtgatttggcatggagagtagggcttgaacttctcgaccttccctctgaaatccaagagaagctcactacactagagaaggaatacttcaaaaaccattcggttgctctaaaatcatacatgggaaaagtaggaatcgagttgaatgtcgatatggtccctcctaaagatccttatatcaaggtcagaattttggatgatattgatgaaggaatcgtgctgagtgacaaaacaacaaattttgcccgtcattctatgcatttcctcaaacgtactgatgcggaaccatacattgctcgggtcagtctttttcgttattccttccctaaaactagaatgatctaa

SEQ ID NO: 88728 - protein, 207 aa, Arabidopsis thaliana
  peptide (1)..(207): Ceres Seq. ID no. 12711852
  misc_feature (1)..(193): Pfam Name: Partner of SLD five, PSF1 Pfam Description: Partner of SLD five, PSF1
  misc_feature (1)..(193): Homolog of NCBI NO: 15220076 NR Description: unknown protein; protein id: At1g80190.1
  misc_feature (1)..(191): Homolog of NCBI NO: 29365479 NR Description: Psf1 [Xenopus laevis]
  misc_feature (1)..(191): Homolog of NCBI NO: 10800148 NR Description: KIAA0186 gene product [Homo sapiens] Hypothetical protein KIAA0186 >gi|1136432|dbj|BAA11503.1|
  misc_feature (1)..(191): Homolog of NCBI NO: 40788899 NR Description: KIAA0186 [Homo sapiens]
  misc_feature (1)..(191): Homolog of NCBI NO: 15214812 NR Description: KIAA0186 gene product [Homo sapiens]
  misc_feature (1)..(191): Homolog of NCBI NO: 28487734 NR Description: RIKEN cDNA 2810418N01 [Mus musculus]
  misc_feature (20)..(191): Homolog of NCBI NO: 24655047 NR Description: CG9187-PA [Drosophila melanogaster]
  misc_feature (1)..(155): Homolog of NCBI NO: 9407835 NR Description: bA384D7.3 (KIAA0186 protein) [Homo sapiens]
  misc_feature (5)..(191): Homolog of NCBI NO: 39589214 NR Description: Hypothetical protein CBG01004 [Caenorhabditis
  misc_feature (1)..(155): Homolog of NCBI NO: 20380632 NR Description: Similar to RIKEN cDNA 2810418N01 gene [Mus
MYGRKGYQLIKDFATGEKGQLKPFNSKLFDETIEECDQNHHLIQSLIRKMQQEGLDVQNNRNADHYGALIHHLALIRNKRCLMAYVYNRAEIVRDLAWRVGLELLDLPSEIQEKLTTLEKEYFKNHSVALKSYMGKVGIELNVDMVPPKDPYIKVRILDDIDEGIVLSDKTTNFARHSMHFLKRTDAEPYIARVSLFRYSFPKTRMI

SEQ ID NO: 88729 - protein, 158 aa, Arabidopsis thaliana
  peptide (1)..(158): Ceres Seq. ID no. 12711853
  misc_feature (1)..(144): Pfam Name: Partner of SLD five, PSF1 Pfam Description: Partner of SLD five, PSF1
  misc_feature (1)..(144): Homolog of NCBI NO: 15220076 NR Description: unknown protein; protein id: At1g80190.1
  misc_feature (1)..(142): Homolog of NCBI NO: 29365479 NR Description: Psf1 [Xenopus laevis]
  misc_feature (1)..(142): Homolog of NCBI NO: 10800148 NR Description: KIAA0186 gene product [Homo sapiens] Hypothetical protein KIAA0186 >gi|1136432|dbj|BAA11503.1|
  misc_feature (1)..(142): Homolog of NCBI NO: 40788899 NR Description: KIAA0186 [Homo sapiens]
  misc_feature (1)..(142): Homolog of NCBI NO: 15214812 NR Description: KIAA0186 gene product [Homo sapiens]
  misc_feature (1)..(142): Homolog of NCBI NO: 28487734 NR Description: RIKEN cDNA 2810418N01 [Mus musculus]
  misc_feature (1)..(142): Homolog of NCBI NO: 24655047 NR Description: CG9187-PA [Drosophila melanogaster]
  misc_feature (1)..(106): Homolog of NCBI NO: 9407835 NR Description: bA384D7.3 (KIAA0186 protein) [Homo sapiens]
  misc_feature (1)..(142): Homolog of NCBI NO: 39589214 NR Description: Hypothetical protein CBG01004 [Caenorhabditis
  misc_feature (1)..(106): Homolog of NCBI NO: 20380632 NR Description: Similar to RIKEN cDNA 2810418N01 gene [Mus
MQQEGLDVQNNRNADHYGALIHHLALIRNKRCLMAYVYNRAEIVRDLAWRVGLELLDLPSEIQEKLTTLEKEYFKNHSVALKSYMGKVGIELNVDMVPPKDPYIKVRILDDIDEGIVLSDKTTNFARHSMHFLKRTDAEPYIARVSLFRYSFPKTRMI

SEQ ID NO: 88730 - protein, 125 aa, Arabidopsis thaliana
  peptide (1)..(125): Ceres Seq. ID no. 12711854
  misc_feature (1)..(111): Pfam Name: Partner of SLD five, PSF1 Pfam Description: Partner of SLD five, PSF1
  misc_feature (1)..(111): Homolog of NCBI NO: 15220076 NR Description: unknown protein; protein id: At1g80190.1
  misc_feature (1)..(109): Homolog of NCBI NO: 29365479 NR Description: Psf1 [Xenopus laevis]
  misc_feature (1)..(109): Homolog of NCBI NO: 10800148 NR Description: KIAA0186 gene product [Homo sapiens] Hypothetical protein KIAA0186 >gi|1136432|dbj|BAA11503.1|
  misc_feature (1)..(109): Homolog of NCBI NO: 40788899 NR Description: KIAA0186 [Homo sapiens]
  misc_feature (1)..(109): Homolog of NCBI NO: 15214812 NR Description: KIAA0186 gene product [Homo sapiens]
  misc_feature (1)..(109): Homolog of NCBI NO: 28487734 NR Description: RIKEN cDNA 2810418N01 [Mus musculus]
  misc_feature (1)..(109): Homolog of NCBI NO: 24655047 NR Description: CG9187-PA [Drosophila melanogaster]
  misc_feature (1)..(73): Homolog of NCBI NO: 9407835 NR Description: bA384D7.3 (KIAA0186 protein) [Homo sapiens]
  misc_feature (1)..(109): Homolog of NCBI NO: 39589214 NR Description: Hypothetical protein CBG01004 [Caenorhabditis
  misc_feature (1)..(73): Homolog of NCBI NO: 20380632 NR Description: Similar to RIKEN cDNA 2810418N01 gene [Mus
MAYVYNRAEIVRDLAWRVGLELLDLPSEIQEKLTTLEKEYFKNHSVALKSYMGKVGIELNVDMVPPKDPYIKVRILDDIDEGIVLSDKTTNFARHSMHFLKRTDAEPYIARVSLFRYSFPKTRMI

SEQ ID NO: 88731 - DNA, 1153 bp, Arabidopsis thaliana
  misc_feature (1)..(1153): Ceres Seq. ID no. 12711908
  misc_feature: MA Experiment ID: 20000182 Result: Up-regulated in Transcription
  misc_feature: MA Experiment 20000182 PARAMETER Experiment Name: At_2mM_SA_P Parameter: Age (day) Value: 14
  misc_feature: MA Experiment 20000182 PARAMETER Experiment Name: At_2mM_SA_P Parameter: Organism Value: A. thaliana
  misc_feature: MA Experiment 20000182 PARAMETER Experiment Name: At_2mM_SA_P Parameter: Plant Line Value: WS
  misc_feature: MA Experiment 20000182 PARAMETER Experiment Name: At_2mM_SA_P Parameter: Timepoint (hr) Value: 6
  misc_feature: MA Experiment 20000182 PARAMETER Experiment Name: At_2mM_SA_P Parameter: Tissue Value: Aerial
  misc_feature: MA Experiment 20000182 PARAMETER Experiment Name: At_2mM_SA_P Parameter: Treatment Value: 2mM SA vs. No Treatment
  misc_feature: MA Experiment ID: 20000184 Result: Down-regulated in Transcription
  misc_feature: MA Experiment 20000184 PARAMETER Experiment Name: At_Shoots__P Parameter: Age (day) Value: 7
  misc_feature: MA Experiment 20000184 PARAMETER Experiment Name: At_Shoots__P Parameter: Tissue Value: Shoots vs. Whole Plant
  misc_feature: MA Experiment ID: 20000227 Result: Down-regulated in Transcription
  misc_feature: MA Experiment 20000227 PARAMETER Experiment Name: At_Root-Tips-vs-Tops_P Parameter: Tissue Value: Root Tips vs. Root Tops
  misc_feature: MA Experiment ID: 20000235 Result: Down-regulated in Transcription
  misc_feature: MA Experiment 20000235 PARAMETER Experiment Name: At_Siliques_P Parameter: Age (day) Value: 21
  misc_feature: MA Experiment 20000235 PARAMETER Experiment Name: At_Siliques_P Parameter: Organism Value: A. thaliana
  misc_feature: MA Experiment 20000235 PARAMETER Experiment Name: At_Siliques_P Parameter: Plant Line Value: WS
  misc_feature: MA Experiment 20000235 PARAMETER Experiment Name: At_Siliques_P Parameter: Tissue Value: 5-10mm Siliques vs. Whole Plant
  misc_feature: MA Experiment ID: 20000436 Result: Up-regulated in Transcription
  misc_feature: MA Experiment 20000436 PARAMETER Experiment Name: At_Drought_P Parameter: Age (day) Value: 7
  misc_feature: MA Experiment 20000436 PARAMETER Experiment Name: At_Drought_P Parameter: Organism Value: A. thaliana
  misc_feature: MA Experiment 20000436 PARAMETER Experiment Name: At_Drought_P Parameter: Plant Line Value: WS
  misc_feature: MA Experiment 20000436 PARAMETER Experiment Name: At_Drought_P Parameter: Timepoint (hr) Value: 12
  misc_feature: MA Experiment 20000436 PARAMETER Experiment Name: At_Drought_P Parameter: Tissue Value: Whole Plant
  misc_feature: MA Experiment 20000436 PARAMETER Experiment Name: At_Drought_P Parameter: Treatment Value: Drought vs. No Drought
  misc_feature: MA Experiment ID: 20000437 Result: Up-regulated in Transcription
  misc_feature: MA Experiment 20000437 PARAMETER Experiment Name: At_Drought_P Parameter: Age (day) Value: 8
  misc_feature: MA Experiment 20000437 PARAMETER Experiment Name: At_Drought_P Parameter: Organism Value: A. thaliana
  misc_feature: MA Experiment 20000437 PARAMETER Experiment Name: At_Drought_P Parameter: Plant Line Value: WS
  misc_feature: MA Experiment 20000437 PARAMETER Experiment Name: At_Drought_P Parameter: Timepoint (hr) Value: 24
  misc_feature: MA Experiment 20000437 PARAMETER Experiment Name: At_Drought_P Parameter: Tissue Value: Whole Plant
  misc_feature: MA Experiment 20000437 PARAMETER Experiment Name: At_Drought_P Parameter: Treatment Value: Drought vs. No Drought
  misc_feature: MA Experiment ID: 20000438 Result: Down-regulated in Transcription
  misc_feature: MA Experiment 20000438 PARAMETER Experiment Name: At_Shoots__P Parameter: Age (day) Value: 14
  misc_feature: MA Experiment 20000438 PARAMETER Experiment Name: At_Shoots__P Parameter: Tissue Value: Shoots vs. Whole Plant
  misc_feature: MA Experiment ID: 20000460 Result: Up-regulated in Transcription
  misc_feature: MA Experiment 20000460 PARAMETER Experiment Name: At_10percent_PEG_P Parameter: Age (day) Value: 12
  misc_feature: MA Experiment 20000460 PARAMETER Experiment Name: At_10percent_PEG_P Parameter: Organism Value: A. thaliana
  misc_feature: MA Experiment 20000460 PARAMETER Experiment Name: At_10percent_PEG_P Parameter: Plant Line Value: WS
  misc_feature: MA Experiment 20000460 PARAMETER Experiment Name: At_10percent_PEG_P Parameter: Timepoint (day) Value: 12
  misc_feature: MA Experiment 20000460 PARAMETER Experiment Name: At_10percent_PEG_P Parameter: Tissue Value: Whole Plant
  misc_feature: MA Experiment 20000460 PARAMETER Experiment Name: At_10percent_PEG_P Parameter: Treatment Value: 10percent PEG vs. No Treatment
  misc_feature: MA Experiment ID: 20000495 Result: Down-regulated in Transcription
  misc_feature: MA Experiment 20000495 PARAMETER Experiment Name: At_Guard_Cells_P Parameter: Harvest Date Value: 8/2/2002
  misc_feature: MA Experiment 20000495 PARAMETER Experiment Name: At_Guard_Cells_P Parameter: Organism Value: A. thaliana
  misc_feature: MA Experiment 20000495 PARAMETER Experiment Name: At_Guard_Cells_P Parameter: Tissue Value: Guard Cells vs. Leaves
  misc_feature: MA Experiment ID: 20000527 Result: Up-regulated in Transcription
  misc_feature: MA Experiment 20000527 PARAMETER Experiment Name: At_10percent_PEG_P Parameter: Age (day) Value: 20
  misc_feature: MA Experiment 20000527 PARAMETER Experiment Name: At_10percent_PEG_P Parameter: Organism Value: A. thaliana
  misc_feature: MA Experiment 20000527 PARAMETER Experiment Name: At_10percent_PEG_P Parameter: Plant Line Value: WS
  misc_feature: MA Experiment 20000527 PARAMETER Experiment Name: At_10percent_PEG_P Parameter: Timepoint (day) Value: 20
  misc_feature: MA Experiment 20000527 PARAMETER Experiment Name: At_10percent_PEG_P Parameter: Tissue Value: Whole Plant
  misc_feature: MA Experiment 20000527 PARAMETER Experiment Name: At_10percent_PEG_P Parameter: Treatment Value: 10percent PEG vs. No Treatment
  misc_feature: MA Experiment ID: 20000794 Result: Down-regulated in Transcription
  misc_feature: MA Experiment 20000794 PARAMETER Experiment Name: At_Petals_P Parameter: Age (day) Value: 23-25 days
  misc_feature: MA Experiment 20000794 PARAMETER Experiment Name: At_Petals_P Parameter: Plant Line Value: WS
  misc_feature: MA Experiment 20000794 PARAMETER Experiment Name: At_Petals_P Parameter: Tissue Value: Petals vs. Whole plant
  misc_feature: MA Experiment ID: 20001905 Result: Up-regulated in Transcription
  misc_feature: MA Experiment 20001905 PARAMETER Experiment Name: At_Drought_Reproduction_P Parameter: Age (day) Value: 40
  misc_feature: MA Experiment 20001905 PARAMETER Experiment Name: At_Drought_Reproduction_P Parameter: Organism Value: A. thaliana
  misc_feature: MA Experiment 20001905 PARAMETER Experiment Name: At_Drought_Reproduction_P Parameter: Plant Line Value: WS
  misc_feature: MA Experiment 20001905 PARAMETER Experiment Name: At_Drought_Reproduction_P Parameter: Timepoint (day) Value: 10
  misc_feature: MA Experiment 20001905 PARAMETER Experiment Name: At_Drought_Reproduction_P Parameter: Tissue Value: Rosettes
  misc_feature: MA Experiment 20001905 PARAMETER Experiment Name: At_Drought_Reproduction_P Parameter: Treatment Value: Drought vs. No Drought
acagagatatcttcctctctactttttcgccaccatctctcccatctctcctctctctctttgagttgcgactatgtccggcgaaaactggattcgagtggccatgtctgacgattccatggtggcggaggcgcttcttcggctccgccactccgaaccgaagaatagagtcgacgcgtcccctctcaagctgaaatggagcgtgcgtcaacggagatcgaagaaaggagaccagacgcgagcaagccccaccacaccgctttcctggagcggtgccacgtctcttagcggcggaggcggcagcggtggaagcggcgccggtgctaccaccatggaaggcctcgaggagtctagcgccgccgtaaaaccctctgagccatttagatctaagatttctcaaacgagtgcaataacaacaacaacaacaacaacccttttcaagagatcaagaaagaagaagactttggctgagcttaaagaggaagagatcatgctcttgaaggaaagtaacggcctgaaaaatgaattggcaaatatgcgcgatttgctcgagcaacaaagagcaagaaacactgctctaaagaagatgaaggctgaatcacaatctgccttatcgtgcaaactcactttcgaacaaggttcttccttcttgctccctgacctaaacatgcctctagataacgacccgagccctgaagttgtctgctgaacgggcgagccacaagcatatcattcttttgtttttcccattacacaacactataccactatacctcctccgtccacaaacatgttttttgaactgtaactatatgaatatgaagaacgtagattaatcctatatatccttcacccatatcccggtggaagctgaagaagattcgcctgaaggtgaagtggttcgagactatggttaagtgtgttaacaatatcttctagtttagctggtagtaagatttttgttctgccaatctcctaaatgattcttatctttctcccattttattaggatgagatgtaattatctacttagataatagatgtacacctttttttttttgtttgttctttcttattatctctggtaagatgtattacatcgacatttataatcagtgtaacacgttccaaacattttactatattttgtatt

SEQ ID NO: 88732 - protein, 211 aa, Arabidopsis thaliana; identical to SEQ ID NO: 43692
  peptide (1)..(211): Ceres Seq. ID no. 12711909
  misc_feature (1)..(211): Homolog of NCBI NO: 22330774 NR Description: hypothetical protein; protein id: At1g80610.1, by cDNA: gi_17979499, supported by cDNA: gi_20147292 [Arabidopsis >gi|17979500|gb|AAL50086.1| At1g80610/T21F11_6 [Arabidopsis
  misc_feature (1)..(107): Homolog of NCBI NO: 15218326 NR Description: hypothetical protein; protein id: At1g15800.1
  misc_feature (103)..(208): Homolog of NCBI NO: 15218326 NR Description: hypothetical protein; protein id: At1g15800.1
  misc_feature (1)..(107): Homolog of NCBI NO: 25406677 NR Description: hypothetical protein T21F11.6 [imported] -
  misc_feature (85)..(208): Homolog of NCBI NO: 25402801 NR Description: protein F7H2.14 [imported] - Arabidopsis thaliana
  misc_feature (1)..(125): Homolog of NCBI NO: 25402801 NR Description: protein F7H2.14 [imported] - Arabidopsis thaliana
  misc_feature (4)..(178): Homolog of NCBI NO: 15236647 NR Description: putative protein; protein id: At4g32030.1, by cDNA: 37881. [Arabidopsis thaliana] >gi|7459474|pir||T04642
  misc_feature (1)..(146): Homolog of NCBI NO: 18420894 NR Description: putative protein; protein id: At5g25210.1, by cDNA: 13660. [Arabidopsis thaliana]

SEQ ID NO: 88733 - protein, 201 aa, Arabidopsis thaliana; identical to SEQ ID NO: 43693
  peptide (1)..(201): Ceres Seq. ID no. 12711910
  misc_feature (1)..(201): Homolog of NCBI NO: 22330774 NR Description: hypothetical protein; protein id: At1g80610.1, by cDNA: gi_17979499, supported by cDNA: gi_20147292 [Arabidopsis >gi|17979500|gb|AAL50086.1| At1g80610/T21F11_6 [Arabidopsis
  misc_feature (1)..(97): Homolog of NCBI NO: 15218326 NR Description: hypothetical protein; protein id: At1g15800.1
  misc_feature (93)..(198): Homolog of NCBI NO: 15218326 NR Description: hypothetical protein; protein id: At1g15800.1
  misc_feature (1)..(97): Homolog of NCBI NO: 25406677 NR Description: hypothetical protein T21F11.6 [imported] -
  misc_feature (75)..(198): Homolog of NCBI NO: 25402801 NR Description: protein F7H2.14 [imported] - Arabidopsis thaliana
  misc_feature (1)..(115): Homolog of NCBI NO: 25402801 NR Description: protein F7H2.14 [imported] - Arabidopsis thaliana
  misc_feature (1)..(168): Homolog of NCBI NO: 15236647 NR Description: putative protein; protein id: At4g32030.1, by cDNA: 37881. [Arabidopsis thaliana] >gi|7459474|pir||T04642
  misc_feature (1)..(136): Homolog of NCBI NO: 18420894 NR Description: putative protein; protein id: At5g25210.1, by cDNA: 13660. [Arabidopsis thaliana]

SEQ ID NO: 88734 - protein, 196 aa, Arabidopsis thaliana; identical to SEQ ID NO: 43694
  peptide (1)..(196): Ceres Seq. ID no. 12711911
  misc_feature (1)..(196): Homolog of NCBI NO: 22330774 NR Description: hypothetical protein; protein id: At1g80610.1, by cDNA: gi_17979499, supported by cDNA: gi_20147292 [Arabidopsis >gi|17979500|gb|AAL50086.1| At1g80610/T21F11_6 [Arabidopsis
  misc_feature (1)..(92): Homolog of NCBI NO: 15218326 NR Description: hypothetical protein; protein id: At1g15800.1
  misc_feature (88)..(193): Homolog of NCBI NO: 15218326 NR Description: hypothetical protein; protein id: At1g15800.1
  misc_feature (1)..(92): Homolog of NCBI NO: 25406677 NR Description: hypothetical protein T21F11.6 [imported] -
  misc_feature (70)..(193): Homolog of NCBI NO: 25402801 NR Description: protein F7H2.14 [imported] - Arabidopsis thaliana
  misc_feature (1)..(110): Homolog of NCBI NO: 25402801 NR Description: protein F7H2.14 [imported] - Arabidopsis thaliana
  misc_feature (1)..(163): Homolog of NCBI NO: 15236647 NR Description: putative protein; protein id: At4g32030.1, by cDNA: 37881. [Arabidopsis thaliana] >gi|7459474|pir||T04642
  misc_feature (1)..(131): Homolog of NCBI NO: 18420894 NR Description: putative protein; protein id: At5g25210.1, by cDNA: 13660. [Arabidopsis thaliana]

SEQ ID NO: 88735 - DNA, 918 bp, Arabidopsis thaliana
  misc_feature (1)..(918): Ceres Seq. ID no. 12711931
  misc_feature: MA Experiment ID: 108435 Result: Up-regulated in Transcription
  misc_feature: MA Experiment 108435 PARAMETER Experiment Name: At_stm_Mutants_cDNA_P Parameter: Plant Line Value: wt Landsburg vs stm
  misc_feature: MA Experiment 108435 PARAMETER Experiment Name: At_stm_Mutants_cDNA_P Parameter: Tissue Value: Shoot Apical Meristem Region
  misc_feature: MA Experiment ID: 108464 Result: Up-regulated in Transcription
  misc_feature: MA Experiment 108464 PARAMETER Experiment Name: At_Germinating_Seeds_cDNA_P Parameter: Age (day) Value: 4 vs. 0
  misc_feature: MA Experiment 108464 PARAMETER Experiment Name: At_Germinating_Seeds_cDNA_P Parameter: Tissue Value: Germinating Seeds
  misc_feature: MA Experiment ID: 108501 Result: Up-regulated in Transcription
  misc_feature: MA Experiment 108501 PARAMETER Experiment Name: At_ap2_floral_buds_cDNA_P Parameter: Plant Line Value: ap2 (Ler.)
  misc_feature: MA Experiment 108501 PARAMETER Experiment Name: At_ap2_floral_buds_cDNA_P Parameter: Tissue Value: Closed Flower
  misc_feature: MA Experiment ID: 108579 Result: Up-regulated in Transcription
  misc_feature: MA Experiment 108579 PARAMETER Experiment Name: At_4deg_Cold_cDNA_P Parameter: Temperature (deg C) Value: 4 vs. 22
  misc_feature: MA Experiment 108579 PARAMETER Experiment Name: At_4deg_Cold_cDNA_P Parameter: Timepoint (hr) Value: 6
  misc_feature: MA Experiment 108579 PARAMETER Experiment Name: At_4deg_Cold_cDNA_P Parameter: Tissue Value: Aerial
  misc_feature: MA Experiment ID: 108595 Result: Up-regulated in Transcription
  misc_feature: MA Experiment 108595 PARAMETER Experiment Name: At_Ler-pi_Ovule_cDNA_P Parameter: Plant Line Value: null
  misc_feature: MA Experiment ID: 20000069 Result: Down-regulated in Transcription
  misc_feature: MA Experiment 20000069 PARAMETER Experiment Name: At_100uM_ABA_Mutants_cDNA_P Parameter: Plant Line Value: CS23
  misc_feature: MA Experiment 20000069 PARAMETER Experiment Name: At_100uM_ABA_Mutants_cDNA_P Parameter: Timepoint (hr) Value: 6
  misc_feature: MA Experiment 20000069 PARAMETER Experiment Name: At_100uM_ABA_Mutants_cDNA_P Parameter: Tissue Value: Aerial
  misc_feature: MA Experiment 20000069 PARAMETER Experiment Name: At_100uM_ABA_Mutants_cDNA_P Parameter: Treatment Value: 100uM ABA vs. No Treatment
  misc_feature: MA Experiment ID: 20000070 Result: Down-regulated in Transcription
  misc_feature: MA Experiment 20000070 PARAMETER Experiment Name: At_100uM_ABA_Mutants_cDNA_P Parameter: Plant Line Value: CS24
  misc_feature: MA Experiment 20000070 PARAMETER Experiment Name: At_100uM_ABA_Mutants_cDNA_P Parameter: Timepoint (hr) Value: 6
  misc_feature: MA Experiment 20000070 PARAMETER Experiment Name: At_100uM_ABA_Mutants_cDNA_P Parameter: Tissue Value: Aerial
  misc_feature: MA Experiment 20000070 PARAMETER Experiment Name: At_100uM_ABA_Mutants_cDNA_P Parameter: Treatment Value: 100uM ABA vs. No Treatment
  misc_feature: MA Experiment ID: 20000071 Result: Down-regulated in Transcription
  misc_feature: MA Experiment 20000071 PARAMETER Experiment Name: At_100uM_ABA_Mutants_cDNA_P Parameter: Plant Line Value: CS8104
  misc_feature: MA Experiment 20000071 PARAMETER Experiment Name: At_100uM_ABA_Mutants_cDNA_P Parameter: Timepoint (hr) Value: 6
  misc_feature: MA Experiment 20000071 PARAMETER Experiment Name: At_100uM_ABA_Mutants_cDNA_P Parameter: Tissue Value: Aerial
  misc_feature: MA Experiment 20000071 PARAMETER Experiment Name: At_100uM_ABA_Mutants_cDNA_P Parameter: Treatment Value: 100uM ABA vs. No Treatment
  misc_feature: MA Experiment ID: 20000086 Result: Down-regulated in Transcription
  misc_feature: MA Experiment 20000086 PARAMETER Experiment Name: At_100uM_ABA_Mutants_cDNA_P Parameter: Plant Line Value: CS22
  misc_feature: MA Experiment 20000086 PARAMETER Experiment Name: At_100uM_ABA_Mutants_cDNA_P Parameter: Timepoint (hr) Value: 6
  misc_feature: MA Experiment 20000086 PARAMETER Experiment Name: At_100uM_ABA_Mutants_cDNA_P Parameter: Tissue Value: Aerial
  misc_feature: MA Experiment 20000086 PARAMETER Experiment Name: At_100uM_ABA_Mutants_cDNA_P Parameter: Treatment Value: 100uM ABA vs. No Treatment
  misc_feature: MA Experiment ID: 20000087 Result: Down-regulated in Transcription
  misc_feature: MA Experiment 20000087 PARAMETER Experiment Name: At_100uM_ABA_Mutants_cDNA_P Parameter: Plant Line Value: WS
  misc_feature: MA Experiment 20000087 PARAMETER Experiment Name: At_100uM_ABA_Mutants_cDNA_P Parameter: Timepoint (hr) Value: 6
  misc_feature: MA Experiment 20000087 PARAMETER Experiment Name: At_100uM_ABA_Mutants_cDNA_P Parameter: Tissue Value: Aerial
  misc_feature: MA Experiment 20000087 PARAMETER Experiment Name: At_100uM_ABA_Mutants_cDNA_P Parameter: Treatment Value: 100uM ABA vs. No Treatment
  misc_feature: MA Experiment ID: 20000088 Result: Down-regulated in Transcription
  misc_feature: MA Experiment 20000088 PARAMETER Experiment Name: At_100uM_ABA_Mutants_cDNA_P Parameter: Plant Line Value: Landsberg
  misc_feature: MA Experiment 20000088 PARAMETER Experiment Name: At_100uM_ABA_Mutants_cDNA_P Parameter: Timepoint (hr) Value: 6
  misc_feature: MA Experiment 20000088 PARAMETER Experiment Name: At_100uM_ABA_Mutants_cDNA_P Parameter: Tissue Value: Aerial
  misc_feature: MA Experiment 20000088 PARAMETER Experiment Name: At_100uM_ABA_Mutants_cDNA_P Parameter: Treatment Value: 100uM ABA vs. No Treatment
  misc_feature: MA Experiment ID: 20000089 Result: Down-regulated in Transcription
  misc_feature: MA Experiment ID: 20000090 Result: Down-regulated in Transcription
  misc_feature: MA Experiment ID: 20000117 Result: Down-regulated in Transcription
  misc_feature: MA Experiment 20000117 PARAMETER Experiment Name: At_100uM_ABA_Mutants_cDNA_P Parameter: Plant Line Value: Columbia
  misc_feature: MA Experiment 20000117 PARAMETER Experiment Name: At_100uM_ABA_Mutants_cDNA_P Parameter: Timepoint (hr) Value: 6
  misc_feature: MA Experiment 20000117 PARAMETER Experiment Name: At_100uM_ABA_Mutants_cDNA_P Parameter: Tissue Value: Aerial
  misc_feature: MA Experiment 20000117 PARAMETER Experiment Name: At_100uM_ABA_Mutants_cDNA_P Parameter: Treatment Value: 100uM ABA vs. No Treatment
  misc_feature: MA Experiment ID: 20000224 Result: Up-regulated in Transcription
  misc_feature: MA Experiment ID: 20000227 Result: Up-regulated in Transcription
  misc_feature: MA Experiment 20000227 PARAMETER Experiment Name: At_Root-Tips-vs-Tops_P Parameter: Tissue Value: Root Tips vs. Root Tops
  misc_feature: MA Experiment ID: 20000234 Result: Up-regulated in Transcription
  misc_feature: MA Experiment 20000234 PARAMETER Experiment Name: At_Siliques_P Parameter: Age (day) Value: 21
  misc_feature: MA Experiment 20000234 PARAMETER Experiment Name: At_Siliques_P Parameter: Organism Value: A. thaliana
  misc_feature: MA Experiment 20000234 PARAMETER Experiment Name: At_Siliques_P Parameter: Plant Line Value: WS
  misc_feature: MA Experiment 20000234 PARAMETER Experiment Name: At_Siliques_P Parameter: Tissue Value: Less Than 5mm Siliques vs. Whole Plant
  misc_feature: MA Experiment ID: 20000264 Result: Up-regulated in Transcription
  misc_feature: MA Experiment 20000264 PARAMETER Experiment Name: At_Open_Flower_P Parameter: Age (day) Value: 21
  misc_feature: MA Experiment 20000264 PARAMETER Experiment Name: At_Open_Flower_P Parameter: Plant Line Value: WS
  misc_feature: MA Experiment 20000264 PARAMETER Experiment Name: At_Open_Flower_P Parameter: Tissue Value: Open Flower vs. Whole Plant
  misc_feature: MA Experiment ID: 20000286 Result: Up-regulated in Transcription
  misc_feature: MA Experiment 20000286 PARAMETER Experiment Name: At_Open_Flower_P Parameter: Age (day) Value: 21
  misc_feature: MA Experiment 20000286 PARAMETER Experiment Name: At_Open_Flower_P Parameter: Plant Line Value: WS
  misc_feature: MA Experiment 20000286 PARAMETER Experiment Name: At_Open_Flower_P Parameter: Tissue Value: Half Open vs. Whole Plant
  misc_feature: MA Experiment ID: 20000437 Result: Down-regulated in Transcription
  misc_feature: MA Experiment 20000437 PARAMETER Experiment Name: At_Drought_P Parameter: Age (day) Value: 8
  misc_feature: MA Experiment 20000437 PARAMETER Experiment Name: At_Drought_P Parameter: Organism Value: A. thaliana
  misc_feature: MA Experiment 20000437 PARAMETER Experiment Name: At_Drought_P Parameter: Plant Line Value: WS
  misc_feature: MA Experiment 20000437 PARAMETER Experiment Name: At_Drought_P Parameter: Timepoint (hr) Value: 24
  misc_feature: MA Experiment 20000437 PARAMETER Experiment Name: At_Drought_P Parameter: Tissue Value: Whole Plant
  misc_feature: MA Experiment 20000437 PARAMETER Experiment Name: At_Drought_P Parameter: Treatment Value: Drought vs. No Drought
  misc_feature: MA Experiment ID: 20000438 Result: Up-regulated in Transcription
  misc_feature: MA Experiment 20000438 PARAMETER Experiment Name: At_Shoots__P Parameter: Age (day) Value: 14
  misc_feature: MA Experiment 20000438 PARAMETER Experiment Name: At_Shoots__P Parameter: Tissue Value: Shoots vs. Whole Plant
  misc_feature: MA Experiment ID: 20000451 Result: Down-regulated in Transcription
  misc_feature: MA Experiment 20000451 PARAMETER Experiment Name: At_CS6879_Shoots-Roots_P Parameter: Age (day) Value: 14
  misc_feature: MA Experiment 20000451 PARAMETER Experiment Name: At_CS6879_Shoots-Roots_P Parameter: Organism Value: A. thaliana
  misc_feature: MA Experiment 20000451 PARAMETER Experiment Name: At_CS6879_Shoots-Roots_P Parameter: Plant Line Value: CS6879 vs. WS
  misc_feature: MA Experiment 20000451 PARAMETER Experiment Name: At_CS6879_Shoots-Roots_P Parameter: Tissue Value: Roots
  misc_feature: MA Experiment ID: 20000495 Result: Up-regulated in Transcription
  misc_feature: MA Experiment 20000495 PARAMETER Experiment Name: At_Guard_Cells_P Parameter: Harvest Date Value: 8/2/2002
  misc_feature: MA Experiment 20000495 PARAMETER Experiment Name: At_Guard_Cells_P Parameter: Organism Value: A. thaliana
  misc_feature: MA Experiment 20000495 PARAMETER Experiment Name: At_Guard_Cells_P Parameter: Tissue Value: Guard Cells vs. Leaves
  misc_feature: MA Experiment ID: 20000576 Result: Up-regulated in Transcription
  misc_feature: MA Experiment 20000576 PARAMETER Experiment Name: At_100uM_ABA_Mutants__P Parameter: Organism Value: A. thaliana
  misc_feature: MA Experiment 20000576 PARAMETER Experiment Name: At_100uM_ABA_Mutants__P Parameter: Plant Line Value: CS23
  misc_feature: MA Experiment 20000576 PARAMETER Experiment Name: At_100uM_ABA_Mutants__P Parameter: Timepoint (hr) Value: 6
  misc_feature: MA Experiment 20000576 PARAMETER Experiment Name: At_100uM_ABA_Mutants__P Parameter: Tissue Value: Whole Plant
  misc_feature: MA Experiment 20000576 PARAMETER Experiment Name: At_100uM_ABA_Mutants__P Parameter: Treatment Value: 1uM ABA vs. No Treatment
  misc_feature: MA Experiment ID: 20000794 Result: Up-regulated in Transcription
  misc_feature: MA Experiment 20000794 PARAMETER Experiment Name: At_Petals_P Parameter: Age (day) Value: 23-25 days
  misc_feature: MA Experiment 20000794 PARAMETER Experiment Name: At_Petals_P Parameter: Plant Line Value: WS
  misc_feature: MA Experiment 20000794 PARAMETER Experiment Name: At_Petals_P Parameter: Tissue Value: Petals vs. Whole plant
  misc_feature: MA Experiment ID: 20001248 Result: Down-regulated in Transcription
  misc_feature: MA Experiment 20001248 PARAMETER Experiment Name: At_Far-red-induction_P Parameter: Age (day) Value: 7
  misc_feature: MA Experiment 20001248 PARAMETER Experiment Name: At_Far-red-induction_P Parameter: Light Value: Far-red vs. White
  misc_feature: MA Experiment 20001248 PARAMETER Experiment Name: At_Far-red-induction_P Parameter: Organism Value: A. thaliana
  misc_feature: MA Experiment 20001248 PARAMETER Experiment Name: At_Far-red-induction_P Parameter: Plant Line Value: Columbia
  misc_feature: MA Experiment 20001248 PARAMETER Experiment Name: At_Far-red-induction_P Parameter: Timepoint (hr) Value: 4
  misc_feature: MA Experiment 20001248 PARAMETER Experiment Name: At_Far-red-induction_P Parameter: Tissue Value: Whole Plant
  misc_feature: MA Experiment ID: 20001458 Result: Down-regulated in Transcription
  misc_feature: MA Experiment 20001458 PARAMETER Experiment Name: At_50mM_NH4NO3_L-to-H_P Parameter: Age (day) Value: Undefined
  misc_feature: MA Experiment 20001458 PARAMETER Experiment Name: At_50mM_NH4NO3_L-to-H_P Parameter: Organism Value: Undefined
  misc_feature: MA Experiment 20001458 PARAMETER Experiment Name: At_50mM_NH4NO3_L-to-H_P Parameter: Plant Line Value: Undefined
  misc_feature: MA Experiment 20001458 PARAMETER Experiment Name: At_50mM_NH4NO3_L-to-H_P Parameter: Timepoint (hr) Value: 2
  misc_feature: MA Experiment 20001458 PARAMETER Experiment Name: At_50mM_NH4NO3_L-to-H_P Parameter: Tissue Value: Siliques
  misc_feature: MA Experiment 20001458 PARAMETER Experiment Name: At_50mM_NH4NO3_L-to-H_P Parameter: Treatment Value: 50mM NH4NO3 vs. 100mM Manitol
  misc_feature: MA Experiment ID: 20001556 Result: Down-regulated in Transcription
  misc_feature: MA Experiment 20001556 PARAMETER Experiment Name: At_Drought_Soil_Dry_P Parameter: Age (day) Value: 26
  misc_feature: MA Experiment 20001556 PARAMETER Experiment Name: At_Drought_Soil_Dry_P Parameter: Organism Value: A. thaliana
  misc_feature: MA Experiment 20001556 PARAMETER Experiment Name: At_Drought_Soil_Dry_P Parameter: Plant Line Value: WS
  misc_feature: MA Experiment 20001556 PARAMETER Experiment Name: At_Drought_Soil_Dry_P Parameter: Post Timepoint (hr) Value: None
  misc_feature: MA Experiment 20001556 PARAMETER Experiment Name: At_Drought_Soil_Dry_P Parameter: Post-Treatment Value: None
  misc_feature: MA Experiment 20001556 PARAMETER Experiment Name: At_Drought_Soil_Dry_P Parameter: Timepoint (day) Value: 12
  misc_feature: MA Experiment 20001556 PARAMETER Experiment Name: At_Drought_Soil_Dry_P Parameter: Treatment Value: Drought vs. No Drought
  misc_feature: MA Experiment ID: 20001557 Result: Down-regulated in Transcription
  misc_feature: MA Experiment 20001557 PARAMETER Experiment Name: At_Drought_Soil_Dry_P Parameter: Age (day) Value: 27
  misc_feature: MA Experiment 20001557 PARAMETER Experiment Name: At_Drought_Soil_Dry_P Parameter: Organism Value: A. thaliana
  misc_feature: MA Experiment 20001557 PARAMETER Experiment Name: At_Drought_Soil_Dry_P Parameter: Plant Line Value: WS
  misc_feature: MA Experiment 20001557 PARAMETER Experiment Name: At_Drought_Soil_Dry_P Parameter: Post Timepoint (hr) Value: 3
  misc_feature: MA Experiment 20001557 PARAMETER Experiment Name: At_Drought_Soil_Dry_P Parameter: Post-Treatment Value: Re-Water vs. No Drought
  misc_feature: MA Experiment 20001557 PARAMETER Experiment Name: At_Drought_Soil_Dry_P Parameter: Timepoint (day) Value: 13
  misc_feature: MA Experiment 20001557 PARAMETER Experiment Name: At_Drought_Soil_Dry_P Parameter: Treatment Value: Drought vs. No Drought
  misc_feature: MA Experiment ID: 20001558 Result: Down-regulated in Transcription
  misc_feature: MA Experiment 20001558 PARAMETER Experiment Name: At_Drought_Soil_Dry_P Parameter: Age (day) Value: 27
  misc_feature: MA Experiment 20001558 PARAMETER Experiment Name: At_Drought_Soil_Dry_P Parameter: Organism Value: A. thaliana
  misc_feature: MA Experiment 20001558 PARAMETER Experiment Name: At_Drought_Soil_Dry_P Parameter: Plant Line Value: WS
  misc_feature: MA Experiment 20001558 PARAMETER Experiment Name: At_Drought_Soil_Dry_P Parameter: Post Timepoint (hr) Value: 6
  misc_feature: MA Experiment 20001558 PARAMETER Experiment Name: At_Drought_Soil_Dry_P Parameter: Post-Treatment Value: Re-Water vs. No Drought
  misc_feature: MA Experiment 20001558 PARAMETER Experiment Name: At_Drought_Soil_Dry_P Parameter: Timepoint (day) Value: 13
  misc_feature: MA Experiment 20001558 PARAMETER Experiment Name: At_Drought_Soil_Dry_P Parameter: Treatment Value: Drought vs. No Drought
  misc_feature: MA Experiment ID: 20001905 Result: Down-regulated in Transcription
  misc_feature: MA Experiment 20001905 PARAMETER Experiment Name: At_Drought_Reproduction_P Parameter: Age (day) Value: 40
  misc_feature: MA Experiment 20001905 PARAMETER Experiment Name: At_Drought_Reproduction_P Parameter: Organism Value: A. thaliana
  misc_feature: MA Experiment 20001905 PARAMETER Experiment Name: At_Drought_Reproduction_P Parameter: Plant Line Value: WS
  misc_feature: MA Experiment 20001905 PARAMETER Experiment Name: At_Drought_Reproduction_P Parameter: Timepoint (day) Value: 10
  misc_feature: MA Experiment 20001905 PARAMETER Experiment Name: At_Drought_Reproduction_P Parameter: Tissue Value: Rosettes
  misc_feature: MA Experiment 20001905 PARAMETER Experiment Name: At_Drought_Reproduction_P Parameter: Treatment Value: Drought vs. No Drought
  misc_feature: MA Experiment ID: 20001906 Result: Down-regulated in Transcription
  misc_feature: MA Experiment 20001906 PARAMETER Experiment Name: At_Drought_Reproduction_P Parameter: Age (day) Value: 35
  misc_feature: MA Experiment 20001906 PARAMETER Experiment Name: At_Drought_Reproduction_P Parameter: Organism Value: A. thaliana
  misc_feature: MA Experiment 20001906 PARAMETER Experiment Name: At_Drought_Reproduction_P Parameter: Plant Line Value: WS
  misc_feature: MA Experiment 20001906 PARAMETER Experiment Name: At_Drought_Reproduction_P Parameter: Timepoint (day) Value: 5
  misc_feature: MA Experiment 20001906 PARAMETER Experiment Name: At_Drought_Reproduction_P Parameter: Tissue Value: Siliques
  misc_feature: MA Experiment 20001906 PARAMETER Experiment Name: At_Drought_Reproduction_P Parameter: Treatment Value: Drought vs. No Drought
  misc_feature: MA Experiment ID: 20001907 Result: Down-regulated in Transcription
  misc_feature: MA Experiment 20001907 PARAMETER Experiment Name: At_Drought_Reproduction_P Parameter: Age (day) Value: 37
  misc_feature: MA Experiment 20001907 PARAMETER Experiment Name: At_Drought_Reproduction_P Parameter: Organism Value: A. thaliana
  misc_feature: MA Experiment 20001907 PARAMETER Experiment Name: At_Drought_Reproduction_P Parameter: Plant Line Value: WS
  misc_feature: MA Experiment 20001907 PARAMETER Experiment Name: At_Drought_Reproduction_P Parameter: Timepoint (day) Value: 7
  misc_feature: MA Experiment 20001907 PARAMETER Experiment Name: At_Drought_Reproduction_P Parameter: Tissue Value: Siliques
  misc_feature: MA Experiment 20001907 PARAMETER Experiment Name: At_Drought_Reproduction_P Parameter: Treatment Value: Drought vs. No Drought
atggatcatgaggaaattccatccacgccctcaacgccggcgacaaccccggggactccaggagcgccgctctttggaggattcgaagggaagaggaatggacacaatggtagatacacaccaaagtcacttctcaaaagctgcaaatgtttcagtgttgacaatgaatgggctcttgaagatggaagactccctccggtcacttgctctctccctccccctaacgtttccctctaccgcaagttgggagcagagtttgttgggacattgatcctgatattcgccggaacagcgacggcgatcgtgaaccagaagacagatggagctgagacgcttattggttgcgccgcctcggctggtttggcggttatgatcgttatattatcgaccggtcacatctccggggcacatctcaatccggctgtaaccattgcctttgctgctctcaaacacttcccttggaaacacgtgccggtgtatatcggagctcaggtgatggcctccgtgagtgcggcgtttgcactgaaagcagtgtttgaaccaacgatgagcggtggcgtgacggtgccgacggtgggtctcagccaagctttcgccttggaattcattatcagcttcaacctcatgttcgttgtcacagccgtagccaccgacacgagagctgtgggagagttggcgggaattgccgtaggagcaacggtcatgcttaacatacttatagctggacctgcaacttctgcttcgatgaaccctgtaagaacactgggtccagccattgcagcaaacaattacagagctatttgggtttacctcactgcccccattcttggagcgttaatcggagcaggtacatacacaattgtcaagttgccagaggaagatgaagcacccaaagagaggaggagcttcagaagatga

SEQ ID NO: 88736 - protein, 305 aa, Arabidopsis thaliana
  peptide (1)..(305): Ceres Seq. ID no. 12711932
  misc_feature (75)..(285): Pfam Name: Major intrinsic protein Pfam Description: Major intrinsic protein
  misc_feature (1)..(305): Homolog of NCBI NO: 15220826 NR Description: nodulin-like protein; protein id: At1g80760.1
  misc_feature (10)..(305): Homolog of NCBI NO: 15235034 NR Description: major intrinsic protein (MIP) - like; protein id:
  misc_feature (1)..(305): Homolog of NCBI NO: 13447791 NR Description: NOD26-like membrane integral protein ZmNIP3-1
  misc_feature (74)..(305): Homolog of NCBI NO: 37536006 NR Description: putative nodulin-26 [Oryza sativa (japonica
  misc_feature (62)..(295): Homolog of NCBI NO: 9971217 NR Description: MIP [Adiantum capillus-veneris]
  misc_feature (73)..(290): Homolog of NCBI NO: 28971941 NR Description: putative nodulin [Oryza sativa (japonica
  misc_feature (66)..(290): Homolog of NCBI NO: 37573042 NR Description: putative nodulin [Oryza sativa (japonica
  misc_feature (59)..(289): Homolog of NCBI NO: 15777893 NR Description: early embryogenesis aquaglyceroporin [Pinus taeda]
  misc_feature (75)..(289): Homolog of NCBI NO: 17025880 NR Description: multifunctional aquaporin [Medicago truncatula]
  misc_feature (77)..(293): Homolog of NCBI NO: 5139541 NR Description: nodulin26-like major intrinsic protein [Pisum
MDHEEIPSTPSTPATTPGTPGAPLFGGFEGKRNGHNGRYTPKSLLKSCKCFSVDNEWALEDGRLPPVTCSLPPPNVSLYRKLGAEFVGTLILIFAGTATAIVNQKTDGAETLIGCAASAGLAVMIVILSTGHISGAHLNPAVTIAFAALKHFPWKHVPVYIGAQVMASVSAAFALKAVFEPTMSGGVTVPTVGLSQAFALEFIISFNLMFVVTAVATDTRAVGELAGIAVGATVMLNILIAGPATSASMNPVRTLGPAIAANNYRAIWVYLTAPILGALIGAGTYTIVKLPEEDEAPKERRSFRR

SEQ ID NO: 88737 - protein, 182 aa, Arabidopsis thaliana
  peptide (1)..(182): Ceres Seq. ID no. 12711933
  misc_feature (1)..(162): Pfam Name: Major intrinsic protein Pfam Description: Major intrinsic protein
  misc_feature (1)..(182): Homolog of NCBI NO: 15220826 NR Description: nodulin-like protein; protein id: At1g80760.1
  misc_feature (1)..(182): Homolog of NCBI NO: 15235034 NR Description: major intrinsic protein (MIP) - like; protein id:
  misc_feature (1)..(182): Homolog of NCBI NO: 13447791 NR Description: NOD26-like membrane integral protein ZmNIP3-1
  misc_feature (1)..(182): Homolog of NCBI NO: 37536006 NR Description: putative nodulin-26 [Oryza sativa (japonica
  misc_feature (1)..(172): Homolog of NCBI NO: 9971217 NR Description: MIP [Adiantum capillus-veneris]
  misc_feature (1)..(167): Homolog of NCBI NO: 28971941 NR Description: putative nodulin [Oryza sativa (japonica
  misc_feature (1)..(167): Homolog of NCBI NO: 37573042 NR Description: putative nodulin [Oryza sativa (japonica
  misc_feature (1)..(166): Homolog of NCBI NO: 15777893 NR Description: early embryogenesis aquaglyceroporin [Pinus taeda]
  misc_feature (1)..(166): Homolog of NCBI NO: 17025880 NR Description: multifunctional aquaporin [Medicago truncatula]
  misc_feature (1)..(170): Homolog of NCBI NO: 5139541 NR Description: nodulin26-like major intrinsic protein [Pisum
MIVILSTGHISGAHLNPAVTIAFAALKHFPWKHVPVYIGAQVMASVSAAFALKAVFEPTMSGGVTVPTVGLSQAFALEFIISFNLMFVVTAVATDTRAVGELAGIAVGATVMLNILIAGPATSASMNPVRTLGPAIAANNYRAIWVYLTAPILGALIGAGTYTIVKLPEEDEAPKERRSFRR

SEQ ID NO: 88738 - DNA, 1734 bp, Arabidopsis thaliana
  misc_feature (1)..(1734): Ceres Seq. ID no. 12712097
  misc_feature: MA Experiment ID: 20000328 Result: Down-regulated in Transcription
  misc_feature: MA Experiment 20000328 PARAMETER Experiment Name: At_42deg_Heat_Sub_P Parameter: Age (day) Value: 14
  misc_feature: MA Experiment 20000328 PARAMETER Experiment Name: At_42deg_Heat_Sub_P Parameter: Organism Value: A. thaliana
  misc_feature: MA Experiment 20000328 PARAMETER Experiment Name: At_42deg_Heat_Sub_P Parameter: Plant Line Value: WS
  misc_feature: MA Experiment 20000328 PARAMETER Experiment Name: At_42deg_Heat_Sub_P Parameter: Temperature (deg C) Value: 42 vs. 22
  misc_feature: MA Experiment 20000328 PARAMETER Experiment Name: At_42deg_Heat_Sub_P Parameter: Timepoint (hr) Value: 6
  misc_feature: MA Experiment 20000328 PARAMETER Experiment Name: At_42deg_Heat_Sub_P Parameter: Tissue Value: Aerial
atgctagcgaagaatcggctgccgggaagcggccacactactccgtctcctccggcatctcctcgccgttctcctcgttatcgtcacggtcggtctaaagccgccgccggtagtagatttcctacggttcaaccaagtcggaccctcgctcatcgcctctcgtggatcctcttatcggttcttctccgtcgtcaggggattttcttattcgctcctctaatctatatctcttgtatgctgctttacatgggaaccgtctccttcgacgttgttccaatcattcagcgtcgacctcctccaggatccgtttacaaaagccctcaggtttacgccaagctccgtcctgagatggacgccgataattccaccgctgatgccataacaaccatctggaaacattcctataaaggtggtgaatggaagccgtacgtgaacaagtctactggagacttgcctgagtcaaacggttacatatatgttgaggcaaatggaggcttgaatcagcagcggacatcgatatgcaatgcggttgctgtggcaggatatcttaatgcaactctagtaattcccaactttcactatcacagcatatggagagatccaagattgctttctgacagaggtttttctttcagtaaatttggggacatctacgatgaagagttctttgtcagtaccttatcaaatgatgtgcgggtggttgatacaattcctgaatatctaatggagcgttttgaccataacatgacaaatgtctataacttcagagttaaagcatggtcacctattcaatattatcgagactcgatcttgccgaaacttcttgaggagaagattatacgaatatctccatttgcaaatagactttcttttgatgctcctcaagctgtccagagacttagatgtttggcgaattacgaagccctgaagttttcgaaaaccatactaaccctaggagaaacactggtgaagagaatgaaagagcaaagtgcaaaccacggtgcaaaatacgtgtctgtacatctgcgttttgaagaggacatggtagctttctcctgttgcatatttgatggtgggaaccaagaaaaacaagatatgattgcagcaagagaacgaggatggaaaggaaagttcacaaaaccaggccgtgttatacgacctggtgctatcaggcaaaacggaaaatgccctttaactcctttagaggtgggtttaatgcttagaggaatggggttcaacaaaagcacatatattttcctcgcgtctggtgaaatatatgatgcgaatcgaactatggccccgctactagagatgttcccaaatttacaaactaaggagatgcttgcatcagaggaggaacttgctccatataagaatttctcttccagaatggctgcaatagattacacggtctgtctccacagtgaggtatttgtgaccacgcaaggtggaaactttcctcatttcctcatgggtcatcggagatatatgtttggaggacattccaagaccattagaccagacaagcgaaagttagcaatcctctttgacaatccaaacatcggatggcggagttttaaacgtcagatgctaaacatgaggtctcatagtgactcaaaggggtttgagctaaaacgacctaatgactccatttacacattcccttgccctgactgcatgtcccgtaggaacaaaacaacaaccccagaatcgagaccacctcctgccacctga

SEQ ID NO: 88739 - protein, 577 aa, Arabidopsis thaliana
  peptide (1)..(577): Ceres Seq. ID no. 12712098
  misc_feature (159)..(526): Pfam Name: Plant protein family Pfam Description: Plant protein family
  misc_feature (1)..(577): Homolog of NCBI NO: 15226282 NR Description: similar to axi 1 protein from Nicotiana tabacum; id: At2g01480.1, supported by cDNA: gi_20260419 [Arabidopsis >gi|25410909|pir||C84425 similar to axi 1 protein from Nicotiana
  misc_feature (20)..(567): Homolog of NCBI NO: 15221017 NR Description: auxin-independent growth promoter, putative;
  misc_feature (79)..(567): Homolog of NCBI NO: 8778220 NR Description: F10B6.36 [Arabidopsis thaliana]
  misc_feature (9)..(571): Homolog of NCBI NO: 34908166 NR Description: axi 1-like protein [Oryza sativa (japonica
  misc_feature (15)..(576): Homolog of NCBI NO: 18399706 NR Description: growth regulator, putative; protein id: supported by cDNA: gi_15293042 [Arabidopsis thaliana]
  misc_feature (17)..(576): Homolog of NCBI NO: 15293043 NR Description: putative growth regulator protein [Arabidopsis
  misc_feature (15)..(204): Homolog of NCBI NO: 25403440 NR Description: protein F15O4.45 [imported] - Arabidopsis >gi|8778357|gb|AAF79365.1|AC007887_24 F15O4.45 [Arabidopsis
  misc_feature (403)..(576): Homolog of NCBI NO: 25403440 NR Description: protein F15O4.45 [imported] - Arabidopsis >gi|8778357|gb|AAF79365.1|AC007887_24 F15O4.45 [Arabidopsis
  misc_feature (238)..(405): Homolog of NCBI NO: 25403440 NR Description: protein F15O4.45 [imported] - Arabidopsis >gi|8778357|gb|AAF79365.1|AC007887_24 F15O4.45 [Arabidopsis
  misc_feature (41)..(559): Homolog of NCBI NO: 22329977 NR Description: similar to growth regulator, putative; protein At1g38131.1 [Arabidopsis thaliana] >gi|27311577|gb|AAO00754.1|
MLAKNRLPGSGHTTPSPPASPRRSPRYRHGRSKAAAGSRFPTVQPSRTLAHRLSWILLSVLLRRQGIFLFAPLIYISCMLLYMGTVSFDVVPIIQRRPPPGSVYKSPQVYAKLRPEMDADNSTADAITTIWKHSYKGGEWKPYVNKSTGDLPESNGYIYVEANGGLNQQRTSICNAVAVAGYLNATLVIPNFHYHSIWRDPRLLSDRGFSFSKFGDIYDEEFFVSTLSNDVRVVDTIPEYLMERFDHNMTNVYNFRVKAWSPIQYYRDSILPKLLEEKIIRISPFANRLSFDAPQAVQRLRCLANYEALKFSKTILTLGETLVKRMKEQSANHGAKYVSVHLRFEEDMVAFSCCIFDGGNQEKQDMIAARERGWKGKFTKPGRVIRPGAIRQNGKCPLTPLEVGLMLRGMGFNKSTYIFLASGEIYDANRTMAPLLEMFPNLQTKEMLASEEELAPYKNFSSRMAAIDYTVCLHSEVFVTTQGGNFPHFLMGHRRYMFGGHSKTIRPDKRKLAILFDNPNIGWRSFKRQMLNMRSHSDSKGFELKRPNDSIYTFPCPDCMSRRNKTTTPESRPPPAT

SEQ ID NO: 88740 - protein, 499 aa, Arabidopsis thaliana
  peptide (1)..(499): Ceres Seq. ID no. 12712099
  misc_feature (81)..(448): Pfam Name: Plant protein family Pfam Description: Plant protein family
  misc_feature (1)..(499): Homolog of NCBI NO: 15226282 NR Description: similar to axi 1 protein from Nicotiana tabacum; id: At2g01480.1, supported by cDNA: gi_20260419 [Arabidopsis >gi|25410909|pir||C84425 similar to axi 1 protein from Nicotiana
  misc_feature (1)..(489): Homolog of NCBI NO: 15221017 NR Description: auxin-independent growth promoter, putative;
  misc_feature (1)..(489): Homolog of NCBI NO: 8778220 NR Description: F10B6.36 [Arabidopsis thaliana]
  misc_feature (1)..(493): Homolog of NCBI NO: 34908166 NR Description: axi 1-like protein [Oryza sativa (japonica
  misc_feature (1)..(498): Homolog of NCBI NO: 18399706 NR Description: growth regulator, putative; protein id: supported by cDNA: gi_15293042 [Arabidopsis thaliana]
  misc_feature (1)..(498): Homolog of NCBI NO: 15293043 NR Description: putative growth regulator protein [Arabidopsis
  misc_feature (1)..(126): Homolog of NCBI NO: 25403440 NR Description: protein F15O4.45 [imported] - Arabidopsis >gi|8778357|gb|AAF79365.1|AC007887_24 F15O4.45 [Arabidopsis
  misc_feature (325)..(498): Homolog of NCBI NO: 25403440 NR Description: protein F15O4.45 [imported] - Arabidopsis >gi|8778357|gb|AAF79365.1|AC007887_24 F15O4.45 [Arabidopsis
  misc_feature (160)..(327): Homolog of NCBI NO: 25403440 NR Description: protein F15O4.45 [imported] - Arabidopsis >gi|8778357|gb|AAF79365.1|AC007887_24 F15O4.45 [Arabidopsis
  misc_feature (1)..(481): Homolog of NCBI NO: 22329977 NR Description: similar to growth regulator, putative; protein At1g38131.1 [Arabidopsis thaliana] >gi|27311577|gb|AAO00754.1|
MLLYMGTVSFDVVPIIQRRPPPGSVYKSPQVYAKLRPEMDADNSTADAITTIWKHSYKGGEWKPYVNKSTGDLPESNGYIYVEANGGLNQQRTSICNAVAVAGYLNATLVIPNFHYHSIWRDPRLLSDRGFSFSKFGDIYDEEFFVSTLSNDVRVVDTIPEYLMERFDHNMTNVYNFRVKAWSPIQYYRDSILPKLLEEKIIRISPFANRLSFDAPQAVQRLRCLANYEALKFSKTILTLGETLVKRMKEQSANHGAKYVSVHLRFEEDMVAFSCCIFDGGNQEKQDMIAARERGWKGKFTKPGRVIRPGAIRQNGKCPLTPLEVGLMLRGMGFNKSTYIFLASGEIYDANRTMAPLLEMFPNLQTKEMLASEEELAPYKNFSSRMAAIDYTVCLHSEVFVTTQGGNFPHFLMGHRRYMFGGHSKTIRPDKRKLAILFDNPNIGWRSFKRQMLNMRSHSDSKGFELKRPNDSIYTFPCPDCMSRRNKTTTPESRPPPAT

SEQ ID NO: 88741 - protein, 495 aa, Arabidopsis thaliana
  peptide (1)..(495): Ceres Seq. ID no. 12712100
  misc_feature (77)..(444): Pfam Name: Plant protein family Pfam Description: Plant protein family
  misc_feature (1)..(495): Homolog of NCBI NO: 15226282 NR Description: similar to axi 1 protein from Nicotiana tabacum; id: At2g01480.1, supported by cDNA: gi_20260419 [Arabidopsis >gi|25410909|pir||C84425 similar to axi 1 protein from Nicotiana
  misc_feature (1)..(485): Homolog of NCBI NO: 15221017 NR Description: auxin-independent growth promoter, putative;
  misc_feature (1)..(485): Homolog of NCBI NO: 8778220 NR Description: F10B6.36 [Arabidopsis thaliana]
  misc_feature (1)..(489): Homolog of NCBI NO: 34908166 NR Description: axi 1-like protein [Oryza sativa (japonica
  misc_feature (1)..(494): Homolog of NCBI NO: 18399706 NR Description: growth regulator, putative; protein id: supported by cDNA: gi_15293042 [Arabidopsis thaliana]
  misc_feature (1)..(494): Homolog of NCBI NO: 15293043 NR Description: putative growth regulator protein [Arabidopsis
  misc_feature (1)..(122): Homolog of NCBI NO: 25403440 NR Description: protein F15O4.45 [imported] - Arabidopsis >gi|8778357|gb|AAF79365.1|AC007887_24 F15O4.45 [Arabidopsis
  misc_feature (321)..(494): Homolog of NCBI NO: 25403440 NR Description: protein F15O4.45 [imported] - Arabidopsis >gi|8778357|gb|AAF79365.1|AC007887_24 F15O4.45 [Arabidopsis
  misc_feature (156)..(323): Homolog of NCBI NO: 25403440 NR Description: protein F15O4.45 [imported] - Arabidopsis >gi|8778357|gb|AAF79365.1|AC007887_24 F15O4.45 [Arabidopsis
  misc_feature (1)..(477): Homolog of NCBI NO: 22329977 NR Description: similar to growth regulator, putative; protein At1g38131.1 [Arabidopsis thaliana] >gi|27311577|gb|AAO00754.1|
MGTVSFDVVPIIQRRPPPGSVYKSPQVYAKLRPEMDADNSTADAITTIWKHSYKGGEWKPYVNKSTGDLPESNGYIYVEANGGLNQQRTSICNAVAVAGYLNATLVIPNFHYHSIWRDPRLLSDRGFSFSKFGDIYDEEFFVSTLSNDVRVVDTIPEYLMERFDHNMTNVYNFRVKAWSPIQYYRDSILPKLLEEKIIRISPFANRLSFDAPQAVQRLRCLANYEALKFSKTILTLGETLVKRMKEQSANHGAKYVSVHLRFEEDMVAFSCCIFDGGNQEKQDMIAARERGWKGKFTKPGRVIRPGAIRQNGKCPLTPLEVGLMLRGMGFNKSTYIFLASGEIYDANRTMAPLLEMFPNLQTKEMLASEEELAPYKNFSSRMAAIDYTVCLHSEVFVTTQGGNFPHFLMGHRRYMFGGHSKTIRPDKRKLAILFDNPNIGWRSFKRQMLNMRSHSDSKGFELKRPNDSIYTFPCPDCMSRRNKTTTPESRPPPAT

SEQ ID NO: 88742 - DNA, 1202 bp, Arabidopsis thaliana
  misc_feature (1)..(1202): Ceres Seq. ID no. 12712124
  misc_feature: MA Experiment ID: 108434 Result: Down-regulated in Transcription
  misc_feature: MA Experiment 108434 PARAMETER Experiment Name: At_Root_Tips_cDNA_P Parameter: Tissue Value: Root Tips
  misc_feature: MA Experiment ID: 108462 Result: Up-regulated in Transcription
  misc_feature: MA Experiment 108462 PARAMETER Experiment Name: At_Germinating_Seeds_cDNA_P Parameter: Age (day) Value: 2 vs. 0
  misc_feature: MA Experiment 108462 PARAMETER Experiment Name: At_Germinating_Seeds_cDNA_P Parameter: Tissue Value: Germinating Seeds
  misc_feature: MA Experiment ID: 108463 Result: Up-regulated in Transcription
  misc_feature: MA Experiment 108463 PARAMETER Experiment Name: At_Germinating_Seeds_cDNA_P Parameter: Age (day) Value: 3 vs. 0
  misc_feature: MA Experiment 108463 PARAMETER Experiment Name: At_Germinating_Seeds_cDNA_P Parameter: Tissue Value: Germinating Seeds
  misc_feature: MA Experiment ID: 108464 Result: Up-regulated in Transcription
  misc_feature: MA Experiment 108464 PARAMETER Experiment Name: At_Germinating_Seeds_cDNA_P Parameter: Age (day) Value: 4 vs. 0
  misc_feature: MA Experiment 108464 PARAMETER Experiment Name: At_Germinating_Seeds_cDNA_P Parameter: Tissue Value: Germinating Seeds
  misc_feature: MA Experiment ID: 108488 Result: Down-regulated in Transcription
  misc_feature: MA Experiment ID: 108573 Result: Down-regulated in Transcription
  misc_feature: MA Experiment 108573 PARAMETER Experiment Name: At_Drought_cDNA_P Parameter: Timepoint (hr) Value: 6
  misc_feature: MA Experiment 108573 PARAMETER Experiment Name: At_Drought_cDNA_P Parameter: Tissue Value: Aerial
  misc_feature: MA Experiment 108573 PARAMETER Experiment Name: At_Drought_cDNA_P Parameter: Treatment Value: Drought vs. No Drought
  misc_feature: MA Experiment ID: 108577 Result: Down-regulated in Transcription
  misc_feature: MA Experiment 108577 PARAMETER Experiment Name: At_42deg_Heat_cDNA_P Parameter: Temperature (deg C) Value: 42 vs. 22
  misc_feature: MA Experiment 108577 PARAMETER Experiment Name: At_42deg_Heat_cDNA_P Parameter: Timepoint (hr) Value: 6
  misc_feature: MA Experiment 108577 PARAMETER Experiment Name: At_42deg_Heat_cDNA_P Parameter: Tissue Value: Aerial
  misc_feature: MA Experiment ID: 108668 Result: Up-regulated in Transcription
  misc_feature: MA Experiment 108668 PARAMETER Experiment Name: At_2mM_SA_cDNA_P Parameter: Plant Line Value: WS
  misc_feature: MA Experiment 108668 PARAMETER Experiment Name: At_2mM_SA_cDNA_P Parameter: Timepoint (hr) Value: 6
  misc_feature: MA Experiment 108668 PARAMETER Experiment Name: At_2mM_SA_cDNA_P Parameter: Treatment Value: 2mM SA vs. No Treatment
  misc_feature: MA Experiment ID: 20000087 Result: Down-regulated in Transcription
  misc_feature: MA Experiment 20000087 PARAMETER Experiment Name: At_100uM_ABA_Mutants_cDNA_P Parameter: Plant Line Value: WS
  misc_feature: MA Experiment 20000087 PARAMETER Experiment Name: At_100uM_ABA_Mutants_cDNA_P Parameter: Timepoint (hr) Value: 6
  misc_feature: MA Experiment 20000087 PARAMETER Experiment Name: At_100uM_ABA_Mutants_cDNA_P Parameter: Tissue Value: Aerial
  misc_feature: MA Experiment 20000087 PARAMETER Experiment Name: At_100uM_ABA_Mutants_cDNA_P Parameter: Treatment Value: 100uM ABA vs. No Treatment
  misc_feature: MA Experiment ID: 20000093 Result: Down-regulated in Transcription
  misc_feature: MA Experiment 20000093 PARAMETER Experiment Name: At_42deg_Heat_cDNA_P Parameter: Temperature (deg C) Value: 42 vs. 22
  misc_feature: MA Experiment 20000093 PARAMETER Experiment Name: At_42deg_Heat_cDNA_P Parameter: Timepoint (hr) Value: 0.5
  misc_feature: MA Experiment 20000093 PARAMETER Experiment Name: At_42deg_Heat_cDNA_P Parameter: Tissue Value: Aerial
  misc_feature: MA Experiment ID: 20000111 Result: Down-regulated in Transcription
  misc_feature: MA Experiment 20000111 PARAMETER Experiment Name: At_42deg_Heat_cDNA_P Parameter: Temperature (deg C) Value: 42 vs. 22
  misc_feature: MA Experiment 20000111 PARAMETER Experiment Name: At_42deg_Heat_cDNA_P Parameter: Timepoint (hr) Value: 6
  misc_feature: MA Experiment 20000111 PARAMETER Experiment Name: At_42deg_Heat_cDNA_P Parameter: Tissue Value: Aerial
  misc_feature: MA Experiment ID: 20000113 Result: Down-regulated in Transcription
  misc_feature: MA Experiment 20000113 PARAMETER Experiment Name: At_42deg_Heat_cDNA_P Parameter: Temperature (deg C) Value: 42 vs. 22
  misc_feature: MA Experiment 20000113 PARAMETER Experiment Name: At_42deg_Heat_cDNA_P Parameter: Timepoint (hr) Value: 8
  misc_feature: MA Experiment 20000113 PARAMETER Experiment Name: At_42deg_Heat_cDNA_P Parameter: Tissue Value: Aerial
  misc_feature: MA Experiment ID: 20000144 Result: Down-regulated in Transcription
  misc_feature: MA Experiment 20000144 PARAMETER Experiment Name: At_42deg_Heat_cDNA_P Parameter: Temperature (deg C) Value: 42 vs. 22
  misc_feature: MA Experiment 20000144 PARAMETER Experiment Name: At_42deg_Heat_cDNA_P Parameter: Timepoint (hr) Value: 1
  misc_feature: MA Experiment 20000144 PARAMETER Experiment Name: At_42deg_Heat_cDNA_P Parameter: Tissue Value: Aerial
  misc_feature: MA Experiment ID: 20000171 Result: Down-regulated in Transcription
  misc_feature: MA Experiment 20000171 PARAMETER Experiment Name: At_42deg_Heat_P Parameter: Age (day) Value: 14
  misc_feature: MA Experiment 20000171 PARAMETER Experiment Name: At_42deg_Heat_P Parameter: Organism Value: A. thaliana
  misc_feature: MA Experiment 20000171 PARAMETER Experiment Name: At_42deg_Heat_P Parameter: Plant Line Value: WS
  misc_feature: MA Experiment 20000171 PARAMETER Experiment Name: At_42deg_Heat_P Parameter: Temperature (deg C) Value: 42 vs. 22
  misc_feature: MA Experiment 20000171 PARAMETER Experiment Name: At_42deg_Heat_P Parameter: Timepoint (hr) Value: 1
  misc_feature: MA Experiment 20000171 PARAMETER Experiment Name: At_42deg_Heat_P Parameter: Tissue Value: Aerial
  misc_feature: MA Experiment ID: 20000173 Result: Down-regulated in Transcription
  misc_feature: MA Experiment 20000173 PARAMETER Experiment Name: At_42deg_Heat_P Parameter: Age (day) Value: 14
  misc_feature: MA Experiment 20000173 PARAMETER Experiment Name: At_42deg_Heat_P Parameter: Organism Value: A. thaliana
  misc_feature: MA Experiment 20000173 PARAMETER Experiment Name: At_42deg_Heat_P Parameter: Plant Line Value: WS
  misc_feature: MA Experiment 20000173 PARAMETER Experiment Name: At_42deg_Heat_P Parameter: Temperature (deg C) Value: 42 vs. 22
  misc_feature: MA Experiment 20000173 PARAMETER Experiment Name: At_42deg_Heat_P Parameter: Timepoint (hr) Value: 6
  misc_feature: MA Experiment 20000173 PARAMETER Experiment Name: At_42deg_Heat_P Parameter: Tissue Value: Aerial
  misc_feature: MA Experiment ID: 20000179 Result: Up-regulated in Transcription
  misc_feature: MA Experiment 20000179 PARAMETER Experiment Name: At_Germinating_Seeds_P Parameter: Age (hr) Value: 6 vs. 0
  misc_feature: MA Experiment 20000179 PARAMETER Experiment Name: At_Germinating_Seeds_P Parameter: Tissue Value: Germinating Seeds
  misc_feature: MA Experiment ID: 20000182 Result: Up-regulated in Transcription
  misc_feature: MA Experiment 20000182 PARAMETER Experiment Name: At_2mM_SA_P Parameter: Age (day) Value: 14
  misc_feature: MA Experiment 20000182 PARAMETER Experiment Name: At_2mM_SA_P Parameter: Organism Value: A. thaliana
  misc_feature: MA Experiment 20000182 PARAMETER Experiment Name: At_2mM_SA_P Parameter: Plant Line Value: WS
  misc_feature: MA Experiment 20000182 PARAMETER Experiment Name: At_2mM_SA_P Parameter: Timepoint (hr) Value: 6
  misc_feature: MA Experiment 20000182 PARAMETER Experiment Name: At_2mM_SA_P Parameter: Tissue Value: Aerial
  misc_feature: MA Experiment 20000182 PARAMETER Experiment Name: At_2mM_SA_P Parameter: Treatment Value: 2mM SA vs. No Treatment
  misc_feature: MA Experiment ID: 20000184 Result: Down-regulated in Transcription
  misc_feature: MA Experiment 20000184 PARAMETER Experiment Name: At_Shoots__P Parameter: Age (day) Value: 7
  misc_feature: MA Experiment 20000184 PARAMETER Experiment Name: At_Shoots__P Parameter: Tissue Value: Shoots vs. Whole Plant
  misc_feature: MA Experiment ID: 20000185 Result: Down-regulated in Transcription
  misc_feature: MA Experiment 20000185 PARAMETER Experiment Name: At_Roots__P Parameter: Age (day) Value: 7 vs. 21
  misc_feature: MA Experiment 20000185 PARAMETER Experiment Name: At_Roots__P Parameter: Organism Value: A. thaliana
  misc_feature: MA Experiment 20000185 PARAMETER Experiment Name: At_Roots__P Parameter: Tissue Value: Roots vs. Whole Plant
  misc_feature: MA Experiment ID: 20000227 Result: Down-regulated in Transcription
  misc_feature: MA Experiment 20000227 PARAMETER Experiment Name: At_Root-Tips-vs-Tops_P Parameter: Tissue Value: Root Tips vs. Root Tops
  misc_feature: MA Experiment ID: 20000234 Result: Down-regulated in Transcription
  misc_feature: MA Experiment 20000234 PARAMETER Experiment Name: At_Siliques_P Parameter: Age (day) Value: 21
  misc_feature: MA Experiment 20000234 PARAMETER Experiment Name: At_Siliques_P Parameter: Organism Value: A. thaliana
  misc_feature: MA Experiment 20000234 PARAMETER Experiment Name: At_Siliques_P Parameter: Plant Line Value: WS
  misc_feature: MA Experiment 20000234 PARAMETER Experiment Name: At_Siliques_P Parameter: Tissue Value: Less Than 5mm Siliques vs. Whole Plant
  misc_feature: MA Experiment ID: 20000264 Result: Down-regulated in Transcription
  misc_feature: MA Experiment 20000264 PARAMETER Experiment Name: At_Open_Flower_P Parameter: Age (day) Value: 21
  misc_feature: MA Experiment 20000264 PARAMETER Experiment Name: At_Open_Flower_P Parameter: Plant Line Value: WS
  misc_feature: MA Experiment 20000264 PARAMETER Experiment Name: At_Open_Flower_P Parameter: Tissue Value: Open Flower vs. Whole Plant
  misc_feature: MA Experiment ID: 20000265 Result: Down-regulated in Transcription
  misc_feature: MA Experiment 20000265 PARAMETER Experiment Name: At_Open_Flower_P Parameter: Age (day) Value: 21
  misc_feature: MA Experiment 20000265 PARAMETER Experiment Name: At_Open_Flower_P Parameter: Plant Line Value: WS
  misc_feature: MA Experiment 20000265 PARAMETER Experiment Name: At_Open_Flower_P Parameter: Tissue Value: Closed Flower vs. Whole Plant
  misc_feature: MA Experiment ID: 20000286 Result: Down-regulated in Transcription
  misc_feature: MA Experiment 20000286 PARAMETER Experiment Name: At_Open_Flower_P Parameter: Age (day) Value: 21
  misc_feature: MA Experiment 20000286 PARAMETER Experiment Name: At_Open_Flower_P Parameter: Plant Line Value: WS
  misc_feature: MA Experiment 20000286 PARAMETER Experiment Name: At_Open_Flower_P Parameter: Tissue Value: Half Open vs. Whole Plant
  misc_feature: MA Experiment ID: 20000437 Result: Down-regulated in Transcription
  misc_feature: MA Experiment 20000437 PARAMETER Experiment Name: At_Drought_P Parameter: Age (day) Value: 8
  misc_feature: MA Experiment 20000437 PARAMETER Experiment Name: At_Drought_P Parameter: Organism Value: A. thaliana
  misc_feature: MA Experiment 20000437 PARAMETER Experiment Name: At_Drought_P Parameter: Plant Line Value: WS
  misc_feature: MA Experiment 20000437 PARAMETER Experiment Name: At_Drought_P Parameter: Timepoint (hr) Value: 24
  misc_feature: MA Experiment 20000437 PARAMETER Experiment Name: At_Drought_P Parameter: Tissue Value: Whole Plant
  misc_feature: MA Experiment 20000437 PARAMETER Experiment Name: At_Drought_P Parameter: Treatment Value: Drought vs. No Drought
  misc_feature: MA Experiment ID: 20000495 Result: Down-regulated in Transcription
  misc_feature: MA Experiment 20000495 PARAMETER Experiment Name: At_Guard_Cells_P Parameter: Harvest Date Value: 8/2/2002
  misc_feature: MA Experiment 20000495 PARAMETER Experiment Name: At_Guard_Cells_P Parameter: Organism Value: A. thaliana
  misc_feature: MA Experiment 20000495 PARAMETER Experiment Name: At_Guard_Cells_P Parameter: Tissue Value: Guard Cells vs. Leaves
  misc_feature: MA Experiment ID: 20000709 Result: Down-regulated in Transcription
  misc_feature: MA Experiment 20000709 PARAMETER Experiment Name: At_15mM_NH4NO3_L-to-H_P Parameter: Age (hr) Value: 14
  misc_feature: MA Experiment 20000709 PARAMETER Experiment Name: At_15mM_NH4NO3_L-to-H_P Parameter: Organism Value: A. thaliana
  misc_feature: MA Experiment 20000709 PARAMETER Experiment Name: At_15mM_NH4NO3_L-to-H_P Parameter: Plant Line Value: WS
  misc_feature: MA Experiment 20000709 PARAMETER Experiment Name: At_15mM_NH4NO3_L-to-H_P Parameter: Timepoint (hr) Value: 4
  misc_feature: MA Experiment 20000709 PARAMETER Experiment Name: At_15mM_NH4NO3_L-to-H_P Parameter: Tissue Value: Aerial
  misc_feature: MA Experiment 20000709 PARAMETER Experiment Name: At_15mM_NH4NO3_L-to-H_P Parameter: Treatment Value: 15mM NH4NO3 vs. 30mM Mannitol
  misc_feature: MA Experiment ID: 20000794 Result: Down-regulated in Transcription
  misc_feature: MA Experiment 20000794 PARAMETER Experiment Name: At_Petals_P Parameter: Age (day) Value: 23-25 days
  misc_feature: MA Experiment 20000794 PARAMETER Experiment Name: At_Petals_P Parameter: Plant Line Value: WS
  misc_feature: MA Experiment 20000794 PARAMETER Experiment Name: At_Petals_P Parameter: Tissue Value: Petals vs. Whole plant
  misc_feature: MA Experiment ID: 20001905 Result: Down-regulated in Transcription
  misc_feature: MA Experiment 20001905 PARAMETER Experiment Name: At_Drought_Reproduction_P Parameter: Age (day) Value: 40
  misc_feature: MA Experiment 20001905 PARAMETER Experiment Name: At_Drought_Reproduction_P Parameter: Organism Value: A. thaliana
  misc_feature: MA Experiment 20001905 PARAMETER Experiment Name: At_Drought_Reproduction_P Parameter: Plant Line Value: WS
  misc_feature: MA Experiment 20001905 PARAMETER Experiment Name: At_Drought_Reproduction_P Parameter: Timepoint (day) Value: 10
  misc_feature: MA Experiment 20001905 PARAMETER Experiment Name: At_Drought_Reproduction_P Parameter: Tissue Value: Rosettes
  misc_feature: MA Experiment 20001905 PARAMETER Experiment Name: At_Drought_Reproduction_P Parameter: Treatment Value: Drought vs. No Drought
acaacgctttttgtctcatctccttcttcttctccttctcaaatcttttttttcaggcgtaacgaatcgaatcataaacacttacgcagaaacaaaaactaaactttggatcttttaaccgaccatagagattcgtgggttcttcttagtttcgacagattcttgatccgttttagttgttacgctcatctttgcttttatacatcagacccttctcttctcttccttctttatctaagaaacattagggttctttgaaatcttgctaaaaaaaatgggtgttgagaaaatggtgtgtttagcttctcgtacgggtcgtcagtttcagagatacaacaaaggtcgtcgtcaagtcgttggatgtgttccttacagattcaagctatctaatgatggtaaaataagtgatgaagtagaagttcttgttatctcttcccaaaaaggccacgccttaatgttccccaagggtggttgggagcttgatgaatctgtagaagaagctgcatcaagagaatgtcttgaagaagctggagttcttggcaacgttgagcaccaacttggaaaatgggattttttaagcaaaagcagaggaacatactatgaaggactaatgttccctatgcttgttacagaacaacttgagctttggcctgaacaacatgttaggcaaagaatctggatgaatgtaaccgaagcaagagaagcttgtagagattggtggatgaaagaagcattagatgttttggttgagagactttcatcaccaatgaatcaaccaaaggaagagaagactatgtcaatctctattgaaacaatgtgttgatgatgaagctgatgattgctaaattgctgattgttgatgggagtttttatgagctaatatggatctctgtaggtattaaatagatgggtctcaattagttattgagacggctaaaaaaatctatttcgaaaagccgatgcagagagcatggacaaagaaaaagatggtagagttttaagttttggatcagaaagattaacatcatgtgatttaagaagtcttgtgtttgtgtttataatgtttctgcaagaacttcttaagatatgattaagagggaagatgataaacttagagtgcaagcaaaacctgtataattgtgtttccctctgtttatttttcctctctctttgaatttgcaatggagacatttgatttcatc

SEQ ID NO: 88743 - protein, 182 aa, Arabidopsis thaliana; identical to SEQ ID NO: 28006
  peptide (1)..(182): Ceres Seq. ID no. 12712125
  misc_feature (24)..(160): Pfam Name: NUDIX domain Pfam Description: NUDIX domain
  misc_feature (1)..(182): Homolog of NCBI NO: 18379275 NR Description: expressed protein; protein id: At2g01670.1, by cDNA: 8247., supported by cDNA: gi_13272382, supported by gi_15293192, supported by cDNA: gi_15724325 [Arabidopsis
  misc_feature (6)..(182): Homolog of NCBI NO: 21595695 NR Description: unknown [Arabidopsis thaliana]
  misc_feature (6)..(171): Homolog of NCBI NO: 15223919 NR Description: hypothetical protein; protein id: At1g14860.1
  misc_feature (27)..(167): Homolog of NCBI NO: 31747031 NR Description: MutT-like protein [Cucumis sativus]
  misc_feature (3)..(158): Homolog of NCBI NO: 15221055 NR Description: unknown protein; protein id: At1g18300.1 thaliana] >gi|6714298|gb|AAF25994.1|AC013354_13 F15H18.18 thaliana] >gi|8671772|gb|AAF78378.1|AC069551_11 T10O22.27
  misc_feature (4)..(160): Homolog of NCBI NO: 22330598 NR Description: unknown protein; protein id: At1g73540.1, by cDNA: gi_18252868 [Arabidopsis thaliana] unknown protein [Arabidopsis thaliana]
  misc_feature (4)..(160): Homolog of NCBI NO: 25367539 NR Description: unknown protein [imported] - Arabidopsis thaliana
  misc_feature (7)..(154): Homolog of NCBI NO: 38175436 NR Description: MutT-like protein [Oryza sativa (japonica
  misc_feature (7)..(154): Homolog of NCBI NO: 34900054 NR Description: MutT-like protein~contains ESTs
  misc_feature (6)..(174): Homolog of NCBI NO: 18391450 NR Description: expressed protein; protein id: At1g12880.1, by cDNA: gi_15810278, supported by cDNA: gi_20258974 [Arabidopsis >gi|15810279|gb|AAL07027.1| unknown protein [Arabidopsis

SEQ ID NO: 88744 - protein, 177 aa, Arabidopsis thaliana; identical to SEQ ID NO: 28007
  peptide (1)..(177): Ceres Seq. ID no. 12712126
  misc_feature (19)..(155): Pfam Name: NUDIX domain Pfam Description: NUDIX domain
  misc_feature (1)..(177): Homolog of NCBI NO: 18379275 NR Description: expressed protein; protein id: At2g01670.1, by cDNA: 8247., supported by cDNA: gi_13272382, supported by gi_15293192, supported by cDNA: gi_15724325 [Arabidopsis
  misc_feature (1)..(177): Homolog of NCBI NO: 21595695 NR Description: unknown [Arabidopsis thaliana]
  misc_feature (1)..(166): Homolog of NCBI NO: 15223919 NR Description: hypothetical protein; protein id: At1g14860.1
  misc_feature (22)..(162): Homolog of NCBI NO: 31747031 NR Description: MutT-like protein [Cucumis sativus]
  misc_feature (1)..(153): Homolog of NCBI NO: 15221055 NR Description: unknown protein; protein id: At1g18300.1 thaliana] >gi|6714298|gb|AAF25994.1|AC013354_13 F15H18.18 thaliana] >gi|8671772|gb|AAF78378.1|AC069551_11 T10O22.27
  misc_feature (1)..(155): Homolog of NCBI NO: 22330598 NR Description: unknown protein; protein id: At1g73540.1, by cDNA: gi_18252868 [Arabidopsis thaliana] unknown protein [Arabidopsis thaliana]
  misc_feature (1)..(155): Homolog of NCBI NO: 25367539 NR Description: unknown protein [imported] - Arabidopsis thaliana
  misc_feature (2)..(149): Homolog of NCBI NO: 38175436 NR Description: MutT-like protein [Oryza sativa (japonica
  misc_feature (2)..(149): Homolog of NCBI NO: 34900054 NR Description: MutT-like protein~contains ESTs
  misc_feature (1)..(169): Homolog of NCBI NO: 18391450 NR Description: expressed protein; protein id: At1g12880.1, by cDNA: gi_15810278, supported by cDNA: gi_20258974 [Arabidopsis >gi|15810279|gb|AAL07027.1| unknown protein [Arabidopsis

SEQ ID NO: 88745 - protein, 122 aa, Arabidopsis thaliana; identical to SEQ ID NO: 28008
  peptide (1)..(122): Ceres Seq. ID no. 12712127
  misc_feature (1)..(100): Pfam Name: NUDIX domain Pfam Description: NUDIX domain
  misc_feature (1)..(122): Homolog of NCBI NO: 18379275 NR Description: expressed protein; protein id: At2g01670.1, by cDNA: 8247., supported by cDNA: gi_13272382, supported by gi_15293192, supported by cDNA: gi_15724325 [Arabidopsis
  misc_feature (1)..(122): Homolog of NCBI NO: 21595695 NR Description: unknown [Arabidopsis thaliana]
  misc_feature (1)..(111): Homolog of NCBI NO: 15223919 NR Description: hypothetical protein; protein id: At1g14860.1
  misc_feature (1)..(107): Homolog of NCBI NO: 31747031 NR Description: MutT-like protein [Cucumis sativus]
  misc_feature (1)..(98): Homolog of NCBI NO: 15221055 NR Description: unknown protein; protein id: At1g18300.1 thaliana] >gi|6714298|gb|AAF25994.1|AC013354_13 F15H18.18 thaliana] >gi|8671772|gb|AAF78378.1|AC069551_11 T10O22.27
  misc_feature (1)..(100): Homolog of NCBI NO: 22330598 NR Description: unknown protein; protein id: At1g73540.1, by cDNA: gi_18252868 [Arabidopsis thaliana] unknown protein [Arabidopsis thaliana]
  misc_feature (1)..(100): Homolog of NCBI NO: 25367539 NR Description: unknown protein [imported] - Arabidopsis thaliana
  misc_feature (1)..(94): Homolog of NCBI NO: 38175436 NR Description: MutT-like protein [Oryza sativa (japonica
  misc_feature (1)..(94): Homolog of NCBI NO: 34900054 NR Description: MutT-like protein~contains ESTs
  misc_feature (1)..(114): Homolog of NCBI NO: 18391450 NR Description: expressed protein; protein id: At1g12880.1, by cDNA: gi_15810278, supported by cDNA: gi_20258974 [Arabidopsis >gi|15810279|gb|AAL07027.1| unknown protein [Arabidopsis

SEQ ID NO: 88746 - DNA, 1491 bp, Arabidopsis thaliana
  misc_feature (1)..(1491): Ceres Seq. ID no. 12712203
  misc_feature: MA Experiment ID: 20000306 Result: Up-regulated in Transcription
  misc_feature: MA Experiment 20000306 PARAMETER Experiment Name: At_Germinating_Seeds_Sub_P Parameter: Age (hr) Value: 6 vs. 0
  misc_feature: MA Experiment 20000306 PARAMETER Experiment Name: At_Germinating_Seeds_Sub_P Parameter: Organism Value: A. thaliana
  misc_feature: MA Experiment 20000306 PARAMETER Experiment Name: At_Germinating_Seeds_Sub_P Parameter: Plant Line Value: WS
  misc_feature: MA Experiment 20000306 PARAMETER Experiment Name: At_Germinating_Seeds_Sub_P Parameter: Tissue Value: Germinating Seeds
  misc_feature: MA Experiment ID: 20000307 Result: Up-regulated in Transcription
  misc_feature: MA Experiment 20000307 PARAMETER Experiment Name: At_Germinating_Seeds_Sub_P Parameter: Age (hr) Value: 24 vs. 0
  misc_feature: MA Experiment 20000307 PARAMETER Experiment Name: At_Germinating_Seeds_Sub_P Parameter: Organism Value: A. thaliana
  misc_feature: MA Experiment 20000307 PARAMETER Experiment Name: At_Germinating_Seeds_Sub_P Parameter: Plant Line Value: WS
  misc_feature: MA Experiment 20000307 PARAMETER Experiment Name: At_Germinating_Seeds_Sub_P Parameter: Tissue Value: Germinating Seeds
  misc_feature: MA Experiment ID: 20000315 Result: Down-regulated in Transcription
  misc_feature: MA Experiment 20000315 PARAMETER Experiment Name: At_14day_Shoots-Roots_Sub_P Parameter: Age (day) Value: 14
  misc_feature: MA Experiment 20000315 PARAMETER Experiment Name: At_14day_Shoots-Roots_Sub_P Parameter: Organism Value: A. thaliana
  misc_feature: MA Experiment 20000315 PARAMETER Experiment Name: At_14day_Shoots-Roots_Sub_P Parameter: Plant Line Value: WS
  misc_feature: MA Experiment 20000315 PARAMETER Experiment Name: At_14day_Shoots-Roots_Sub_P Parameter: Tissue Value: Shoots vs. Whole Plant
atggatccgatcgaatctgtcgagtacaatggcttcgagacctctaacggtaacgtcgaccatggttggaagaaagtcgtgtacccgaaacgtcaccggaagcaaaaacaagcggatcaagcgacggcaaatggtggcaaaactgttgcttcaaatggaaccgtagctaacggcggagataacgttttccgttcgttggaagagcaagctgaggatcgtcgacgacggatcttagcggcgaagatgactgctattgattcagatgatgatggtgttgttagatctaaacatcgatctaatggttacggtgatgatgggtatgattttgatggtagtgatgatgagatcgcaacgctgaaggttgaggaagttaagaagccaaagcctaagaaggagaagaagcctaaagtttctttgcctgaagctgcatcaaagatcgatcctttaaatctcgaagcttttctcgttgaagcatcggttccgttagctcatattccggaaccagtgtataagacatcagttgattggatcaaccatcgtccaattgaggcacttggagcctttgtgttgtgggcttttgattgtattctcacagatttagcagcacaacaaggtggtgctaaaggtgggaagaagggtggtcaacaaactacttccaaatctcaggtggcaatatttgttgcattagcgatggtattgcgtaggaagcctgatgctttgactaatgtattgccaactctgagggagaatcctaagtatcagggtcaggataagcttccggttacagtttggatgatggctcaggcctcccaaggtgatatagctgtaggcttgtattcatgggctcacaacttgttacctgttgtcggtaataagaactgtaaccctcagtcaagggatctcatcctgcagttggttgagaaaattttgacgaatccaaaggctcgtaccatacttgtaaatggagctgttaggaagggagagcgtttgattccacctccttcatttgagatcttgttgcggcttacattccctgcatcatctgcaagagtaaagcactgggacaatctctacaaggagaatctggaagctagtgttgctgttcttaaaaagcttgttgaagaatggaaagagcattcggtcaaactatcatcatcaccgaatgatgctctcactctcaaccgaactatgaaaagcttcaggctaaagaacgaggaggtcatcactgagggaggagccaatgcttctctttacaaagaagctgacaagtcttgcaaaacgatctcggggagactctcccgtggaagtggctgcctcaaaggaacagccattactttagtgtttctagctgctgcaggagccgctgctgcagctgttctatcttccaacccggaggttacaaacgagctgaagaacctggtggactcattggagctgcatgaatacatcaacaaatacactgaggttatctccacagctttgaagaagtaa

SEQ ID NO: 88747 - protein, 496 aa, Arabidopsis thaliana
  peptide (1)..(496): Ceres Seq. ID no. 12712204
  misc_feature (155)..(396): Homolog of NCBI NO: 15223242 NR Description: unknown protein; protein id: At1g70770.1
  misc_feature (1)..(167): Homolog of NCBI NO: 15223242 NR Description: unknown protein; protein id: At1g70770.1
  misc_feature (1)..(473): Homolog of NCBI NO: 25518112 NR Description: T26J12.6 protein - Arabidopsis thaliana
  misc_feature (352)..(496): Homolog of NCBI NO: 15223242 NR Description: unknown protein; protein id: At1g70770.1
  misc_feature (1)..(494): Homolog of NCBI NO: 15220663 NR Description: unknown protein; protein id: At1g23170.1
  misc_feature (160)..(410): Homolog of NCBI NO: 34895518 NR Description: unnamed protein product [Oryza sativa (japonica group)] >gi|9558458|dbj|BAB03379.1| unnamed protein product
  misc_feature (21)..(159): Homolog of NCBI NO: 34895518 NR Description: unnamed protein product [Oryza sativa (japonica group)] >gi|9558458|dbj|BAB03379.1| unnamed protein product
  misc_feature (160)..(372): Homolog of NCBI NO: 6671944 NR Description: unknown protein [Arabidopsis thaliana]
  misc_feature (160)..(372): Homolog of NCBI NO: 18399392 NR Description: expressed protein; protein id: At3g11880.1, by cDNA: gi_16226859 [Arabidopsis thaliana]
  misc_feature (352)..(463): Homolog of NCBI NO: 6671944 NR Description: unknown protein [Arabidopsis thaliana]
MDPIESVEYNGFETSNGNVDHGWKKVVYPKRHRKQKQADQATANGGKTVASNGTVANGGDNVFRSLEEQAEDRRRRILAAKMTAIDSDDDGVVRSKHRSNGYGDDGYDFDGSDDEIATLKVEEVKKPKPKKEKKPKVSLPEAASKIDPLNLEAFLVEASVPLAHIPEPVYKTSVDWINHRPIEALGAFVLWAFDCILTDLAAQQGGAKGGKKGGQQTTSKSQVAIFVALAMVLRRKPDALTNVLPTLRENPKYQGQDKLPVTVWMMAQASQGDIAVGLYSWAHNLLPVVGNKNCNPQSRDLILQLVEKILTNPKARTILVNGAVRKGERLIPPPSFEILLRLTFPASSARVKHWDNLYKENLEASVAVLKKLVEEWKEHSVKLSSSPNDALTLNRTMKSFRLKNEEVITEGGANASLYKEADKSCKTISGRLSRGSGCLKGTAITLVFLAAAGAAAAAVLSSNPEVTNELKNLVDSLELHEYINKYTEVISTALKK

SEQ ID NO: 88748 - protein, 415 aa, Arabidopsis thaliana
  peptide (1)..(415): Ceres Seq. ID no. 12712205
  misc_feature (74)..(315): Homolog of NCBI NO: 15223242 NR Description: unknown protein; protein id: At1g70770.1
  misc_feature (1)..(86): Homolog of NCBI NO: 15223242 NR Description: unknown protein; protein id: At1g70770.1
  misc_feature (1)..(392): Homolog of NCBI NO: 25518112 NR Description: T26J12.6 protein - Arabidopsis thaliana
  misc_feature (271)..(415): Homolog of NCBI NO: 15223242 NR Description: unknown protein; protein id: At1g70770.1
  misc_feature (1)..(413): Homolog of NCBI NO: 15220663 NR Description: unknown protein; protein id: At1g23170.1
  misc_feature (79)..(329): Homolog of NCBI NO: 34895518 NR Description: unnamed protein product [Oryza sativa (japonica group)] >gi|9558458|dbj|BAB03379.1| unnamed protein product
  misc_feature (1)..(78): Homolog of NCBI NO: 34895518 NR Description: unnamed protein product [Oryza sativa (japonica group)] >gi|9558458|dbj|BAB03379.1| unnamed protein product
  misc_feature (79)..(291): Homolog of NCBI NO: 6671944 NR Description: unknown protein [Arabidopsis thaliana]
  misc_feature (79)..(291): Homolog of NCBI NO: 18399392 NR Description: expressed protein; protein id: At3g11880.1, by cDNA: gi_16226859 [Arabidopsis thaliana]
  misc_feature (271)..(382): Homolog of NCBI NO: 6671944 NR Description: unknown protein [Arabidopsis thaliana]
MTAIDSDDDGVVRSKHRSNGYGDDGYDFDGSDDEIATLKVEEVKKPKPKKEKKPKVSLPEAASKIDPLNLEAFLVEASVPLAHIPEPVYKTSVDWINHRPIEALGAFVLWAFDCILTDLAAQQGGAKGGKKGGQQTTSKSQVAIFVALAMVLRRKPDALTNVLPTLRENPKYQGQDKLPVTVWMMAQASQGDIAVGLYSWAHNLLPVVGNKNCNPQSRDLILQLVEKILTNPKARTILVNGAVRKGERLIPPPSFEILLRLTFPASSARVKHWDNLYKENLEASVAVLKKLVEEWKEHSVKLSSSPNDALTLNRTMKSFRLKNEEVITEGGANASLYKEADKSCKTISGRLSRGSGCLKGTAITLVFLAAAGAAAAAVLSSNPEVTNELKNLVDSLELHEYINKYTEVISTALKK

SEQ ID NO: 88749 - protein, 266 aa, Arabidopsis thaliana
  peptide (1)..(266): Ceres Seq. ID no. 12712206
  misc_feature (1)..(166): Homolog of NCBI NO: 15223242 NR Description: unknown protein; protein id: At1g70770.1
  misc_feature (1)..(243): Homolog of NCBI NO: 25518112 NR Description: T26J12.6 protein - Arabidopsis thaliana
  misc_feature (122)..(266): Homolog of NCBI NO: 15223242 NR Description: unknown protein; protein id: At1g70770.1
  misc_feature (1)..(264): Homolog of NCBI NO: 15220663 NR Description: unknown protein; protein id: At1g23170.1
  misc_feature (1)..(180): Homolog of NCBI NO: 34895518 NR Description: unnamed protein product [Oryza sativa (japonica group)] >gi|9558458|dbj|BAB03379.1| unnamed protein product
  misc_feature (1)..(142): Homolog of NCBI NO: 6671944 NR Description: unknown protein [Arabidopsis thaliana]
  misc_feature (1)..(142): Homolog of NCBI NO: 18399392 NR Description: expressed protein; protein id: At3g11880.1, by cDNA: gi_16226859 [Arabidopsis thaliana]
  misc_feature (122)..(233): Homolog of NCBI NO: 6671944 NR Description: unknown protein [Arabidopsis thaliana]
  misc_feature (122)..(233): Homolog of NCBI NO: 18399392 NR Description: expressed protein; protein id: At3g11880.1, by cDNA: gi_16226859 [Arabidopsis thaliana]
  misc_feature (122)..(265): Homolog of NCBI NO: 15220663 NR Description: unknown protein; protein id: At1g23170.1
MVLRRKPDALTNVLPTLRENPKYQGQDKLPVTVWMMAQASQGDIAVGLYSWAHNLLPVVGNKNCNPQSRDLILQLVEKILTNPKARTILVNGAVRKGERLIPPPSFEILLRLTFPASSARVKHWDNLYKENLEASVAVLKKLVEEWKEHSVKLSSSPNDALTLNRTMKSFRLKNEEVITEGGANASLYKEADKSCKTISGRLSRGSGCLKGTAITLVFLAAAGAAAAAVLSSNPEVTNELKNLVDSLELHEYINKYTEVISTALKK

SEQ ID NO: 88750 - DNA, 941 bp, Arabidopsis thaliana
  misc_feature (1)..(941): Ceres Seq. ID no. 12712232
  misc_feature: MA Experiment ID: 108434 Result: Down-regulated in Transcription
  misc_feature: MA Experiment 108434 PARAMETER Experiment Name: At_Root_Tips_cDNA_P Parameter: Tissue Value: Root Tips
  misc_feature: MA Experiment ID: 108462 Result: Down-regulated in Transcription
  misc_feature: MA Experiment 108462 PARAMETER Experiment Name: At_Germinating_Seeds_cDNA_P Parameter: Age (day) Value: 2 vs. 0
  misc_feature: MA Experiment 108462 PARAMETER Experiment Name: At_Germinating_Seeds_cDNA_P Parameter: Tissue Value: Germinating Seeds
  misc_feature: MA Experiment ID: 108463 Result: Down-regulated in Transcription
  misc_feature: MA Experiment 108463 PARAMETER Experiment Name: At_Germinating_Seeds_cDNA_P Parameter: Age (day) Value: 3 vs. 0
  misc_feature: MA Experiment 108463 PARAMETER Experiment Name: At_Germinating_Seeds_cDNA_P Parameter: Tissue Value: Germinating Seeds
  misc_feature: MA Experiment ID: 108469 Result: Up-regulated in Transcription
  misc_feature: MA Experiment ID: 108488 Result: Down-regulated in Transcription
  misc_feature: MA Experiment ID: 108585 Result: Up-regulated in Transcription
  misc_feature: MA Experiment 108585 PARAMETER Experiment Name: At_5mM_NaNP_cDNA_P Parameter: Timepoint (hr) Value: 6
  misc_feature: MA Experiment 108585 PARAMETER Experiment Name: At_5mM_NaNP_cDNA_P Parameter: Tissue Value: Aerial
  misc_feature: MA Experiment 108585 PARAMETER Experiment Name: At_5mM_NaNP_cDNA_P Parameter: Treatment Value: null
  misc_feature: MA Experiment ID: 108668 Result: Up-regulated in Transcription
  misc_feature: MA Experiment 108668 PARAMETER Experiment Name: At_2mM_SA_cDNA_P Parameter: Plant Line Value: WS
  misc_feature: MA Experiment 108668 PARAMETER Experiment Name: At_2mM_SA_cDNA_P Parameter: Timepoint (hr) Value: 6
  misc_feature: MA Experiment 108668 PARAMETER Experiment Name: At_2mM_SA_cDNA_P Parameter: Treatment Value: 2mM SA vs. No Treatment
  misc_feature: MA Experiment ID: 20000182 Result: Up-regulated in Transcription
  misc_feature: MA Experiment 20000182 PARAMETER Experiment Name: At_2mM_SA_P Parameter: Age (day) Value: 14
  misc_feature: MA Experiment 20000182 PARAMETER Experiment Name: At_2mM_SA_P Parameter: Organism Value: A. thaliana
  misc_feature: MA Experiment 20000182 PARAMETER Experiment Name: At_2mM_SA_P Parameter: Plant Line Value: WS
  misc_feature: MA Experiment 20000182 PARAMETER Experiment Name: At_2mM_SA_P Parameter: Timepoint (hr) Value: 6
  misc_feature: MA Experiment 20000182 PARAMETER Experiment Name: At_2mM_SA_P Parameter: Tissue Value: Aerial
  misc_feature: MA Experiment 20000182 PARAMETER Experiment Name: At_2mM_SA_P Parameter: Treatment Value: 2mM SA vs. No Treatment
  misc_feature: MA Experiment ID: 20000185 Result: Down-regulated in Transcription
  misc_feature: MA Experiment 20000185 PARAMETER Experiment Name: At_Roots__P Parameter: Age (day) Value: 7 vs. 21
  misc_feature: MA Experiment 20000185 PARAMETER Experiment Name: At_Roots__P Parameter: Organism Value: A. thaliana
  misc_feature: MA Experiment 20000185 PARAMETER Experiment Name: At_Roots__P Parameter: Tissue Value: Roots vs. Whole Plant
  misc_feature: MA Experiment ID: 20001557 Result: Up-regulated in Transcription
  misc_feature: MA Experiment 20001557 PARAMETER Experiment Name: At_Drought_Soil_Dry_P Parameter: Age (day) Value: 27
  misc_feature: MA Experiment 20001557 PARAMETER Experiment Name: At_Drought_Soil_Dry_P Parameter: Organism Value: A. thaliana
  misc_feature: MA Experiment 20001557 PARAMETER Experiment Name: At_Drought_Soil_Dry_P Parameter: Plant Line Value: WS
  misc_feature: MA Experiment 20001557 PARAMETER Experiment Name: At_Drought_Soil_Dry_P Parameter: Post Timepoint (hr) Value: 3
  misc_feature: MA Experiment 20001557 PARAMETER Experiment Name: At_Drought_Soil_Dry_P Parameter: Post-Treatment Value: Re-Water vs. No Drought
  misc_feature: MA Experiment 20001557 PARAMETER Experiment Name: At_Drought_Soil_Dry_P Parameter: Timepoint (day) Value: 13
  misc_feature: MA Experiment 20001557 PARAMETER Experiment Name: At_Drought_Soil_Dry_P Parameter: Treatment Value: Drought vs. No Drought
aaatcacaaagcaagtcgcgtacaatgggttctgcattcgatccccttgtcacggccactgaggatctcgccgccgtcaactcggcgccgccactctcaaacctcacgcaagaagaactcaagaaaatcgccgcttataaagccgtcgaattcgtcgaatctggaatggttatcggtctcggcactggctccaccgcgaaacacgccgtggctcgtatcagcgagcttctccgagaaggaaaactcaaggatataatcggaatccctacttcaaccacaacgcatgagcaagcggtgtctctagggataccattatccgatctagattcgcatccggtggtggatctatcaatcgatggcgccgacgaagtcgatccggctcttaatctggtgaaaggacgcggcggatcgttattgagagagaagatgattgaaggagcatctaagaagttcgttgtgattgttgatgaatcgaagcttgtcaagtatatcggaggaagcggactcgctgttccggtggaggttgttccgttctgctgcgatttcacaagggggaaactggaagagctatttagagattcgggatgtgttgcgaagctgaggatgaaaatcggatctaacggcgaagaggcggcgccggctgtgacggataataggaattatgtggtggatttgtatttggagagagatattggagatttagaggtggcgagtgaggcgatattgaggtttcctggagtagtggagcatgggatgtttctgggaatggcgactacgttgatcgtcgccggcaaatttggtgttaccgtcaaggataggtttggataaaagtgtcatttgaaaaccattagggtttatggtttgattttgattttcgatggattctctctggttctgtaaaccctttcctcctattggtttaaaactttgacttatttttt

SEQ ID NO: 88751 - protein, 275 aa, Arabidopsis thaliana; identical to SEQ ID NO: 26595
  peptide (1)..(275): Ceres Seq. ID no. 12712233
  misc_feature (85)..(269): Pfam Name: Ribose 5-phosphate isomerase A (phosphoriboisomerase A) Pfam Description: Ribose 5-phosphate isomerase A
  misc_feature (9)..(275): Homolog of NCBI NO: 15223936 NR Description: putative ribose 5-phosphate isomerase; protein At1g71100.1, supported by cDNA: 3116., supported by cDNA: [Arabidopsis thaliana] >gi|25329397|pir||E96735 hypothetical
  misc_feature (9)..(275): Homolog of NCBI NO: 13430836 NR Description: putative ribose 5-phosphate isomerase
  misc_feature (9)..(275): Homolog of NCBI NO: 21592672 NR Description: putative ribose 5-phosphate isomerase
  misc_feature (9)..(273): Homolog of NCBI NO: 15226223 NR Description: putative ribose 5-phosphate isomerase; protein At2g01290.1, supported by cDNA: gi_15809809, supported by cDNA:
  misc_feature (15)..(273): Homolog of NCBI NO: 18654317 NR Description: ribose-5-phosphate isomerase [Spinacia oleracea]
  misc_feature (8)..(273): Homolog of NCBI NO: 34393836 NR Description: putative ribose-5-phosphate isomerase [Oryza
  misc_feature (35)..(273): Homolog of NCBI NO: 34393835 NR Description: putative ribose-5-phosphate isomerase [Oryza
  misc_feature (35)..(270): Homolog of NCBI NO: 21594002 NR Description: putative ribose 5-phosphate isomerase
  misc_feature (35)..(270): Homolog of NCBI NO: 15229349 NR Description: putative ribose 5-phosphate isomerase; protein At3g04790.1, supported by cDNA: 6349., supported by cDNA:
  misc_feature (9)..(267): Homolog of NCBI NO: 38347196 NR Description: OSJNBa0023J03.8 [Oryza sativa (japonica

SEQ ID NO: 88752 - protein, 267 aa, Arabidopsis thaliana; identical to SEQ ID NO: 26596
  peptide (1)..(267): Ceres Seq. ID no. 12712234
  misc_feature (77)..(261): Pfam Name: Ribose 5-phosphate isomerase A (phosphoriboisomerase A) Pfam Description: Ribose 5-phosphate isomerase A
  misc_feature (1)..(267): Homolog of NCBI NO: 15223936 NR Description: putative ribose 5-phosphate isomerase; protein At1g71100.1, supported by cDNA: 3116., supported by cDNA: [Arabidopsis thaliana] >gi|25329397|pir||E96735 hypothetical
  misc_feature (1)..(267): Homolog of NCBI NO: 13430836 NR Description: putative ribose 5-phosphate isomerase
  misc_feature (1)..(267): Homolog of NCBI NO: 21592672 NR Description: putative ribose 5-phosphate isomerase
  misc_feature (1)..(265): Homolog of NCBI NO: 15226223 NR Description: putative ribose 5-phosphate isomerase; protein At2g01290.1, supported by cDNA: gi_15809809, supported by cDNA:
  misc_feature (7)..(265): Homolog of NCBI NO: 18654317 NR Description: ribose-5-phosphate isomerase [Spinacia oleracea]
  misc_feature (1)..(265): Homolog of NCBI NO: 34393836 NR Description: putative ribose-5-phosphate isomerase [Oryza
  misc_feature (27)..(265): Homolog of NCBI NO: 34393835 NR Description: putative ribose-5-phosphate isomerase [Oryza
  misc_feature (27)..(262): Homolog of NCBI NO: 21594002 NR Description: putative ribose 5-phosphate isomerase
  misc_feature (27)..(262): Homolog of NCBI NO: 15229349 NR Description: putative ribose 5-phosphate isomerase; protein At3g04790.1, supported by cDNA: 6349., supported by cDNA:
  misc_feature (1)..(259): Homolog of NCBI NO: 38347196 NR Description: OSJNBa0023J03.8 [Oryza sativa (japonica

SEQ ID NO: 88753 - protein, 220 aa, Arabidopsis thaliana; identical to SEQ ID NO: 26597
  peptide (1)..(220): Ceres Seq. ID no. 12712235
  misc_feature (30)..(214): Pfam Name: Ribose 5-phosphate isomerase A (phosphoriboisomerase A) Pfam Description: Ribose 5-phosphate isomerase A
  misc_feature (1)..(220): Homolog of NCBI NO: 15223936 NR Description: putative ribose 5-phosphate isomerase; protein At1g71100.1, supported by cDNA: 3116., supported by cDNA: [Arabidopsis thaliana] >gi|25329397|pir||E96735 hypothetical
  misc_feature (1)..(220): Homolog of NCBI NO: 13430836 NR Description: putative ribose 5-phosphate isomerase
  misc_feature (1)..(220): Homolog of NCBI NO: 21592672 NR Description: putative ribose 5-phosphate isomerase
  misc_feature (1)..(218): Homolog of NCBI NO: 15226223 NR Description: putative ribose 5-phosphate isomerase; protein At2g01290.1, supported by cDNA: gi_15809809, supported by cDNA:
  misc_feature (1)..(218): Homolog of NCBI NO: 18654317 NR Description: ribose-5-phosphate isomerase [Spinacia oleracea]
  misc_feature (1)..(218): Homolog of NCBI NO: 34393836 NR Description: putative ribose-5-phosphate isomerase [Oryza
  misc_feature (1)..(218): Homolog of NCBI NO: 34393835 NR Description: putative ribose-5-phosphate isomerase [Oryza
  misc_feature (1)..(215): Homolog of NCBI NO: 21594002 NR Description: putative ribose 5-phosphate isomerase
  misc_feature (1)..(215): Homolog of NCBI NO: 15229349 NR Description: putative ribose 5-phosphate isomerase; protein At3g04790.1, supported by cDNA: 6349., supported by cDNA:
  misc_feature (1)..(212): Homolog of NCBI NO: 38347196 NR Description: OSJNBa0023J03.8 [Oryza sativa (japonica

SEQ ID NO: 88754 - DNA, 1143 bp, Arabidopsis thaliana
  misc_feature (1)..(1143): Ceres Seq. ID no. 12712236
  misc_feature: MA Experiment ID: 20000306 Result: Down-regulated in Transcription
  misc_feature: MA Experiment 20000306 PARAMETER Experiment Name: At_Germinating_Seeds_Sub_P Parameter: Age (hr) Value: 6 vs. 0
  misc_feature: MA Experiment 20000306 PARAMETER Experiment Name: At_Germinating_Seeds_Sub_P Parameter: Organism Value: A. thaliana
  misc_feature: MA Experiment 20000306 PARAMETER Experiment Name: At_Germinating_Seeds_Sub_P Parameter: Plant Line Value: WS
  misc_feature: MA Experiment 20000306 PARAMETER Experiment Name: At_Germinating_Seeds_Sub_P Parameter: Tissue Value: Germinating Seeds
  misc_feature: MA Experiment ID: 20000307 Result: Down-regulated in Transcription
  misc_feature: MA Experiment 20000307 PARAMETER Experiment Name: At_Germinating_Seeds_Sub_P Parameter: Age (hr) Value: 24 vs. 0
  misc_feature: MA Experiment 20000307 PARAMETER Experiment Name: At_Germinating_Seeds_Sub_P Parameter: Organism Value: A. thaliana
  misc_feature: MA Experiment 20000307 PARAMETER Experiment Name: At_Germinating_Seeds_Sub_P Parameter: Plant Line Value: WS
  misc_feature: MA Experiment 20000307 PARAMETER Experiment Name: At_Germinating_Seeds_Sub_P Parameter: Tissue Value: Germinating Seeds
  misc_feature: MA Experiment ID: 20000347 Result: Up-regulated in Transcription
  misc_feature: MA Experiment 20000347 PARAMETER Experiment Name: At_2mM_SA_Sub_P Parameter: Age (day) Value: 14
  misc_feature: MA Experiment 20000347 PARAMETER Experiment Name: At_2mM_SA_Sub_P Parameter: Organism Value: A. thaliana
  misc_feature: MA Experiment 20000347 PARAMETER Experiment Name: At_2mM_SA_Sub_P Parameter: Plant Line Value: WS
  misc_feature: MA Experiment 20000347 PARAMETER Experiment Name: At_2mM_SA_Sub_P Parameter: Timepoint (hr) Value: 6
  misc_feature: MA Experiment 20000347 PARAMETER Experiment Name: At_2mM_SA_Sub_P Parameter: Tissue Value: Aerial
  misc_feature: MA Experiment 20000347 PARAMETER Experiment Name: At_2mM_SA_Sub_P Parameter: Treatment Value: 2mM SA vs. No Treatment
atggcgaaaccaaacatagacgaattgaatcaaatccttactagttatcaaaacaccatcaacgatactctccaggttttttatttcaccatttcgtgtttttgtgtgttggtgatggatttgattactgatttagagacagggtttggtgaatttttgcagttgttcgagcaagttccgtctccgacacaagacaaattatattggaacgatgtccttcagatttctgatcatctctccaaacaagctactatagtgggaatgctatggatcactggagaacctccaaaagctgaagcaatgaaggagactatggaagcatacttcaacgctcttcaaggatttttgctgcattgtcatggaagcatggttggtgctgggactacactctcttcgaccatacacgcttctgtgaagcaaattgttgattccagcttcagattgttgcagggttctgtttccttatacgagggatcatatgagaaaggaaggaagcccacgattccgcagcttgcaggagcagtgtgggaagcatgttctaatttaaagaacgtgcctgaaacaaacatcaaagcgattggaagagcgatggcacatgtagctgtttctatgaaggatgtgcttagggagatgaaagaactgaagcctgcttcttcttcacctgatcataatgtttcgacaaactcggatgacgatgatttaggcgatgaactgtctcctgaagaatttgaagttgctaaaatggtagcagatattgtgtctgagacgctcgttgttataaaagagcttatccgtgctatcacatgcatgatcaagctggagaatccaaaggataatagtgagtttgtggattcgtttgagaagttactgaagttgtgtcaaggaattggtgtacagattgatgagcttggagcttgtgtttacccgccgcaagagtttggtctcatgaaacaaacagtggagaacatgagggaaagtattggtgagattgagtctgatgttaagagttccaagaattcttcatcagaagctttatcaggatcatgcagaaggctgcagagtttgattgaacatatggtaaccgagttggacacaagaatcgaagctgaagtagtttacaaaatgcagaatgttactctttag

SEQ ID NO: 88755 - protein, 380 aa, Arabidopsis thaliana
  peptide (1)..(380): Ceres Seq. ID no. 12712237
  misc_feature (41)..(380): Homolog of NCBI NO: 15223962 NR Description: unknown protein; protein id: At1g71150.1
  misc_feature (1)..(27): Homolog of NCBI NO: 15223962 NR Description: unknown protein; protein id: At1g71150.1
  misc_feature (41)..(380): Homolog of NCBI NO: 15219987 NR Description: unknown protein; protein id: At1g22970.1,
  misc_feature (36)..(377): Homolog of NCBI NO: 18395185 NR Description: unknown protein; protein id: At1g22980.1
  misc_feature (85)..(377): Homolog of NCBI NO: 25372690 NR Description: F19G10.7 protein - Arabidopsis thaliana
MAKPNIDELNQILTSYQNTINDTLQVFYFTISCFCVLVMDLITDLETGFGEFLQLFEQVPSPTQDKLYWNDVLQISDHLSKQATIVGMLWITGEPPKAEAMKETMEAYFNALQGFLLHCHGSMVGAGTTLSSTIHASVKQIVDSSFRLLQGSVSLYEGSYEKGRKPTIPQLAGAVWEACSNLKNVPETNIKAIGRAMAHVAVSMKDVLREMKELKPASSSPDHNVSTNSDDDDLGDELSPEEFEVAKMVADIVSETLVVIKELIRAITCMIKLENPKDNSEFVDSFEKLLKLCQGIGVQIDELGACVYPPQEFGLMKQTVENMRESIGEIESDVKSSKNSSSEALSGSCRRLQSLIEHMVTELDTRIEAEVVYKMQNVTL

SEQ ID NO: 88756 - protein, 342 aa, Arabidopsis thaliana
  peptide (1)..(342): Ceres Seq. ID no. 12712238
  misc_feature (3)..(342): Homolog of NCBI NO: 15223962 NR Description: unknown protein; protein id: At1g71150.1
  misc_feature (3)..(342): Homolog of NCBI NO: 15219987 NR Description: unknown protein; protein id: At1g22970.1,
  misc_feature (1)..(339): Homolog of NCBI NO: 18395185 NR Description: unknown protein; protein id: At1g22980.1
  misc_feature (47)..(339): Homolog of NCBI NO: 25372690 NR Description: F19G10.7 protein - Arabidopsis thaliana
MDLITDLETGFGEFLQLFEQVPSPTQDKLYWNDVLQISDHLSKQATIVGMLWITGEPPKAEAMKETMEAYFNALQGFLLHCHGSMVGAGTTLSSTIHASVKQIVDSSFRLLQGSVSLYEGSYEKGRKPTIPQLAGAVWEACSNLKNVPETNIKAIGRAMAHVAVSMKDVLREMKELKPASSSPDHNVSTNSDDDDLGDELSPEEFEVAKMVADIVSETLVVIKELIRAITCMIKLENPKDNSEFVDSFEKLLKLCQGIGVQIDELGACVYPPQEFGLMKQTVENMRESIGEIESDVKSSKNSSSEALSGSCRRLQSLIEHMVTELDTRIEAEVVYKMQNVTL

SEQ ID NO: 88757 - protein, 293 aa, Arabidopsis thaliana
  peptide (1)..(293): Ceres Seq. ID no. 12712239
  misc_feature (1)..(293): Homolog of NCBI NO: 15223962 NR Description: unknown protein; protein id: At1g71150.1
  misc_feature (1)..(293): Homolog of NCBI NO: 15219987 NR Description: unknown protein; protein id: At1g22970.1,
  misc_feature (1)..(290): Homolog of NCBI NO: 18395185 NR Description: unknown protein; protein id: At1g22980.1
  misc_feature (1)..(290): Homolog of NCBI NO: 25372690 NR Description: F19G10.7 protein - Arabidopsis thaliana
MLWITGEPPKAEAMKETMEAYFNALQGFLLHCHGSMVGAGTTLSSTIHASVKQIVDSSFRLLQGSVSLYEGSYEKGRKPTIPQLAGAVWEACSNLKNVPETNIKAIGRAMAHVAVSMKDVLREMKELKPASSSPDHNVSTNSDDDDLGDELSPEEFEVAKMVADIVSETLVVIKELIRAITCMIKLENPKDNSEFVDSFEKLLKLCQGIGVQIDELGACVYPPQEFGLMKQTVENMRESIGEIESDVKSSKNSSSEALSGSCRRLQSLIEHMVTELDTRIEAEVVYKMQNVTL

SEQ ID NO: 88758 - DNA, 894 bp, Arabidopsis thaliana
  misc_feature (1)..(894): Ceres Seq. ID no. 12712240
  misc_feature: MA Experiment ID: 108579 Result: Down-regulated in Transcription
  misc_feature: MA Experiment 108579 PARAMETER Experiment Name: At_4deg_Cold_cDNA_P Parameter: Temperature (deg C) Value: 4 vs. 22
  misc_feature: MA Experiment 108579 PARAMETER Experiment Name: At_4deg_Cold_cDNA_P Parameter: Timepoint (hr) Value: 6
  misc_feature: MA Experiment 108579 PARAMETER Experiment Name: At_4deg_Cold_cDNA_P Parameter: Tissue Value: Aerial
atggagactccatatccgaaactcatcgatccttcaaagactcgaataggatggattggcatcgggataatgggatcggccatggtttctcatattatcgccgcaggctattctgtcacagtttacgctcgcgacctccggaaaacaaaagatctgcaaaccaaaggagctcgcatagccaatagccccaaagagttagcggagatgagcgacgttgtgttcacgattgttggaaacttcaacgatgtccgatcattgcttctcggtgacgatggtgtactctctggtcttacgcccggtggagtaacagtggacatgactagtagcaaaccaggattggcgcgtgaaatacacgcagaagcgaggcgtaggaattgttgggcggtggatgcgccggtatcaggtggagacgctggagcacgagaggggacgttagggattttcgccggcggagattcagagattgtggagtggttgtccccggtgatgaagaatatagggactgttacttatatgggagaagcagggagtgggcaaagctgcaagatagggaatcagattgctggtgcgagcaacctggttggacttgctgaagggatagtgttcgctgagaaagcgggtttagatacagtgaaatggctcgaggcggtgaaggatggtgcagctggatcggcggttatgcggctgtttggggagatgattgtgaagagggattatagggcgactggctttgcggagtatatggtgaaagatttgggaatggctgcagaggcggcgatgcctggtgctgctctgagcaagcagttgttcactggaatggtggctaatggagatggcaagttaggtattcaaggcgtcgtctctgttattagaagacttaacggcatatcctga

SEQ ID NO: 88759 - protein, 297 aa, Arabidopsis thaliana; identical to SEQ ID NO: 77114
  peptide (1)..(297): Ceres Seq. ID no. 12712241
  misc_feature (13)..(174): Pfam Name: NAD binding domain of 6-phosphogluconate dehydrogenase Pfam Description: NAD binding domain of 6-phosphogluconate
  misc_feature (1)..(297): Homolog of NCBI NO: 18409781 NR Description: putative dehydrogenase; protein id: At1g71180.1, by cDNA: gi_15293142, supported by cDNA: gi_21281067 [Arabidopsis >gi|15293143|gb|AAK93682.1| putative dehydrogenase dehydrogenase
  misc_feature (1)..(297): Homolog of NCBI NO: 25283629 NR Description: probable dehydrogenase F23N20.17 [imported] -
  misc_feature (1)..(297): Homolog of NCBI NO: 30698779 NR Description: dehydrogenase -related [Arabidopsis thaliana]
  misc_feature (8)..(297): Homolog of NCBI NO: 15233455 NR Description: putative protein; protein id: At4g29120.1, by cDNA: gi_13877868, supported by cDNA: gi_17065607 [Arabidopsis
  misc_feature (9)..(294): Homolog of NCBI NO: 34909392 NR Description: putative dehydrogenase [Oryza sativa (japonica group)] >gi|20521418|dbj|BAB91928.1| putative dehydrogenase
  misc_feature (14)..(286): Homolog of NCBI NO: 15896585 NR Description: Dehydrogenase related to 3-hydroxyisobutyrate YKWC B.subtilis ortholog [Clostridium acetobutylicum]
  misc_feature (16)..(284): Homolog of NCBI NO: 30022129 NR Description: 3-hydroxyisobutyrate dehydrogenase [Bacillus
  misc_feature (15)..(291): Homolog of NCBI NO: 16803045 NR Description: similar to 3-hydroxyisobutyrate dehydrogenase (B.
  misc_feature (13)..(286): Homolog of NCBI NO: 16078460 NR Description: similar to 3-hydroxyisobutyrate dehydrogenase subtilis] >gi|3183454|sp|O34948|YKWC_BACSU Hypothetical
  misc_feature (15)..(293): Homolog of NCBI NO: 15898379 NR Description: Oxidoreductase [Sulfolobus solfataricus]

SEQ ID NO: 88760 - protein, 274 aa, Arabidopsis thaliana; identical to SEQ ID NO: 77115
  peptide (1)..(274): Ceres Seq. ID no. 12712242
  misc_feature (1)..(151): Pfam Name: NAD binding domain of 6-phosphogluconate dehydrogenase Pfam Description: NAD binding domain of 6-phosphogluconate
  misc_feature (1)..(274): Homolog of NCBI NO: 18409781 NR Description: putative dehydrogenase; protein id: At1g71180.1, by cDNA: gi_15293142, supported by cDNA: gi_21281067 [Arabidopsis >gi|15293143|gb|AAK93682.1| putative dehydrogenase dehydrogenase
  misc_feature (1)..(274): Homolog of NCBI NO: 25283629 NR Description: probable dehydrogenase F23N20.17 [imported] -
  misc_feature (1)..(274): Homolog of NCBI NO: 30698779 NR Description: dehydrogenase -related [Arabidopsis thaliana]
  misc_feature (1)..(274): Homolog of NCBI NO: 15233455 NR Description: putative protein; protein id: At4g29120.1, by cDNA: gi_13877868, supported by cDNA: gi_17065607 [Arabidopsis
  misc_feature (1)..(271): Homolog of NCBI NO: 34909392 NR Description: putative dehydrogenase [Oryza sativa (japonica group)] >gi|20521418|dbj|BAB91928.1| putative dehydrogenase
  misc_feature (1)..(263): Homolog of NCBI NO: 15896585 NR Description: Dehydrogenase related to 3-hydroxyisobutyrate YKWC B.subtilis ortholog [Clostridium acetobutylicum]
  misc_feature (1)..(261): Homolog of NCBI NO: 30022129 NR Description: 3-hydroxyisobutyrate dehydrogenase [Bacillus
  misc_feature (1)..(268): Homolog of NCBI NO: 16803045 NR Description: similar to 3-hydroxyisobutyrate dehydrogenase (B.
  misc_feature (1)..(263): Homolog of NCBI NO: 16078460 NR Description: similar to 3-hydroxyisobutyrate dehydrogenase subtilis] >gi|3183454|sp|O34948|YKWC_BACSU Hypothetical
  misc_feature (1)..(270): Homolog of NCBI NO: 15898379 NR Description: Oxidoreductase [Sulfolobus solfataricus]

SEQ ID NO: 88761 - protein, 270 aa, Arabidopsis thaliana
  peptide (1)..(270): Ceres Seq. ID no. 12712243
  misc_feature (1)..(147): Pfam Name: NAD binding domain of 6-phosphogluconate dehydrogenase Pfam Description: NAD binding domain of 6-phosphogluconate
  misc_feature (1)..(270): Homolog of NCBI NO: 18409781 NR Description: putative dehydrogenase; protein id: At1g71180.1, by cDNA: gi_15293142, supported by cDNA: gi_21281067 [Arabidopsis >gi|15293143|gb|AAK93682.1| putative dehydrogenase dehydrogenase
  misc_feature (1)..(270): Homolog of NCBI NO: 25283629 NR Description: probable dehydrogenase F23N20.17 [imported] -
  misc_feature (1)..(270): Homolog of NCBI NO: 30698779 NR Description: dehydrogenase -related [Arabidopsis thaliana]
  misc_feature (1)..(270): Homolog of NCBI NO: 15233455 NR Description: putative protein; protein id: At4g29120.1, by cDNA: gi_13877868, supported by cDNA: gi_17065607 [Arabidopsis
  misc_feature (1)..(267): Homolog of NCBI NO: 34909392 NR Description: putative dehydrogenase [Oryza sativa (japonica group)] >gi|20521418|dbj|BAB91928.1| putative dehydrogenase
  misc_feature (1)..(259): Homolog of NCBI NO: 15896585 NR Description: Dehydrogenase related to 3-hydroxyisobutyrate YKWC B.subtilis ortholog [Clostridium acetobutylicum]
  misc_feature (1)..(257): Homolog of NCBI NO: 30022129 NR Description: 3-hydroxyisobutyrate dehydrogenase [Bacillus
  misc_feature (1)..(264): Homolog of NCBI NO: 16803045 NR Description: similar to 3-hydroxyisobutyrate dehydrogenase (B.
  misc_feature (1)..(259): Homolog of NCBI NO: 16078460 NR Description: similar to 3-hydroxyisobutyrate dehydrogenase subtilis] >gi|3183454|sp|O34948|YKWC_BACSU Hypothetical
  misc_feature (1)..(266): Homolog of NCBI NO: 15898379 NR Description: Oxidoreductase [Sulfolobus solfataricus]
MVSHIIAAGYSVTVYARDLRKTKDLQTKGARIANSPKELAEMSDVVFTIVGNFNDVRSLLLGDDGVLSGLTPGGVTVDMTSSKPGLAREIHAEARRRNCWAVDAPVSGGDAGAREGTLGIFAGGDSEIVEWLSPVMKNIGTVTYMGEAGSGQSCKIGNQIAGASNLVGLAEGIVFAEKAGLDTVKWLEAVKDGAAGSAVMRLFGEMIVKRDYRATGFAEYMVKDLGMAAEAAMPGAALSKQLFTGMVANGDGKLGIQGVVSVIRRLNGIS

SEQ ID NO: 88762 - DNA, 1061 bp, Arabidopsis thaliana
  misc_feature (1)..(1061): Ceres Seq. ID no. 12712255
  misc_feature: MA Experiment ID: 108501 Result: Down-regulated in Transcription
  misc_feature: MA Experiment 108501 PARAMETER Experiment Name: At_ap2_floral_buds_cDNA_P Parameter: Plant Line Value: ap2 (Ler.)
  misc_feature: MA Experiment 108501 PARAMETER Experiment Name: At_ap2_floral_buds_cDNA_P Parameter: Tissue Value: Closed Flower
  misc_feature: MA Experiment ID: 20000111 Result: Up-regulated in Transcription
  misc_feature: MA Experiment 20000111 PARAMETER Experiment Name: At_42deg_Heat_cDNA_P Parameter: Temperature (deg C) Value: 42 vs. 22
  misc_feature: MA Experiment 20000111 PARAMETER Experiment Name: At_42deg_Heat_cDNA_P Parameter: Timepoint (hr) Value: 6
  misc_feature: MA Experiment 20000111 PARAMETER Experiment Name: At_42deg_Heat_cDNA_P Parameter: Tissue Value: Aerial
  misc_feature: MA Experiment ID: 20000112 Result: Up-regulated in Transcription
  misc_feature: MA Experiment 20000112 PARAMETER Experiment Name: At_42deg_Heat_cDNA_P Parameter: Temperature (deg C) Value: 42 vs. 22
  misc_feature: MA Experiment 20000112 PARAMETER Experiment Name: At_42deg_Heat_cDNA_P Parameter: Timepoint (hr) Value: 2
  misc_feature: MA Experiment 20000112 PARAMETER Experiment Name: At_42deg_Heat_cDNA_P Parameter: Tissue Value: Aerial
  misc_feature: MA Experiment ID: 20000144 Result: Up-regulated in Transcription
  misc_feature: MA Experiment 20000144 PARAMETER Experiment Name: At_42deg_Heat_cDNA_P Parameter: Temperature (deg C) Value: 42 vs. 22
  misc_feature: MA Experiment 20000144 PARAMETER Experiment Name: At_42deg_Heat_cDNA_P Parameter: Timepoint (hr) Value: 1
  misc_feature: MA Experiment 20000144 PARAMETER Experiment Name: At_42deg_Heat_cDNA_P Parameter: Tissue Value: Aerial
  misc_feature: MA Experiment ID: 20000173 Result: Up-regulated in Transcription
  misc_feature: MA Experiment 20000173 PARAMETER Experiment Name: At_42deg_Heat_P Parameter: Age (day) Value: 14
  misc_feature: MA Experiment 20000173 PARAMETER Experiment Name: At_42deg_Heat_P Parameter: Organism Value: A. thaliana
  misc_feature: MA Experiment 20000173 PARAMETER Experiment Name: At_42deg_Heat_P Parameter: Plant Line Value: WS
  misc_feature: MA Experiment 20000173 PARAMETER Experiment Name: At_42deg_Heat_P Parameter: Temperature (deg C) Value: 42 vs. 22
  misc_feature: MA Experiment 20000173 PARAMETER Experiment Name: At_42deg_Heat_P Parameter: Timepoint (hr) Value: 6
  misc_feature: MA Experiment 20000173 PARAMETER Experiment Name: At_42deg_Heat_P Parameter: Tissue Value: Aerial
  misc_feature: MA Experiment ID: 20000224 Result: Down-regulated in Transcription
  misc_feature: MA Experiment ID: 20000438 Result: Down-regulated in Transcription
  misc_feature: MA Experiment 20000438 PARAMETER Experiment Name: At_Shoots__P Parameter: Age (day) Value: 14
  misc_feature: MA Experiment 20000438 PARAMETER Experiment Name: At_Shoots__P Parameter: Tissue Value: Shoots vs. Whole Plant
  misc_feature: MA Experiment ID: 20001451 Result: Up-regulated in Transcription
  misc_feature: MA Experiment 20001451 PARAMETER Experiment Name: At_Far-red-induction_P Parameter: Age (day) Value: 7
  misc_feature: MA Experiment 20001451 PARAMETER Experiment Name: At_Far-red-induction_P Parameter: Light Value: Far-red vs. White
  misc_feature: MA Experiment 20001451 PARAMETER Experiment Name: At_Far-red-induction_P Parameter: Organism Value: A. thaliana
  misc_feature: MA Experiment 20001451 PARAMETER Experiment Name: At_Far-red-induction_P Parameter: Plant Line Value: Columbia
  misc_feature: MA Experiment 20001451 PARAMETER Experiment Name: At_Far-red-induction_P Parameter: Timepoint (hr) Value: 24
  misc_feature: MA Experiment 20001451 PARAMETER Experiment Name: At_Far-red-induction_P Parameter: Tissue Value: Whole Plant
atggagactcagtatccgaaactaatcgaaccatccaagacccgaattggatggattgggatcgggataatgggatcagcgatggtttctcatatcctcgccgcaggctattcagtcaccgtttatgctcgcgatcttcgtaaaacaaaggatctgcaaaccaaaggaggtcgtaccgccaatagccccaaagagttaggggagatgagcgacgttgtgttcacgatcgttggaaactctaacgatgttagatcgttgcttcttggggatgatggtgtactctctggtcttaaacccggtggagtaacagtggacatgactagtagcaagccaggattggcgcgtgagatatacgcggaggcgaggcggagggattgctgggcggtggatgcgcctgtatcgggtggagacgctggagcacgtgaggggaagctaacgatattcgccggcggagattccgagattgtggagtggttggctccggtgatgaaaacgatgggaattgtgaggtttatgggaggagctgggagtggacagagctgtaaaattgggaatcagatttgtgttggaagcaacatgattggattagctgaagggattgtgtttgctgagaaggcgggtttagatccggtgaaatggcttgaggcggttaaggacggtgcagctggatcggcggttatgcggcttttcggggagatgatggcggtgagggactataaggcgacggggtttgcggagtatatggtgaaagatttgggaatggcggcggaggcggcaatggcgatgcctggaactgctttgaacaagcagttgttcactgtaatggtggcaaatggagatgggaagttaggatttcaaggcgtcgtcgatgttattaggagacttaacggcttatcctgataaaactagtgttaactaggcaagcttgttttccatttggttagaagttgctaataagaacatggagtctcaccaatctcgagaactatagttacaagagtgtgtaacattagtttccaattggattatcaacttctacctcctataactatttctctgtt

SEQ ID NO: 88763 - protein, 299 aa, Arabidopsis thaliana
  peptide (1)..(299): Ceres Seq. ID no. 12712256
  misc_feature (13)..(175): Pfam Name: NAD binding domain of 6-phosphogluconate dehydrogenase Pfam Description: NAD binding domain of 6-phosphogluconate
  misc_feature (1)..(299): Homolog of NCBI NO: 30698779 NR Description: dehydrogenase -related [Arabidopsis thaliana]
  misc_feature (1)..(299): Homolog of NCBI NO: 18409781 NR Description: putative dehydrogenase; protein id: At1g71180.1, by cDNA: gi_15293142, supported by cDNA: gi_21281067 [Arabidopsis >gi|15293143|gb|AAK93682.1| putative dehydrogenase dehydrogenase
  misc_feature (1)..(299): Homolog of NCBI NO: 25283629 NR Description: probable dehydrogenase F23N20.17 [imported] -
  misc_feature (8)..(299): Homolog of NCBI NO: 15233455 NR Description: putative protein; protein id: At4g29120.1, by cDNA: gi_13877868, supported by cDNA: gi_17065607 [Arabidopsis
  misc_feature (9)..(296): Homolog of NCBI NO: 34909392 NR Description: putative dehydrogenase [Oryza sativa (japonica group)] >gi|20521418|dbj|BAB91928.1| putative dehydrogenase
  misc_feature (9)..(286): Homolog of NCBI NO: 30022129 NR Description: 3-hydroxyisobutyrate dehydrogenase [Bacillus
  misc_feature (12)..(290): Homolog of NCBI NO: 22982959 NR Description: hypothetical protein [Burkholderia fungorum]
  misc_feature (13)..(288): Homolog of NCBI NO: 16078460 NR Description: similar to 3-hydroxyisobutyrate dehydrogenase subtilis] >gi|3183454|sp|O34948|YKWC_BACSU Hypothetical
  misc_feature (15)..(291): Homolog of NCBI NO: 28379084 NR Description: 3-hydroxyisobutyrate dehydrogenase [Lactobacillus
  misc_feature (14)..(288): Homolog of NCBI NO: 15896585 NR Description: Dehydrogenase related to 3-hydroxyisobutyrate YKWC B.subtilis ortholog [Clostridium acetobutylicum]
METQYPKLIEPSKTRIGWIGIGIMGSAMVSHILAAGYSVTVYARDLRKTKDLQTKGGRTANSPKELGEMSDVVFTIVGNSNDVRSLLLGDDGVLSGLKPGGVTVDMTSSKPGLAREIYAEARRRDCWAVDAPVSGGDAGAREGKLTIFAGGDSEIVEWLAPVMKTMGIVRFMGGAGSGQSCKIGNQICVGSNMIGLAEGIVFAEKAGLDPVKWLEAVKDGAAGSAVMRLFGEMMAVRDYKATGFAEYMVKDLGMAAEAAMAMPGTALNKQLFTVMVANGDGKLGFQGVVDVIRRLNGLS

SEQ ID NO: 88764 - protein, 276 aa, Arabidopsis thaliana
  peptide (1)..(276): Ceres Seq. ID no. 12712257
  misc_feature (1)..(152): Pfam Name: NAD binding domain of 6-phosphogluconate dehydrogenase Pfam Description: NAD binding domain of 6-phosphogluconate
  misc_feature (1)..(276): Homolog of NCBI NO: 30698779 NR Description: dehydrogenase -related [Arabidopsis thaliana]
  misc_feature (1)..(276): Homolog of NCBI NO: 18409781 NR Description: putative dehydrogenase; protein id: At1g71180.1, by cDNA: gi_15293142, supported by cDNA: gi_21281067 [Arabidopsis >gi|15293143|gb|AAK93682.1| putative dehydrogenase dehydrogenase
  misc_feature (1)..(276): Homolog of NCBI NO: 25283629 NR Description: probable dehydrogenase F23N20.17 [imported] -
  misc_feature (1)..(276): Homolog of NCBI NO: 15233455 NR Description: putative protein; protein id: At4g29120.1, by cDNA: gi_13877868, supported by cDNA: gi_17065607 [Arabidopsis
  misc_feature (1)..(273): Homolog of NCBI NO: 34909392 NR Description: putative dehydrogenase [Oryza sativa (japonica group)] >gi|20521418|dbj|BAB91928.1| putative dehydrogenase
  misc_feature (1)..(263): Homolog of NCBI NO: 30022129 NR Description: 3-hydroxyisobutyrate dehydrogenase [Bacillus
  misc_feature (1)..(267): Homolog of NCBI NO: 22982959 NR Description: hypothetical protein [Burkholderia fungorum]
  misc_feature (1)..(265): Homolog of NCBI NO: 16078460 NR Description: similar to 3-hydroxyisobutyrate dehydrogenase subtilis] >gi|3183454|sp|O34948|YKWC_BACSU Hypothetical
  misc_feature (1)..(268): Homolog of NCBI NO: 28379084 NR Description: 3-hydroxyisobutyrate dehydrogenase [Lactobacillus
  misc_feature (1)..(265): Homolog of NCBI NO: 15896585 NR Description: Dehydrogenase related to 3-hydroxyisobutyrate YKWC B.subtilis ortholog [Clostridium acetobutylicum]
MGSAMVSHILAAGYSVTVYARDLRKTKDLQTKGGRTANSPKELGEMSDVVFTIVGNSNDVRSLLLGDDGVLSGLKPGGVTVDMTSSKPGLAREIYAEARRRDCWAVDAPVSGGDAGAREGKLTIFAGGDSEIVEWLAPVMKTMGIVRFMGGAGSGQSCKIGNQICVGSNMIGLAEGIVFAEKAGLDPVKWLEAVKDGAAGSAVMRLFGEMMAVRDYKATGFAEYMVKDLGMAAEAAMAMPGTALNKQLFTVMVANGDGKLGFQGVVDVIRRLNGLS

SEQ ID NO: 88765 - protein, 272 aa, Arabidopsis thaliana
  peptide (1)..(272): Ceres Seq. ID no. 12712258
  misc_feature (1)..(148): Pfam Name: NAD binding domain of 6-phosphogluconate dehydrogenase Pfam Description: NAD binding domain of 6-phosphogluconate
  misc_feature (1)..(272): Homolog of NCBI NO: 30698779 NR Description: dehydrogenase -related [Arabidopsis thaliana]
  misc_feature (1)..(272): Homolog of NCBI NO: 18409781 NR Description: putative dehydrogenase; protein id: At1g71180.1, by cDNA: gi_15293142, supported by cDNA: gi_21281067 [Arabidopsis >gi|15293143|gb|AAK93682.1| putative dehydrogenase dehydrogenase
  misc_feature (1)..(272): Homolog of NCBI NO: 25283629 NR Description: probable dehydrogenase F23N20.17 [imported] -
  misc_feature (1)..(272): Homolog of NCBI NO: 15233455 NR Description: putative protein; protein id: At4g29120.1, by cDNA: gi_13877868, supported by cDNA: gi_17065607 [Arabidopsis
  misc_feature (1)..(269): Homolog of NCBI NO: 34909392 NR Description: putative dehydrogenase [Oryza sativa (japonica group)] >gi|20521418|dbj|BAB91928.1| putative dehydrogenase
  misc_feature (1)..(259): Homolog of NCBI NO: 30022129 NR Description: 3-hydroxyisobutyrate dehydrogenase [Bacillus
  misc_feature (1)..(263): Homolog of NCBI NO: 22982959 NR Description: hypothetical protein [Burkholderia fungorum]
  misc_feature (1)..(261): Homolog of NCBI NO: 16078460 NR Description: similar to 3-hydroxyisobutyrate dehydrogenase subtilis] >gi|3183454|sp|O34948|YKWC_BACSU Hypothetical
  misc_feature (1)..(264): Homolog of NCBI NO: 28379084 NR Description: 3-hydroxyisobutyrate dehydrogenase [Lactobacillus
  misc_feature (1)..(261): Homolog of NCBI NO: 15896585 NR Description: Dehydrogenase related to 3-hydroxyisobutyrate YKWC B.subtilis ortholog [Clostridium acetobutylicum]
MVSHILAAGYSVTVYARDLRKTKDLQTKGGRTANSPKELGEMSDVVFTIVGNSNDVRSLLLGDDGVLSGLKPGGVTVDMTSSKPGLAREIYAEARRRDCWAVDAPVSGGDAGAREGKLTIFAGGDSEIVEWLAPVMKTMGIVRFMGGAGSGQSCKIGNQICVGSNMIGLAEGIVFAEKAGLDPVKWLEAVKDGAAGSAVMRLFGEMMAVRDYKATGFAEYMVKDLGMAAEAAMAMPGTALNKQLFTVMVANGDGKLGFQGVVDVIRRLNGLS

SEQ ID NO: 88766 - DNA, 2169 bp, Arabidopsis thaliana
  misc_feature (1)..(2169): Ceres Seq. ID no. 12712287
  misc_feature: MA Experiment ID: 20000307 Result: Down-regulated in Transcription
  misc_feature: MA Experiment 20000307 PARAMETER Experiment Name: At_Germinating_Seeds_Sub_P Parameter: Age (hr) Value: 24 vs. 0
  misc_feature: MA Experiment 20000307 PARAMETER Experiment Name: At_Germinating_Seeds_Sub_P Parameter: Organism Value: A. thaliana
  misc_feature: MA Experiment 20000307 PARAMETER Experiment Name: At_Germinating_Seeds_Sub_P Parameter: Plant Line Value: WS
  misc_feature: MA Experiment 20000307 PARAMETER Experiment Name: At_Germinating_Seeds_Sub_P Parameter: Tissue Value: Germinating Seeds
atgattacaagcttatctcaaatctcttttgggacattgaggcgctttggctcttctgttttaccttctgcactgaaacgcgaatttgttgaaggattgcgtacgttagtaaggtctggtgatatccgtcgagctgtttccttattctattctgcgccggtcgagcttcagtctcaacaggcttacgcagctctgttccaagcatgtgcagagcaacgcaatctcctcgatggaatcaacttgcaccaccacatgctctcacatccctattgttattcacagaacgttatacttgctaatttcctcattaatatgtatgccaaatgtgggaatatcttatacgcacgacaggtgtttgatacaatgcctgagaggaatgttgtttcatggactgcattgatcacaggctatgtacaggctgggaatgagcaagagggattctgtcttttctcgtctatgttatcccattgtttccctaacgagtttacgctgtcaagcgtgttaacttcatgtcgatatgagcctggaaagcaggtacatggacttgctctgaaacttggtttacattgttcgatctatgtggcgaatgcagttatctctatgtacggtaggtgtcatgatggtgccgcagcatatgaagcttggactgtgtttgaagccataaagtttaagaatttggttacttggaactcaatgattgctgcttttcagtgctgcaatcttgggaaaaaggccattggcgtttttatgcggatgcatagtgatggagtgggatttgatcgtgccacgttgcttaatatatgttcttccttgtacaaaagctctgacttagttcctaatgaggtttcaaagtgttgtcttcaactgcattctctgactgtaaaatccgggttggtgactcagactgaagtggctactgcattgattaaagtttattcagaaatgttagaagactatactgactgctacaagctttttatggaaatgagtcactgcagggacattgttgcttggaatgggattataacagcgtttgcagtgtatgatccggagagagctattcatctctttggacttgtcactgctcgccatgctttgtctatacacgctcaagtgatcaagggtggttttttggctgacacggtgctgaacaactcattaatccatgcgtatgccaagtgtggctctcttgacttgtgtatgcgtgtatttgacgatatggattcgcgggatgttgtttcctggaactcaatgctcaaggcttactcattacatggccaagtagactcaattctaccagtctttcagaaaatggacatcaaccccgattcagcgactttcatagcccttctctcggcttgcagccacgcaggacgagtagaagaaggattgagaatattcagatccatgtttgagaaacctgaaactcttcctcagctaaatcactacgcttgtgtgatcgatatgctaagccgagctgagcgttttgctgaggcagaagaggttatcaagcagatgccaatggacccagatgctgtagtttggattgcattattgggatcatgtagaaagcacggtaacacccggttgggtaagttagcggcagataaacttaaagagctagtcgaacccacaaactcaatgagttacatccagatgtcaaacatatacaacgcagaaggtagctttaacgaagccaatcttagcataaaggagatggaaacatggagagtacggaaagaaccagacttaagctggacagagataggaaacaaggttcacgaattcgcatcgggaggaagacaccgtccggacaaggaagccgtatacagagaattgaagagactgattagttggttaaaggagatgggttacgttccagaaatgaggtcagcttcacaagatatagaagacgaagaacaggaggaagataatttattacatcacagcgagaaacttgcgttagcgtttgcggttatggagggaagaaaatcgagtgattgtggtgtgaatttgatacagattatgaagaacacaaggatctgtattgattgccataacttcatgaaattagcttctaagcttttgggaaaagagattcttatgagagactcgaatcggtttcaccatttcaaagattcttcttgctcctgtaatgactactggtaa

SEQ ID NO: 88767 - protein, 722 aa, Arabidopsis thaliana
  peptide (1)..(722): Ceres Seq. ID no. 12712288
  misc_feature (60)..(94): Pfam Name: PPR repeat Pfam Description: PPR repeat
  misc_feature (1)..(640): Homolog of NCBI NO: 15217470 NR Description: hypothetical protein; protein id: At1g71420.1
  misc_feature (358)..(722): Homolog of NCBI NO: 15217470 NR Description: hypothetical protein; protein id: At1g71420.1
  misc_feature (368)..(722): Homolog of NCBI NO: 15229561 NR Description: hypothetical protein; protein id: At3g24000.1 thaliana] >gi|9294669|dbj|BAB03018.1| contains similarity to
  misc_feature (62)..(346): Homolog of NCBI NO: 15229561 NR Description: hypothetical protein; protein id: At3g24000.1 thaliana] >gi|9294669|dbj|BAB03018.1| contains similarity to
  misc_feature (368)..(722): Homolog of NCBI NO: 15236324 NR Description: putative protein; protein id: At4g13650.1
  misc_feature (58)..(352): Homolog of NCBI NO: 15236324 NR Description: putative protein; protein id: At4g13650.1
  misc_feature (368)..(722): Homolog of NCBI NO: 34896896 NR Description: hypothetical protein [Oryza sativa (japonica group)] >gi|24899461|gb|AAN65031.1| hypothetical protein [Oryza
  misc_feature (94)..(346): Homolog of NCBI NO: 34896896 NR Description: hypothetical protein [Oryza sativa (japonica group)] >gi|24899461|gb|AAN65031.1| hypothetical protein [Oryza
  misc_feature (58)..(438): Homolog of NCBI NO: 15234831 NR Description: putative protein; protein id: At4g30700.1
  misc_feature (368)..(722): Homolog of NCBI NO: 15234831 NR Description: putative protein; protein id: At4g30700.1
MITSLSQISFGTLRRFGSSVLPSALKREFVEGLRTLVRSGDIRRAVSLFYSAPVELQSQQAYAALFQACAEQRNLLDGINLHHHMLSHPYCYSQNVILANFLINMYAKCGNILYARQVFDTMPERNVVSWTALITGYVQAGNEQEGFCLFSSMLSHCFPNEFTLSSVLTSCRYEPGKQVHGLALKLGLHCSIYVANAVISMYGRCHDGAAAYEAWTVFEAIKFKNLVTWNSMIAAFQCCNLGKKAIGVFMRMHSDGVGFDRATLLNICSSLYKSSDLVPNEVSKCCLQLHSLTVKSGLVTQTEVATALIKVYSEMLEDYTDCYKLFMEMSHCRDIVAWNGIITAFAVYDPERAIHLFGLVTARHALSIHAQVIKGGFLADTVLNNSLIHAYAKCGSLDLCMRVFDDMDSRDVVSWNSMLKAYSLHGQVDSILPVFQKMDINPDSATFIALLSACSHAGRVEEGLRIFRSMFEKPETLPQLNHYACVIDMLSRAERFAEAEEVIKQMPMDPDAVVWIALLGSCRKHGNTRLGKLAADKLKELVEPTNSMSYIQMSNIYNAEGSFNEANLSIKEMETWRVRKEPDLSWTEIGNKVHEFASGGRHRPDKEAVYRELKRLISWLKEMGYVPEMRSASQDIEDEEQEEDNLLHHSEKLALAFAVMEGRKSSDCGVNLIQIMKNTRICIDCHNFMKLASKLLGKEILMRDSNRFHHFKDSSCSCNDYW

SEQ ID NO: 88768 - protein, 638 aa, Arabidopsis thaliana
  peptide (1)..(638): Ceres Seq. ID no. 12712289
  misc_feature (1)..(556): Homolog of NCBI NO: 15217470 NR Description: hypothetical protein; protein id: At1g71420.1
  misc_feature (274)..(638): Homolog of NCBI NO: 15217470 NR Description: hypothetical protein; protein id: At1g71420.1
  misc_feature (284)..(638): Homolog of NCBI NO: 15229561 NR Description: hypothetical protein; protein id: At3g24000.1 thaliana] >gi|9294669|dbj|BAB03018.1| contains similarity to
  misc_feature (1)..(262): Homolog of NCBI NO: 15229561 NR Description: hypothetical protein; protein id: At3g24000.1 thaliana] >gi|9294669|dbj|BAB03018.1| contains similarity to
  misc_feature (284)..(638): Homolog of NCBI NO: 15236324 NR Description: putative protein; protein id: At4g13650.1
  misc_feature (1)..(268): Homolog of NCBI NO: 15236324 NR Description: putative protein; protein id: At4g13650.1
  misc_feature (284)..(638): Homolog of NCBI NO: 34896896 NR Description: hypothetical protein [Oryza sativa (japonica group)] >gi|24899461|gb|AAN65031.1| hypothetical protein [Oryza
  misc_feature (10)..(262): Homolog of NCBI NO: 34896896 NR Description: hypothetical protein [Oryza sativa (japonica group)] >gi|24899461|gb|AAN65031.1| hypothetical protein [Oryza
  misc_feature (1)..(354): Homolog of NCBI NO: 15234831 NR Description: putative protein; protein id: At4g30700.1
  misc_feature (284)..(638): Homolog of NCBI NO: 15234831 NR Description: putative protein; protein id: At4g30700.1
MLSHPYCYSQNVILANFLINMYAKCGNILYARQVFDTMPERNVVSWTALITGYVQAGNEQEGFCLFSSMLSHCFPNEFTLSSVLTSCRYEPGKQVHGLALKLGLHCSIYVANAVISMYGRCHDGAAAYEAWTVFEAIKFKNLVTWNSMIAAFQCCNLGKKAIGVFMRMHSDGVGFDRATLLNICSSLYKSSDLVPNEVSKCCLQLHSLTVKSGLVTQTEVATALIKVYSEMLEDYTDCYKLFMEMSHCRDIVAWNGIITAFAVYDPERAIHLFGLVTARHALSIHAQVIKGGFLADTVLNNSLIHAYAKCGSLDLCMRVFDDMDSRDVVSWNSMLKAYSLHGQVDSILPVFQKMDINPDSATFIALLSACSHAGRVEEGLRIFRSMFEKPETLPQLNHYACVIDMLSRAERFAEAEEVIKQMPMDPDAVVWIALLGSCRKHGNTRLGKLAADKLKELVEPTNSMSYIQMSNIYNAEGSFNEANLSIKEMETWRVRKEPDLSWTEIGNKVHEFASGGRHRPDKEAVYRELKRLISWLKEMGYVPEMRSASQDIEDEEQEEDNLLHHSEKLALAFAVMEGRKSSDCGVNLIQIMKNTRICIDCHNFMKLASKLLGKEILMRDSNRFHHFKDSSCSCNDYW

SEQ ID NO: 88769 - protein, 618 aa, Arabidopsis thaliana
  peptide (1)..(618): Ceres Seq. ID no. 12712290
  misc_feature (1)..(536): Homolog of NCBI NO: 15217470 NR Description: hypothetical protein; protein id: At1g71420.1
  misc_feature (254)..(618): Homolog of NCBI NO: 15217470 NR Description: hypothetical protein; protein id: At1g71420.1
  misc_feature (264)..(618): Homolog of NCBI NO: 15229561 NR Description: hypothetical protein; protein id: At3g24000.1 thaliana] >gi|9294669|dbj|BAB03018.1| contains similarity to
  misc_feature (1)..(242): Homolog of NCBI NO: 15229561 NR Description: hypothetical protein; protein id: At3g24000.1 thaliana] >gi|9294669|dbj|BAB03018.1| contains similarity to
  misc_feature (264)..(618): Homolog of NCBI NO: 15236324 NR Description: putative protein; protein id: At4g13650.1
  misc_feature (1)..(248): Homolog of NCBI NO: 15236324 NR Description: putative protein; protein id: At4g13650.1
  misc_feature (264)..(618): Homolog of NCBI NO: 34896896 NR Description: hypothetical protein [Oryza sativa (japonica group)] >gi|24899461|gb|AAN65031.1| hypothetical protein [Oryza
  misc_feature (1)..(242): Homolog of NCBI NO: 34896896 NR Description: hypothetical protein [Oryza sativa (japonica group)] >gi|24899461|gb|AAN65031.1| hypothetical protein [Oryza
  misc_feature (1)..(334): Homolog of NCBI NO: 15234831 NR Description: putative protein; protein id: At4g30700.1
  misc_feature (264)..(618): Homolog of NCBI NO: 15234831 NR Description: putative protein; protein id: At4g30700.1
MYAKCGNILYARQVFDTMPERNVVSWTALITGYVQAGNEQEGFCLFSSMLSHCFPNEFTLSSVLTSCRYEPGKQVHGLALKLGLHCSIYVANAVISMYGRCHDGAAAYEAWTVFEAIKFKNLVTWNSMIAAFQCCNLGKKAIGVFMRMHSDGVGFDRATLLNICSSLYKSSDLVPNEVSKCCLQLHSLTVKSGLVTQTEVATALIKVYSEMLEDYTDCYKLFMEMSHCRDIVAWNGIITAFAVYDPERAIHLFGLVTARHALSIHAQVIKGGFLADTVLNNSLIHAYAKCGSLDLCMRVFDDMDSRDVVSWNSMLKAYSLHGQVDSILPVFQKMDINPDSATFIALLSACSHAGRVEEGLRIFRSMFEKPETLPQLNHYACVIDMLSRAERFAEAEEVIKQMPMDPDAVVWIALLGSCRKHGNTRLGKLAADKLKELVEPTNSMSYIQMSNIYNAEGSFNEANLSIKEMETWRVRKEPDLSWTEIGNKVHEFASGGRHRPDKEAVYRELKRLISWLKEMGYVPEMRSASQDIEDEEQEEDNLLHHSEKLALAFAVMEGRKSSDCGVNLIQIMKNTRICIDCHNFMKLASKLLGKEILMRDSNRFHHFKDSSCSCNDYW

SEQ ID NO: 88770 - DNA, 1908 bp, Arabidopsis thaliana
  misc_feature (1)..(1908): Ceres Seq. ID no. 12712302
  misc_feature: MA Experiment ID: 20000179 Result: Down-regulated in Transcription
  misc_feature: MA Experiment 20000179 PARAMETER Experiment Name: At_Germinating_Seeds_P Parameter: Age (hr) Value: 6 vs. 0
  misc_feature: MA Experiment 20000179 PARAMETER Experiment Name: At_Germinating_Seeds_P Parameter: Tissue Value: Germinating Seeds
atgctgagtgagagtcttttcaaatctcttggacatttggccagccacggtcatttgcacgacgctttcaaaacgttttctcttcttcgtcttcaatcttcttctgcagtttcagatgacctcgttttgcattccgcggcttcccttttatccgcttgcgttgatgttcgtgcatttttagcaggggtgcaagttcacgctcactgtatttcgtcgggtgtcgaatatcactctgtgttagtcccaaagctggttaccttttactctgctttcaatctccacaatgaagctcaatcgattattgagaactctgacattttgcatcccttaccttggaatgtgctcattgcttcgtatgccaagaacgagctttttgaggaggttattgctgcttacaagagaatggtgagcaagggaatccgacccgatgccttcacttatccgtctgttcttaaggcttgtggtgaaacacttgacgttgcctttggaagggtggttcatggttccatcgaggttagctcttacaagtccagcttgtatgtttgtaatgcattgatctctatgtataaaaggtttagaaatatgggtattgctcggaggttgtttgatcgaatgtttgaaagggatgctgtctcatggaatgcagtgataaactgttatgcttcggaaggcatgtggagtgaagcgtttgagcttttcgataaaatgtggttttcaggtgttgaggcttgctctctcataggagcaatacgattgggaaaagagattcacggtcttgctattcacagttcttatgatgggattgacaatgttcgaaacacgttgatcacaatgtactcaaaatgcaaagaccttaggcacgccttaatagtgtttcgacagactgaagaaaatagtttgtgtacttggaactctatcatttccggttatgcgcagctgaacaaatcagaagaagcctctcacctgctgagggagatgttggttgctggctttcagccaaattccattacactagcaagcattctccctctttgtgctcggattgcaaacctgcaacatggaaaagagtttcattgctacatcctgaggcgcaagtgcttcaaggactatacaatgctgtggaactcccttgttgatgtttatgcaaaatcgggaaagattgtagctgcaaagcaagtatctgatttgatgagcaaaagagacgaagtaacatacacttccttgatagatggatacggaaatcaaggtgaagggggagtagccttggccctgttcaaggagatgaccagatctggtattaaacctgaccatgtaaccgtggttgcagttctatcagcctgcagtcattccaagttagtccatgaaggtgaaaggctgtttatgaagatgcagtgtgagtatggtatacgtccttgtcttcaacatttttcttgtatggttgatctctatggcagagcaggtttcctagcaaaagccaaagacataattcacaatatgccatataagccatccggtgccacgtgggctaccctactgaacgcgtgtcacatccatgggaacacacagattggtaaatgggcagcagaaaagctcctggagatgaagccagagaacccgggatactacgtgttaattgcaaatatgtatgcagctgctggttcttggagcaagcttgctgaagtgaggactataatgagggacttgggtgtgaaaaaggatcctggctgtgcttggatcgacacagattctggattttcactgttttcggtgggggacacatcaagccctgaagcatgtaatacttatcctctattagatggactgaatcagctgatgaaagacaatgctggttatgccatcaataaggtgcaaagttcagatgaagaacttcttcaagaaatgggatga

SEQ ID NO: 88771 - protein, 635 aa, Arabidopsis thaliana
  peptide (1)..(635): Ceres Seq. ID no. 12712303
  misc_feature (474)..(508): Pfam Name: PPR repeat Pfam Description: PPR repeat
  misc_feature (183)..(635): Homolog of NCBI NO: 15217514 NR Description: unknown protein; protein id: At1g71490.1
  misc_feature (209)..(583): Homolog of NCBI NO: 15220977 NR Description: hypothetical protein; protein id: At1g22830.1
  misc_feature (6)..(243): Homolog of NCBI NO: 15220977 NR Description: hypothetical protein; protein id: At1g22830.1
  misc_feature (30)..(156): Homolog of NCBI NO: 15220977 NR Description: hypothetical protein; protein id: At1g22830.1
  misc_feature (1)..(471): Homolog of NCBI NO: 15217514 NR Description: unknown protein; protein id: At1g71490.1
  misc_feature (6)..(243): Homolog of NCBI NO: 7487353 NR Description: hypothetical protein T22J18.1 - Arabidopsis
  misc_feature (209)..(347): Homolog of NCBI NO: 7487353 NR Description: hypothetical protein T22J18.1 - Arabidopsis
  misc_feature (183)..(614): Homolog of NCBI NO: 34904686 NR Description: P0446G09.7 [Oryza sativa (japonica
  misc_feature (268)..(628): Homolog of NCBI NO: 15225445 NR Description: hypothetical protein; protein id: At2g13600.1
  misc_feature (84)..(323): Homolog of NCBI NO: 15225445 NR Description: hypothetical protein; protein id: At2g13600.1
MLSESLFKSLGHLASHGHLHDAFKTFSLLRLQSSSAVSDDLVLHSAASLLSACVDVRAFLAGVQVHAHCISSGVEYHSVLVPKLVTFYSAFNLHNEAQSIIENSDILHPLPWNVLIASYAKNELFEEVIAAYKRMVSKGIRPDAFTYPSVLKACGETLDVAFGRVVHGSIEVSSYKSSLYVCNALISMYKRFRNMGIARRLFDRMFERDAVSWNAVINCYASEGMWSEAFELFDKMWFSGVEACSLIGAIRLGKEIHGLAIHSSYDGIDNVRNTLITMYSKCKDLRHALIVFRQTEENSLCTWNSIISGYAQLNKSEEASHLLREMLVAGFQPNSITLASILPLCARIANLQHGKEFHCYILRRKCFKDYTMLWNSLVDVYAKSGKIVAAKQVSDLMSKRDEVTYTSLIDGYGNQGEGGVALALFKEMTRSGIKPDHVTVVAVLSACSHSKLVHEGERLFMKMQCEYGIRPCLQHFSCMVDLYGRAGFLAKAKDIIHNMPYKPSGATWATLLNACHIHGNTQIGKWAAEKLLEMKPENPGYYVLIANMYAAAGSWSKLAEVRTIMRDLGVKKDPGCAWIDTDSGFSLFSVGDTSSPEACNTYPLLDGLNQLMKDNAGYAINKVQSSDEELLQEMG

SEQ ID NO: 88772 - protein, 501 aa, Arabidopsis thaliana
  peptide (1)..(501): Ceres Seq. ID no. 12712304
  misc_feature (340)..(374): Pfam Name: PPR repeat Pfam Description: PPR repeat
  misc_feature (49)..(501): Homolog of NCBI NO: 15217514 NR Description: unknown protein; protein id: At1g71490.1
  misc_feature (75)..(449): Homolog of NCBI NO: 15220977 NR Description: hypothetical protein; protein id: At1g22830.1
  misc_feature (1)..(109): Homolog of NCBI NO: 15220977 NR Description: hypothetical protein; protein id: At1g22830.1
  misc_feature (1)..(22): Homolog of NCBI NO: 15220977 NR Description: hypothetical protein; protein id: At1g22830.1
  misc_feature (1)..(337): Homolog of NCBI NO: 15217514 NR Description: unknown protein; protein id: At1g71490.1
  misc_feature (1)..(109): Homolog of NCBI NO: 7487353 NR Description: hypothetical protein T22J18.1 - Arabidopsis
  misc_feature (75)..(213): Homolog of NCBI NO: 7487353 NR Description: hypothetical protein T22J18.1 - Arabidopsis
  misc_feature (49)..(480): Homolog of NCBI NO: 34904686 NR Description: P0446G09.7 [Oryza sativa (japonica
  misc_feature (134)..(494): Homolog of NCBI NO: 15225445 NR Description: hypothetical protein; protein id: At2g13600.1
  misc_feature (1)..(189): Homolog of NCBI NO: 15225445 NR Description: hypothetical protein; protein id: At2g13600.1
MVSKGIRPDAFTYPSVLKACGETLDVAFGRVVHGSIEVSSYKSSLYVCNALISMYKRFRNMGIARRLFDRMFERDAVSWNAVINCYASEGMWSEAFELFDKMWFSGVEACSLIGAIRLGKEIHGLAIHSSYDGIDNVRNTLITMYSKCKDLRHALIVFRQTEENSLCTWNSIISGYAQLNKSEEASHLLREMLVAGFQPNSITLASILPLCARIANLQHGKEFHCYILRRKCFKDYTMLWNSLVDVYAKSGKIVAAKQVSDLMSKRDEVTYTSLIDGYGNQGEGGVALALFKEMTRSGIKPDHVTVVAVLSACSHSKLVHEGERLFMKMQCEYGIRPCLQHFSCMVDLYGRAGFLAKAKDIIHNMPYKPSGATWATLLNACHIHGNTQIGKWAAEKLLEMKPENPGYYVLIANMYAAAGSWSKLAEVRTIMRDLGVKKDPGCAWIDTDSGFSLFSVGDTSSPEACNTYPLLDGLNQLMKDNAGYAINKVQSSDEELLQEMG

SEQ ID NO: 88773 - protein, 448 aa, Arabidopsis thaliana
  peptide (1)..(448): Ceres Seq. ID no. 12712305
  misc_feature (287)..(321): Pfam Name: PPR repeat Pfam Description: PPR repeat
  misc_feature (1)..(448): Homolog of NCBI NO: 15217514 NR Description: unknown protein; protein id: At1g71490.1
  misc_feature (22)..(396): Homolog of NCBI NO: 15220977 NR Description: hypothetical protein; protein id: At1g22830.1
  misc_feature (1)..(56): Homolog of NCBI NO: 15220977 NR Description: hypothetical protein; protein id: At1g22830.1
  misc_feature (1)..(284): Homolog of NCBI NO: 15217514 NR Description: unknown protein; protein id: At1g71490.1
  misc_feature (1)..(56): Homolog of NCBI NO: 7487353 NR Description: hypothetical protein T22J18.1 - Arabidopsis
  misc_feature (22)..(160): Homolog of NCBI NO: 7487353 NR Description: hypothetical protein T22J18.1 - Arabidopsis
  misc_feature (1)..(427): Homolog of NCBI NO: 34904686 NR Description: P0446G09.7 [Oryza sativa (japonica
  misc_feature (81)..(441): Homolog of NCBI NO: 15225445 NR Description: hypothetical protein; protein id: At2g13600.1
  misc_feature (1)..(136): Homolog of NCBI NO: 15225445 NR Description: hypothetical protein; protein id: At2g13600.1
  misc_feature (52)..(431): Homolog of NCBI NO: 21741755 NR Description: OSJNBa0060B20.9 [Oryza sativa (japonica
MYKRFRNMGIARRLFDRMFERDAVSWNAVINCYASEGMWSEAFELFDKMWFSGVEACSLIGAIRLGKEIHGLAIHSSYDGIDNVRNTLITMYSKCKDLRHALIVFRQTEENSLCTWNSIISGYAQLNKSEEASHLLREMLVAGFQPNSITLASILPLCARIANLQHGKEFHCYILRRKCFKDYTMLWNSLVDVYAKSGKIVAAKQVSDLMSKRDEVTYTSLIDGYGNQGEGGVALALFKEMTRSGIKPDHVTVVAVLSACSHSKLVHEGERLFMKMQCEYGIRPCLQHFSCMVDLYGRAGFLAKAKDIIHNMPYKPSGATWATLLNACHIHGNTQIGKWAAEKLLEMKPENPGYYVLIANMYAAAGSWSKLAEVRTIMRDLGVKKDPGCAWIDTDSGFSLFSVGDTSSPEACNTYPLLDGLNQLMKDNAGYAINKVQSSDEELLQEMG

SEQ ID NO: 88774 - DNA, 1932 bp, Arabidopsis thaliana
  misc_feature (1)..(1932): Ceres Seq. ID no. 12712309
  misc_feature: MA Experiment ID: 20000439 Result: Up-regulated in Transcription
  misc_feature: MA Experiment 20000439 PARAMETER Experiment Name: At_Roots__P Parameter: Age (day) Value: 14 vs. 21
  misc_feature: MA Experiment 20000439 PARAMETER Experiment Name: At_Roots__P Parameter: Organism Value: A. thaliana
  misc_feature: MA Experiment 20000439 PARAMETER Experiment Name: At_Roots__P Parameter: Tissue Value: Roots vs. Whole Plant
  misc_feature: MA Experiment ID: 20000456 Result: Up-regulated in Transcription
  misc_feature: MA Experiment 20000456 PARAMETER Experiment Name: At_100uM_BA_P Parameter: Age (day) Value: 14
  misc_feature: MA Experiment 20000456 PARAMETER Experiment Name: At_100uM_BA_P Parameter: Organism Value: A. thaliana
  misc_feature: MA Experiment 20000456 PARAMETER Experiment Name: At_100uM_BA_P Parameter: Plant Line Value: WS
  misc_feature: MA Experiment 20000456 PARAMETER Experiment Name: At_100uM_BA_P Parameter: Timepoint (hr) Value: 6
  misc_feature: MA Experiment 20000456 PARAMETER Experiment Name: At_100uM_BA_P Parameter: Tissue Value: Aerial
  misc_feature: MA Experiment 20000456 PARAMETER Experiment Name: At_100uM_BA_P Parameter: Treatment Value: 100uM BA vs. No Treatment
  misc_feature: MA Experiment ID: 20000709 Result: Up-regulated in Transcription
  misc_feature: MA Experiment 20000709 PARAMETER Experiment Name: At_15mM_NH4NO3_L-to-H_P Parameter: Age (hr) Value: 14
  misc_feature: MA Experiment 20000709 PARAMETER Experiment Name: At_15mM_NH4NO3_L-to-H_P Parameter: Organism Value: A. thaliana
  misc_feature: MA Experiment 20000709 PARAMETER Experiment Name: At_15mM_NH4NO3_L-to-H_P Parameter: Plant Line Value: WS
  misc_feature: MA Experiment 20000709 PARAMETER Experiment Name: At_15mM_NH4NO3_L-to-H_P Parameter: Timepoint (hr) Value: 4
  misc_feature: MA Experiment 20000709 PARAMETER Experiment Name: At_15mM_NH4NO3_L-to-H_P Parameter: Tissue Value: Aerial
  misc_feature: MA Experiment 20000709 PARAMETER Experiment Name: At_15mM_NH4NO3_L-to-H_P Parameter: Treatment Value: 15mM NH4NO3 vs. 30mM Mannitol
  misc_feature: MA Experiment ID: 20001905 Result: Up-regulated in Transcription
  misc_feature: MA Experiment 20001905 PARAMETER Experiment Name: At_Drought_Reproduction_P Parameter: Age (day) Value: 40
  misc_feature: MA Experiment 20001905 PARAMETER Experiment Name: At_Drought_Reproduction_P Parameter: Organism Value: A. thaliana
  misc_feature: MA Experiment 20001905 PARAMETER Experiment Name: At_Drought_Reproduction_P Parameter: Plant Line Value: WS
  misc_feature: MA Experiment 20001905 PARAMETER Experiment Name: At_Drought_Reproduction_P Parameter: Timepoint (day) Value: 10
  misc_feature: MA Experiment 20001905 PARAMETER Experiment Name: At_Drought_Reproduction_P Parameter: Tissue Value: Rosettes
  misc_feature: MA Experiment 20001905 PARAMETER Experiment Name: At_Drought_Reproduction_P Parameter: Treatment Value: Drought vs. No Drought
atgggttgtatttgtgccaccgcccgttcaccaagcgccgccgttaccgataaagatctattagattccagcaaatccatccttcaacttctccctcatcatcccccgtcgtcttcgtcttcatccaagaaggaaggatctttcacacgtacgacttcttcagcttctatcaccattgtggctaatggttatcctgtggcacgccgtccttccacttcatctgatcgaaacagcaccaaaccggtcgttgttgtgggagctccgaccagaaatccaacaagaagagtcaccgctataccggttgcacagccggcacagcagcagccagcacaatggccgtcttggctggcttctgttgctggggaggccattaaaggatgggttcctcgctgcgcagagtcctttgagaagttagacaaaattggacaggggacttacagcagcgtgtacaaagctagagaccttgaaacggggaagattgtggcgatgaagaaagttcggtttgtgaacatggatccagagagtgttcggtttatggccagggagattctcattcttcgtaagcttgatcaccccaatgttatgaagctagaaggtctagttacctctagactctcaggtagcctctaccttgtctttgagtacatggaacacgatctcgcaggtctagctgcaactcctggaatcaaattctctgaacctcagatcaagtgctatatgcagcaattgttccgtgggcttgaacattgccacagacgaggaattcttcaccgtgatattaaaggctcaaatctcttaatcaataatgaaggtgtcttgaagattggtgatttcggattggcgaatttttaccgaggtgatggagatctgcagctgaccagtcgtgttgtgaccttatggtacagagcacctgagctgttgctcggtgccactgagtatggaccagccattgacctgtggagcgccggctgcattctcactgagctcttcgccggaaaacctattatgccaggacgcacagaagtggagcagatgcacaagatctttaagctctgtggttcaccctcggaagattactggagaagagcaacactgccactagcaacaagctttaaacccagtcatccttacaagcctgttcttgctgaaacctttaaccatttcccttcatcagctctgatgctcatcaataagctactggcaatagaacctgaaaaacggggatcggctgcttctaccttgaggagcgaattcttcaccacggagccactccctgcgaatccatcaaacttacctagatatccaccaagcaaggaacttgatgccaagcttcgcaacgaagaagcaagaaaactaagggcagaaggtaacaagagaagagggggagaaactgtgacaagaggacggccaaaggatcttaaaacagcccagacaccagagtttatggctgcaggacagtccaaagtcacatgcataagccacaaattcaaaacagacgaggaaggtggcaccgggtttaggatagaaccaccaagaagagggatccagcagaatggtaaagctcatgcttcttcaatggttcacccaacagtggctgatacagaatggaacggaggtggaagcatcaaaagacaaactaatgcagagatgaagtctaggacatctcaaacaggagacttgtctggtgaatcttataggagagatcccaacagagattactcaaccggcaatgcaccaaggaaaaacagaatcaattactcaggaccattgatgcctcctggtggaaatcttgaagatttgcttaaagagcatgagaagcagatccaacaagctgtccgcaaagcacgtgtagaaaagtctgcatcaagaaaaaaccaagctttaacaggacaacaacagcagcaacgttacacaggaagaaatgctcggtag

SEQ ID NO: 88775 - protein, 643 aa, Arabidopsis thaliana
  peptide (1)..(643): Ceres Seq. ID no. 12712310
  misc_feature (135)..(419): Pfam Name: Protein kinase domain Pfam Description: Protein kinase domain
  misc_feature (255)..(643): Homolog of NCBI NO: 25406116 NR Description: hypothetical protein F14O23.1 [imported] - thaliana >gi|7239515|gb|AAF43241.1|AC012654_25 Strong similarity the putative protein kinase F26A9.10 gi|6682614 from A. thaliana
  misc_feature (38)..(625): Homolog of NCBI NO: 7488162 NR Description: probable protein kinase T5L19.140 (EC 2.7.1.-) - thaliana >gi|4539004|emb|CAB39625.1| putative protein kinase thaliana] >gi|7267697|emb|CAB78124.1| putative protein kinase
  misc_feature (1)..(533): Homolog of NCBI NO: 15217643 NR Description: protein kinase, putative; protein id: At1g33770.1
  misc_feature (524)..(629): Homolog of NCBI NO: 15217643 NR Description: protein kinase, putative; protein id: At1g33770.1
  misc_feature (160)..(625): Homolog of NCBI NO: 30681286 NR Description: protein kinase -related [Arabidopsis thaliana]
  misc_feature (85)..(580): Homolog of NCBI NO: 15217565 NR Description: putative protein kinase; protein id: At1g09600.1
  misc_feature (85)..(580): Homolog of NCBI NO: 25402555 NR Description: hypothetical protein [imported] - Arabidopsis >gi|3482933|gb|AAC33218.1| Similar to cdc2 protein kinases
  misc_feature (570)..(643): Homolog of NCBI NO: 15217565 NR Description: putative protein kinase; protein id: At1g09600.1
  misc_feature (570)..(643): Homolog of NCBI NO: 25402555 NR Description: hypothetical protein [imported] - Arabidopsis >gi|3482933|gb|AAC33218.1| Similar to cdc2 protein kinases
  misc_feature (85)..(585): Homolog of NCBI NO: 15223647 NR Description: CRK1 protein, putative; protein id: At1g57700.1
MGCICATARSPSAAVTDKDLLDSSKSILQLLPHHPPSSSSSSKKEGSFTRTTSSASITIVANGYPVARRPSTSSDRNSTKPVVVVGAPTRNPTRRVTAIPVAQPAQQQPAQWPSWLASVAGEAIKGWVPRCAESFEKLDKIGQGTYSSVYKARDLETGKIVAMKKVRFVNMDPESVRFMAREILILRKLDHPNVMKLEGLVTSRLSGSLYLVFEYMEHDLAGLAATPGIKFSEPQIKCYMQQLFRGLEHCHRRGILHRDIKGSNLLINNEGVLKIGDFGLANFYRGDGDLQLTSRVVTLWYRAPELLLGATEYGPAIDLWSAGCILTELFAGKPIMPGRTEVEQMHKIFKLCGSPSEDYWRRATLPLATSFKPSHPYKPVLAETFNHFPSSALMLINKLLAIEPEKRGSAASTLRSEFFTTEPLPANPSNLPRYPPSKELDAKLRNEEARKLRAEGNKRRGGETVTRGRPKDLKTAQTPEFMAAGQSKVTCISHKFKTDEEGGTGFRIEPPRRGIQQNGKAHASSMVHPTVADTEWNGGGSIKRQTNAEMKSRTSQTGDLSGESYRRDPNRDYSTGNAPRKNRINYSGPLMPPGGNLEDLLKEHEKQIQQAVRKARVEKSASRKNQALTGQQQQQRYTGRNAR

SEQ ID NO: 88776 - protein, 481 aa, Arabidopsis thaliana; identical to SEQ ID NO: 70663
  peptide (1)..(481): Ceres Seq. ID no. 12712311
  misc_feature (1)..(257): Pfam Name: Protein kinase domain Pfam Description: Protein kinase domain
  misc_feature (93)..(481): Homolog of NCBI NO: 25406116 NR Description: hypothetical protein F14O23.1 [imported] - thaliana >gi|7239515|gb|AAF43241.1|AC012654_25 Strong similarity the putative protein kinase F26A9.10 gi|6682614 from A. thaliana
  misc_feature (1)..(463): Homolog of NCBI NO: 7488162 NR Description: probable protein kinase T5L19.140 (EC 2.7.1.-) - thaliana >gi|4539004|emb|CAB39625.1| putative protein kinase thaliana] >gi|7267697|emb|CAB78124.1| putative protein kinase
  misc_feature (1)..(371): Homolog of NCBI NO: 15217643 NR Description: protein kinase, putative; protein id: At1g33770.1
  misc_feature (362)..(467): Homolog of NCBI NO: 15217643 NR Description: protein kinase, putative; protein id: At1g33770.1
  misc_feature (1)..(463): Homolog of NCBI NO: 30681286 NR Description: protein kinase -related [Arabidopsis thaliana]
  misc_feature (1)..(418): Homolog of NCBI NO: 15217565 NR Description: putative protein kinase; protein id: At1g09600.1
  misc_feature (1)..(418): Homolog of NCBI NO: 25402555 NR Description: hypothetical protein [imported] - Arabidopsis >gi|3482933|gb|AAC33218.1| Similar to cdc2 protein kinases
  misc_feature (408)..(481): Homolog of NCBI NO: 15217565 NR Description: putative protein kinase; protein id: At1g09600.1
  misc_feature (408)..(481): Homolog of NCBI NO: 25402555 NR Description: hypothetical protein [imported] - Arabidopsis >gi|3482933|gb|AAC33218.1| Similar to cdc2 protein kinases
  misc_feature (1)..(423): Homolog of NCBI NO: 15223647 NR Description: CRK1 protein, putative; protein id: At1g57700.1

SEQ ID NO: 88777 - protein, 473 aa, Arabidopsis thaliana; identical to SEQ ID NO: 70664
  peptide (1)..(473): Ceres Seq. ID no. 12712312
  misc_feature (1)..(249): Pfam Name: Protein kinase domain Pfam Description: Protein kinase domain
  misc_feature (85)..(473): Homolog of NCBI NO: 25406116 NR Description: hypothetical protein F14O23.1 [imported] - thaliana >gi|7239515|gb|AAF43241.1|AC012654_25 Strong similarity the putative protein kinase F26A9.10 gi|6682614 from A. thaliana
  misc_feature (1)..(455): Homolog of NCBI NO: 7488162 NR Description: probable protein kinase T5L19.140 (EC 2.7.1.-) - thaliana >gi|4539004|emb|CAB39625.1| putative protein kinase thaliana] >gi|7267697|emb|CAB78124.1| putative protein kinase
  misc_feature (1)..(363): Homolog of NCBI NO: 15217643 NR Description: protein kinase, putative; protein id: At1g33770.1
  misc_feature (354)..(459): Homolog of NCBI NO: 15217643 NR Description: protein kinase, putative; protein id: At1g33770.1
  misc_feature (1)..(455): Homolog of NCBI NO: 30681286 NR Description: protein kinase -related [Arabidopsis thaliana]
  misc_feature (1)..(410): Homolog of NCBI NO: 15217565 NR Description: putative protein kinase; protein id: At1g09600.1
  misc_feature (1)..(410): Homolog of NCBI NO: 25402555 NR Description: hypothetical protein [imported] - Arabidopsis >gi|3482933|gb|AAC33218.1| Similar to cdc2 protein kinases
  misc_feature (400)..(473): Homolog of NCBI NO: 15217565 NR Description: putative protein kinase; protein id: At1g09600.1
  misc_feature (400)..(473): Homolog of NCBI NO: 25402555 NR Description: hypothetical protein [imported] - Arabidopsis >gi|3482933|gb|AAC33218.1| Similar to cdc2 protein kinases
  misc_feature (1)..(415): Homolog of NCBI NO: 15223647 NR Description: CRK1 protein, putative; protein id: At1g57700.1

SEQ ID NO: 88778 - DNA, 1248 bp, Arabidopsis thaliana
  misc_feature (1)..(1248): Ceres Seq. ID no. 12712313
  misc_feature: MA Experiment ID: 108462 Result: Up-regulated in Transcription
  misc_feature: MA Experiment 108462 PARAMETER Experiment Name: At_Germinating_Seeds_cDNA_P Parameter: Age (day) Value: 2 vs. 0
  misc_feature: MA Experiment 108462 PARAMETER Experiment Name: At_Germinating_Seeds_cDNA_P Parameter: Tissue Value: Germinating Seeds
  misc_feature: MA Experiment ID: 108463 Result: Up-regulated in Transcription
  misc_feature: MA Experiment 108463 PARAMETER Experiment Name: At_Germinating_Seeds_cDNA_P Parameter: Age (day) Value: 3 vs. 0
  misc_feature: MA Experiment 108463 PARAMETER Experiment Name: At_Germinating_Seeds_cDNA_P Parameter: Tissue Value: Germinating Seeds
  misc_feature: MA Experiment ID: 108464 Result: Up-regulated in Transcription
  misc_feature: MA Experiment 108464 PARAMETER Experiment Name: At_Germinating_Seeds_cDNA_P Parameter: Age (day) Value: 4 vs. 0
  misc_feature: MA Experiment 108464 PARAMETER Experiment Name: At_Germinating_Seeds_cDNA_P Parameter: Tissue Value: Germinating Seeds
  misc_feature: MA Experiment ID: 108573 Result: Up-regulated in Transcription
  misc_feature: MA Experiment 108573 PARAMETER Experiment Name: At_Drought_cDNA_P Parameter: Timepoint (hr) Value: 6
  misc_feature: MA Experiment 108573 PARAMETER Experiment Name: At_Drought_cDNA_P Parameter: Tissue Value: Aerial
  misc_feature: MA Experiment 108573 PARAMETER Experiment Name: At_Drought_cDNA_P Parameter: Treatment Value: Drought vs. No Drought
  misc_feature: MA Experiment ID: 108577 Result: Down-regulated in Transcription
  misc_feature: MA Experiment 108577 PARAMETER Experiment Name: At_42deg_Heat_cDNA_P Parameter: Temperature (deg C) Value: 42 vs. 22
  misc_feature: MA Experiment 108577 PARAMETER Experiment Name: At_42deg_Heat_cDNA_P Parameter: Timepoint (hr) Value: 6
  misc_feature: MA Experiment 108577 PARAMETER Experiment Name: At_42deg_Heat_cDNA_P Parameter: Tissue Value: Aerial
  misc_feature: MA Experiment ID: 20000112 Result: Down-regulated in Transcription
  misc_feature: MA Experiment 20000112 PARAMETER Experiment Name: At_42deg_Heat_cDNA_P Parameter: Temperature (deg C) Value: 42 vs. 22
  misc_feature: MA Experiment 20000112 PARAMETER Experiment Name: At_42deg_Heat_cDNA_P Parameter: Timepoint (hr) Value: 2
  misc_feature: MA Experiment 20000112 PARAMETER Experiment Name: At_42deg_Heat_cDNA_P Parameter: Tissue Value: Aerial
  misc_feature: MA Experiment ID: 20000180 Result: Up-regulated in Transcription
  misc_feature: MA Experiment 20000180 PARAMETER Experiment Name: At_Germinating_Seeds_P Parameter: Age (hr) Value: 24 vs. 0
  misc_feature: MA Experiment 20000180 PARAMETER Experiment Name: At_Germinating_Seeds_P Parameter: Tissue Value: Germinating Seeds
  misc_feature: MA Experiment ID: 20000185 Result: Down-regulated in Transcription
  misc_feature: MA Experiment 20000185 PARAMETER Experiment Name: At_Roots__P Parameter: Age (day) Value: 7 vs. 21
  misc_feature: MA Experiment 20000185 PARAMETER Experiment Name: At_Roots__P Parameter: Organism Value: A. thaliana
  misc_feature: MA Experiment 20000185 PARAMETER Experiment Name: At_Roots__P Parameter: Tissue Value: Roots vs. Whole Plant
  misc_feature: MA Experiment ID: 20000438 Result: Up-regulated in Transcription
  misc_feature: MA Experiment 20000438 PARAMETER Experiment Name: At_Shoots__P Parameter: Age (day) Value: 14
  misc_feature: MA Experiment 20000438 PARAMETER Experiment Name: At_Shoots__P Parameter: Tissue Value: Shoots vs. Whole Plant
  misc_feature: MA Experiment ID: 20000439 Result: Down-regulated in Transcription
  misc_feature: MA Experiment 20000439 PARAMETER Experiment Name: At_Roots__P Parameter: Age (day) Value: 14 vs. 21
  misc_feature: MA Experiment 20000439 PARAMETER Experiment Name: At_Roots__P Parameter: Organism Value: A. thaliana
  misc_feature: MA Experiment 20000439 PARAMETER Experiment Name: At_Roots__P Parameter: Tissue Value: Roots vs. Whole Plant
  misc_feature: MA Experiment ID: 20001557 Result: Down-regulated in Transcription
  misc_feature: MA Experiment 20001557 PARAMETER Experiment Name: At_Drought_Soil_Dry_P Parameter: Age (day) Value: 27
  misc_feature: MA Experiment 20001557 PARAMETER Experiment Name: At_Drought_Soil_Dry_P Parameter: Organism Value: A. thaliana
  misc_feature: MA Experiment 20001557 PARAMETER Experiment Name: At_Drought_Soil_Dry_P Parameter: Plant Line Value: WS
  misc_feature: MA Experiment 20001557 PARAMETER Experiment Name: At_Drought_Soil_Dry_P Parameter: Post Timepoint (hr) Value: 3
  misc_feature: MA Experiment 20001557 PARAMETER Experiment Name: At_Drought_Soil_Dry_P Parameter: Post-Treatment Value: Re-Water vs. No Drought
  misc_feature: MA Experiment 20001557 PARAMETER Experiment Name: At_Drought_Soil_Dry_P Parameter: Timepoint (day) Value: 13
  misc_feature: MA Experiment 20001557 PARAMETER Experiment Name: At_Drought_Soil_Dry_P Parameter: Treatment Value: Drought vs. No Drought
  misc_feature: MA Experiment ID: 20001558 Result: Down-regulated in Transcription
  misc_feature: MA Experiment 20001558 PARAMETER Experiment Name: At_Drought_Soil_Dry_P Parameter: Age (day) Value: 27
  misc_feature: MA Experiment 20001558 PARAMETER Experiment Name: At_Drought_Soil_Dry_P Parameter: Organism Value: A. thaliana
  misc_feature: MA Experiment 20001558 PARAMETER Experiment Name: At_Drought_Soil_Dry_P Parameter: Plant Line Value: WS
  misc_feature: MA Experiment 20001558 PARAMETER Experiment Name: At_Drought_Soil_Dry_P Parameter: Post Timepoint (hr) Value: 6
  misc_feature: MA Experiment 20001558 PARAMETER Experiment Name: At_Drought_Soil_Dry_P Parameter: Post-Treatment Value: Re-Water vs. No Drought
  misc_feature: MA Experiment 20001558 PARAMETER Experiment Name: At_Drought_Soil_Dry_P Parameter: Timepoint (day) Value: 13
  misc_feature: MA Experiment 20001558 PARAMETER Experiment Name: At_Drought_Soil_Dry_P Parameter: Treatment Value: Drought vs. No Drought
aacaagaaaaggcagagaagagagaggctctgataaaaaaaaaaacaaaaaaaaatgacaaaggcttattcaacacgtgtcctcacgtttctgatattgatctcgctaatggcggtgacactgaacctttttcccacggtagaggcaaagaagcggagtagagatgctcctatagtgaaaggtctctcatggaacttttaccagaaagcatgtccgaaagtcgaaaacatcatcagaaaagagctcaagaaagtcttcaagcgagatattggtttagccgctgccatccttcgtatacatttccatgattgcttcgttcagggatgtgaagcatcagtgctgctagctggatcagccagtggaccaggagaacaatcatcaatcccaaatctgacactacgacaacaagcctttgtcgtcattaataaccttcgtgccctcgtccaaaagaagtgcggtcaagtcgtctcttgctcagatatcctcgctctcgccgctcgcgattccgtcgtcctatcaggagggccagactatgctgtcccacttggccgacgtgactctctagcgttcgcgagccaggaaacgacgttaaataacttaccaccaccgttcttcaacgcgagtcagctcatcgccgacttcgccaacagaaacctcaacatcaccgacttagtagcactttccggtggtcacaccatcggaatcgcgcattgtccgtctttcacagaccgactctacccgaaccaagacccaaccatgaaccagttcttcgccaacagcctcaaacgcacttgtcccaccgcaaactcgagcaacacgcaagtgaatgacataaggagtcctgacgtgttcgacaacaagtactacgttgatctcatgaaccgacaagggctattcacttctgaccaggatctcttcgtggataagaggacacgtggcattgtggaaagctttgcgatcgaccagcagctgttttttgattattttactgtggcgatgatcaagatgggtcagatgagtgtcttaactggaacacaaggagagattcgttccaattgttcagccagaaacacccaaagtttcatgtccgttttggaagaaggcatagaggaagctatttccatgatctaaataaccataaatctcgacctttcctttgtcaactctgtttttatttagttcatgcacttgtggttgggttgtcgaatgcgtaaaactatctgataaataagaacgtcgcttcatctt

SEQ ID NO: 88779 - protein, 358 aa, Arabidopsis thaliana; identical to SEQ ID NO: 25159
  peptide (1)..(358): Ceres Seq. ID no. 12712314
  misc_feature (60)..(303): Pfam Name: Peroxidase Pfam Description: Peroxidase
  misc_feature (1)..(358): Homolog of NCBI NO: 15217539 NR Description: peroxidase, putative; protein id: At1g71695.1, by cDNA: 39968., supported by cDNA: gi_12248036 [Arabidopsis >gi|25453205|sp|Q96520|PE12_ARATH Peroxidase 12 precursor
  misc_feature (1)..(358): Homolog of NCBI NO: 1402914 NR Description: peroxidase [Arabidopsis thaliana]
  misc_feature (18)..(353): Homolog of NCBI NO: 14031049 NR Description: peroxidase [Nicotiana tabacum]
  misc_feature (18)..(358): Homolog of NCBI NO: 1389835 NR Description: peroxidase [Linum usitatissimum]
  misc_feature (9)..(357): Homolog of NCBI NO: 478409 NR Description: peroxidase (EC 1.11.1.7), cationic - adzuki bean
  misc_feature (12)..(342): Homolog of NCBI NO: 1084393 NR Description: peroxidase (EC 1.11.1.7) precursor - parsley
  misc_feature (39)..(342): Homolog of NCBI NO: 7433081 NR Description: probable peroxidase (EC 1.11.1.7) (clone PC42) -
  misc_feature (9)..(339): Homolog of NCBI NO: 7433084 NR Description: probable peroxidase (EC 1.11.1.7) prxr1 - spinach
  misc_feature (35)..(339): Homolog of NCBI NO: 34905838 NR Description: putative peroxidase [Oryza sativa (japonica >gi|15289934|dbj|BAB63629.1| putative peroxidase [Oryza sativa
  misc_feature (31)..(339): Homolog of NCBI NO: 34905826 NR Description: putative peroxidase [Oryza sativa (japonica >gi|15289928|dbj|BAB63623.1| putative peroxidase [Oryza sativa

SEQ ID NO: 88780 - protein, 340 aa, Arabidopsis thaliana; identical to SEQ ID NO: 25160
  peptide (1)..(340): Ceres Seq. ID no. 12712315
  misc_feature (42)..(285): Pfam Name: Peroxidase Pfam Description: Peroxidase
  misc_feature (1)..(340): Homolog of NCBI NO: 15217539 NR Description: peroxidase, putative; protein id: At1g71695.1, by cDNA: 39968., supported by cDNA: gi_12248036 [Arabidopsis >gi|25453205|sp|Q96520|PE12_ARATH Peroxidase 12 precursor
  misc_feature (1)..(340): Homolog of NCBI NO: 1402914 NR Description: peroxidase [Arabidopsis thaliana]
  misc_feature (1)..(335): Homolog of NCBI NO: 14031049 NR Description: peroxidase [Nicotiana tabacum]
  misc_feature (1)..(340): Homolog of NCBI NO: 1389835 NR Description: peroxidase [Linum usitatissimum]
  misc_feature (1)..(339): Homolog of NCBI NO: 478409 NR Description: peroxidase (EC 1.11.1.7), cationic - adzuki bean
  misc_feature (1)..(324): Homolog of NCBI NO: 1084393 NR Description: peroxidase (EC 1.11.1.7) precursor - parsley
  misc_feature (21)..(324): Homolog of NCBI NO: 7433081 NR Description: probable peroxidase (EC 1.11.1.7) (clone PC42) -
  misc_feature (1)..(321): Homolog of NCBI NO: 7433084 NR Description: probable peroxidase (EC 1.11.1.7) prxr1 - spinach
  misc_feature (17)..(321): Homolog of NCBI NO: 34905838 NR Description: putative peroxidase [Oryza sativa (japonica >gi|15289934|dbj|BAB63629.1| putative peroxidase [Oryza sativa
  misc_feature (13)..(321): Homolog of NCBI NO: 34905826 NR Description: putative peroxidase [Oryza sativa (japonica >gi|15289928|dbj|BAB63623.1| putative peroxidase [Oryza sativa

SEQ ID NO: 88781 - DNA, 1497 bp, Arabidopsis thaliana
  misc_feature (1)..(1497): Ceres Seq. ID no. 12712335
  misc_feature: MA Experiment ID: 20000307 Result: Down-regulated in Transcription
  misc_feature: MA Experiment 20000307 PARAMETER Experiment Name: At_Germinating_Seeds_Sub_P Parameter: Age (hr) Value: 24 vs. 0
  misc_feature: MA Experiment 20000307 PARAMETER Experiment Name: At_Germinating_Seeds_Sub_P Parameter: Organism Value: A. thaliana
  misc_feature: MA Experiment 20000307 PARAMETER Experiment Name: At_Germinating_Seeds_Sub_P Parameter: Plant Line Value: WS
  misc_feature: MA Experiment 20000307 PARAMETER Experiment Name: At_Germinating_Seeds_Sub_P Parameter: Tissue Value: Germinating Seeds
  misc_feature: MA Experiment ID: 20000314 Result: Up-regulated in Transcription
  misc_feature: MA Experiment 20000314 PARAMETER Experiment Name: At_14day_Shoots-Roots_Sub_P Parameter: Age (day) Value: 14
  misc_feature: MA Experiment 20000314 PARAMETER Experiment Name: At_14day_Shoots-Roots_Sub_P Parameter: Organism Value: A. thaliana
  misc_feature: MA Experiment 20000314 PARAMETER Experiment Name: At_14day_Shoots-Roots_Sub_P Parameter: Plant Line Value: WS
  misc_feature: MA Experiment 20000314 PARAMETER Experiment Name: At_14day_Shoots-Roots_Sub_P Parameter: Tissue Value: Roots vs. Whole Plant
  misc_feature: MA Experiment ID: 20000315 Result: Up-regulated in Transcription
  misc_feature: MA Experiment 20000315 PARAMETER Experiment Name: At_14day_Shoots-Roots_Sub_P Parameter: Age (day) Value: 14
  misc_feature: MA Experiment 20000315 PARAMETER Experiment Name: At_14day_Shoots-Roots_Sub_P Parameter: Organism Value: A. thaliana
  misc_feature: MA Experiment 20000315 PARAMETER Experiment Name: At_14day_Shoots-Roots_Sub_P Parameter: Plant Line Value: WS
  misc_feature: MA Experiment 20000315 PARAMETER Experiment Name: At_14day_Shoots-Roots_Sub_P Parameter: Tissue Value: Shoots vs. Whole Plant
atggaagacaaaatccagtcagatgatttcacttcccataaaaacccaactcttcctcaagtcattgaagagctaaaagagctctgggctatggttttaccaatcacagcaatgaactgtcttgtctacgtgcgcgccgtcgtgtctgttctcttcctcggccgtctcggtagcctcgagttagccggaggagctctctccatcggattcaccaacatcacaggatactctgttatggttggactcgcctcgggtctcgagccagtgtgtagccaagcctacggtagcaaaaactgggatctcctcacgctctctcttcaccgtatggtcgtgattctcttaatggcctctctgcccataagcctcctttggatcaaccttggacccatcatgcttttcatgggtcaaaacccggagataaccgctacagcggctgaatattgtctctacgcgcttcctgatcttttgaccaatactctccttcagccgttacgtgtttatctaaggtcgcagcgagtgacgaaaccgatgatgtggtgtacgctagcagcagtggcgttccatgtgccattgaattattggcttgtgatggtgaagcattggggtgttcctggtgtggctattgcgtctgttgtgacgaatttgatcatggttgtgcttttggttggttatgtttgggttagtgggatgttgcagaagagagtgagtggtgatggtgatggtgggtctactacgatggtggcggtggtggctcagtcgtcgtctgtgatggagttggttggagggttgggaccgttgatgagagtggcggttccgagttgtttggggatatgtttggaatggtggtggtatgagattgtgattgtgatgggtggttacttggagaatcctaagcttgctgtggctgccactgggattttgattcagactactagtcttatgtatacggttgggaacgagctcggtgcaggtagaccttacaaggccagactagccgcgaacgtggctctagcttgcgcgtttgtagtaggagcattgaatgtggcttggacggttattctaaaagagcgttgggctggactattcactggctatgagccactcaaggtcttggttgcttcggttatgccaattgtcgggctatgcgagctagggaattgtccacagaccacgggctgcgggattcttagagggacaggtcggcctgcggttggggcacatgtgaatctcgggtcgttttatttcgttgggactcccgtggcagttggactagcgttttggttgaaaattgggtttagtgggttgtggtttgggttgctttcagctcaagcggcttgcgtggtttcgatattgtatgcggttttggcgaggacggattgggaaggggaagccgtgaaggcaatgagactgacgagtttggagatgaggaaagttggacaagatgaagagtcttcattgttattgttggatgatgagaagttgggtgatgttttgtaa

SEQ ID NO: 88782 - protein, 498 aa, Arabidopsis thaliana
  peptide (1)..(498): Ceres Seq. ID no. 12712336
  misc_feature (1)..(498): Homolog of NCBI NO: 15217599 NR Description: hypothetical protein; protein id: At1g71870.1
  misc_feature (19)..(488): Homolog of NCBI NO: 28376699 NR Description: putative MATE efflux membrane protein [Oryza
  misc_feature (13)..(467): Homolog of NCBI NO: 15239797 NR Description: putative protein; protein id: At5g49130.1 thaliana] >gi|10176946|dbj|BAB10095.1| similarity to unknown protein [Arabidopsis thaliana]
  misc_feature (24)..(496): Homolog of NCBI NO: 38567909 NR Description: OSJNBa0088I22.5 [Oryza sativa (japonica
  misc_feature (24)..(470): Homolog of NCBI NO: 37536202 NR Description: putative membrane protein [Oryza sativa (japonica group)] >gi|27311284|gb|AAO00710.1| putative membrane protein
  misc_feature (4)..(483): Homolog of NCBI NO: 20532318 NR Description: Putative membrane protein [Oryza sativa (japonica group)] >gi|27356666|gb|AAO06955.1| Putative membrane protein
  misc_feature (15)..(474): Homolog of NCBI NO: 15233459 NR Description: putative protein; protein id: At4g29140.1
  misc_feature (11)..(472): Homolog of NCBI NO: 15242265 NR Description: integral membrane protein-like; protein id:
  misc_feature (11)..(472): Homolog of NCBI NO: 39104576 NR Description: putative integral membrane protein [Arabidopsis
  misc_feature (7)..(472): Homolog of NCBI NO: 18406257 NR Description: expressed protein; protein id: At1g58340.1, by cDNA: gi_6520160 [Arabidopsis thaliana]
MEDKIQSDDFTSHKNPTLPQVIEELKELWAMVLPITAMNCLVYVRAVVSVLFLGRLGSLELAGGALSIGFTNITGYSVMVGLASGLEPVCSQAYGSKNWDLLTLSLHRMVVILLMASLPISLLWINLGPIMLFMGQNPEITATAAEYCLYALPDLLTNTLLQPLRVYLRSQRVTKPMMWCTLAAVAFHVPLNYWLVMVKHWGVPGVAIASVVTNLIMVVLLVGYVWVSGMLQKRVSGDGDGGSTTMVAVVAQSSSVMELVGGLGPLMRVAVPSCLGICLEWWWYEIVIVMGGYLENPKLAVAATGILIQTTSLMYTVGNELGAGRPYKARLAANVALACAFVVGALNVAWTVILKERWAGLFTGYEPLKVLVASVMPIVGLCELGNCPQTTGCGILRGTGRPAVGAHVNLGSFYFVGTPVAVGLAFWLKIGFSGLWFGLLSAQAACVVSILYAVLARTDWEGEAVKAMRLTSLEMRKVGQDEESSLLLLDDEKLGDVL

SEQ ID NO: 88783 - protein, 468 aa, Arabidopsis thaliana
  peptide (1)..(468): Ceres Seq. ID no. 12712337
  misc_feature (1)..(468): Homolog of NCBI NO: 15217599 NR Description: hypothetical protein; protein id: At1g71870.1
  misc_feature (1)..(458): Homolog of NCBI NO: 28376699 NR Description: putative MATE efflux membrane protein [Oryza
  misc_feature (1)..(437): Homolog of NCBI NO: 15239797 NR Description: putative protein; protein id: At5g49130.1 thaliana] >gi|10176946|dbj|BAB10095.1| similarity to unknown protein [Arabidopsis thaliana]
  misc_feature (1)..(466): Homolog of NCBI NO: 38567909 NR Description: OSJNBa0088I22.5 [Oryza sativa (japonica
  misc_feature (1)..(440): Homolog of NCBI NO: 37536202 NR Description: putative membrane protein [Oryza sativa (japonica group)] >gi|27311284|gb|AAO00710.1| putative membrane protein
  misc_feature (1)..(453): Homolog of NCBI NO: 20532318 NR Description: Putative membrane protein [Oryza sativa (japonica group)] >gi|27356666|gb|AAO06955.1| Putative membrane protein
  misc_feature (1)..(444): Homolog of NCBI NO: 15233459 NR Description: putative protein; protein id: At4g29140.1
  misc_feature (1)..(442): Homolog of NCBI NO: 15242265 NR Description: integral membrane protein-like; protein id:
  misc_feature (1)..(442): Homolog of NCBI NO: 39104576 NR Description: putative integral membrane protein [Arabidopsis
  misc_feature (1)..(442): Homolog of NCBI NO: 18406257 NR Description: expressed protein; protein id: At1g58340.1, by cDNA: gi_6520160 [Arabidopsis thaliana]
MVLPITAMNCLVYVRAVVSVLFLGRLGSLELAGGALSIGFTNITGYSVMVGLASGLEPVCSQAYGSKNWDLLTLSLHRMVVILLMASLPISLLWINLGPIMLFMGQNPEITATAAEYCLYALPDLLTNTLLQPLRVYLRSQRVTKPMMWCTLAAVAFHVPLNYWLVMVKHWGVPGVAIASVVTNLIMVVLLVGYVWVSGMLQKRVSGDGDGGSTTMVAVVAQSSSVMELVGGLGPLMRVAVPSCLGICLEWWWYEIVIVMGGYLENPKLAVAATGILIQTTSLMYTVGNELGAGRPYKARLAANVALACAFVVGALNVAWTVILKERWAGLFTGYEPLKVLVASVMPIVGLCELGNCPQTTGCGILRGTGRPAVGAHVNLGSFYFVGTPVAVGLAFWLKIGFSGLWFGLLSAQAACVVSILYAVLARTDWEGEAVKAMRLTSLEMRKVGQDEESSLLLLDDEKLGDVL

SEQ ID NO: 88784 - protein, 461 aa, Arabidopsis thaliana
  peptide (1)..(461): Ceres Seq. ID no. 12712338
  misc_feature (1)..(461): Homolog of NCBI NO: 15217599 NR Description: hypothetical protein; protein id: At1g71870.1
  misc_feature (1)..(451): Homolog of NCBI NO: 28376699 NR Description: putative MATE efflux membrane protein [Oryza
  misc_feature (1)..(430): Homolog of NCBI NO: 15239797 NR Description: putative protein; protein id: At5g49130.1 thaliana] >gi|10176946|dbj|BAB10095.1| similarity to unknown protein [Arabidopsis thaliana]
  misc_feature (1)..(459): Homolog of NCBI NO: 38567909 NR Description: OSJNBa0088I22.5 [Oryza sativa (japonica
  misc_feature (1)..(433): Homolog of NCBI NO: 37536202 NR Description: putative membrane protein [Oryza sativa (japonica group)] >gi|27311284|gb|AAO00710.1| putative membrane protein
  misc_feature (1)..(446): Homolog of NCBI NO: 20532318 NR Description: Putative membrane protein [Oryza sativa (japonica group)] >gi|27356666|gb|AAO06955.1| Putative membrane protein
  misc_feature (1)..(437): Homolog of NCBI NO: 15233459 NR Description: putative protein; protein id: At4g29140.1
  misc_feature (1)..(435): Homolog of NCBI NO: 15242265 NR Description: integral membrane protein-like; protein id:
  misc_feature (1)..(435): Homolog of NCBI NO: 39104576 NR Description: putative integral membrane protein [Arabidopsis
  misc_feature (1)..(435): Homolog of NCBI NO: 18406257 NR Description: expressed protein; protein id: At1g58340.1, by cDNA: gi_6520160 [Arabidopsis thaliana]
MNCLVYVRAVVSVLFLGRLGSLELAGGALSIGFTNITGYSVMVGLASGLEPVCSQAYGSKNWDLLTLSLHRMVVILLMASLPISLLWINLGPIMLFMGQNPEITATAAEYCLYALPDLLTNTLLQPLRVYLRSQRVTKPMMWCTLAAVAFHVPLNYWLVMVKHWGVPGVAIASVVTNLIMVVLLVGYVWVSGMLQKRVSGDGDGGSTTMVAVVAQSSSVMELVGGLGPLMRVAVPSCLGICLEWWWYEIVIVMGGYLENPKLAVAATGILIQTTSLMYTVGNELGAGRPYKARLAANVALACAFVVGALNVAWTVILKERWAGLFTGYEPLKVLVASVMPIVGLCELGNCPQTTGCGILRGTGRPAVGAHVNLGSFYFVGTPVAVGLAFWLKIGFSGLWFGLLSAQAACVVSILYAVLARTDWEGEAVKAMRLTSLEMRKVGQDEESSLLLLDDEKLGDVL

SEQ ID NO: 88785 - DNA, 1477 bp, Arabidopsis thaliana
  misc_feature (1)..(1477): Ceres Seq. ID no. 12712446
  misc_feature: MA Experiment ID: 108462 Result: Up-regulated in Transcription
  misc_feature: MA Experiment 108462 PARAMETER Experiment Name: At_Germinating_Seeds_cDNA_P Parameter: Age (day) Value: 2 vs. 0
  misc_feature: MA Experiment 108462 PARAMETER Experiment Name: At_Germinating_Seeds_cDNA_P Parameter: Tissue Value: Germinating Seeds
  misc_feature: MA Experiment ID: 108594 Result: Down-regulated in Transcription
  misc_feature: MA Experiment 108594 PARAMETER Experiment Name: At_Ler-rhl_Root_cDNA_P Parameter: Plant Line Value: null
  misc_feature: MA Experiment ID: 20001906 Result: Down-regulated in Transcription
  misc_feature: MA Experiment 20001906 PARAMETER Experiment Name: At_Drought_Reproduction_P Parameter: Age (day) Value: 35
  misc_feature: MA Experiment 20001906 PARAMETER Experiment Name: At_Drought_Reproduction_P Parameter: Organism Value: A. thaliana
  misc_feature: MA Experiment 20001906 PARAMETER Experiment Name: At_Drought_Reproduction_P Parameter: Plant Line Value: WS
  misc_feature: MA Experiment 20001906 PARAMETER Experiment Name: At_Drought_Reproduction_P Parameter: Timepoint (day) Value: 5
  misc_feature: MA Experiment 20001906 PARAMETER Experiment Name: At_Drought_Reproduction_P Parameter: Tissue Value: Siliques
  misc_feature: MA Experiment 20001906 PARAMETER Experiment Name: At_Drought_Reproduction_P Parameter: Treatment Value: Drought vs. No Drought
ataattcctaatttcgacacgttctttacataaattaccagatttgccactatgagcttcttgattcctaatagaggagtaggaggaaccaagattcctctctccatcatcgttctcgttctttgtggtttcatgttcttcattctcttatacactgaaagaatcagcttgttgtcttcttcttcctcttcgtcttcatctttcttcaagctaaagtcttgtccgaggaaagatgttagctcgaaacctaaggagaaaattcgaaaggaaagatcagagatattggaagtgcttgacgacaggttcgaattcgatcccgaagagtgtaacgttgcagcagggaaatgggtttacaatagctcaattgaaccactctacaccgatagatcatgtccatacatcgatcgtcaattctcttgtatgaaaaacggacagccagaaactgattatcttcggtgggaatggcagcctgatgactgtacaattccacgatttagtccgaagttagcaatgaacaaactcagaggaaaaagactactttttgtgggagattcgttgcaacgaagccaatgggaatcgttcgtgtgtttggtggaatcaataatacccgaaggagaaaaatcaatgaagcgtagccaaaaatactttgtatttaaagcaaaggaatacaatgcgactatagagttctattgggcaccgtatatcgtcgaatcaaacacagatatacctgtgatttcggatccaaagaaacggatagtgaaagtggactcagtgaaagatcgagctaagttttgggaaggagctgatattttggttttcaacacttatgtttggtggatgagtggtctccgcatgaaagctctgtggggttctttcggaaatggagagagtggtgcagaggcactagacacacaagtggcttacaggctaggactcaagacatgggctaattgggtagactccaccgttgaccctaataagaccagagtcttcttcaccaccatgtctcctactcatactagaagtgcggattggggaaagccaaacggcacgaagtgtttcaacgagacgaaaccgataaaagataagaagttttggggaacaggctctaacaagcagatgatgaaagtagtgtcaagcgtgataaagcacatgactacgcatgtgacagtcatcaacatcacgcagctctctgagtatcgcatcgacgctcacacatcagtttacaccgagacaggtggcaagatcctaaccgctgagcagagggctgatccaatgcatcacgctgattgtatacattggtgtttacctggactacccgatacatggaatcggatcctattggctcatttgtaaatcaagctaggaggaagctgagggttaaacgggaaaaacccaaatcctctgtttttctcctcttgtgttgtcggagatttgtttgtttcagtgtattgtgattgtcgtcaattttcataag

SEQ ID NO: 88786 - protein, 434 aa, Arabidopsis thaliana; identical to SEQ ID NO: 42955
  peptide (1)..(434): Ceres Seq. ID no. 12712447
  misc_feature (262)..(434): Pfam Name: Arabidopsis proteins of unknown function Pfam Description: Arabidopsis proteins of unknown function
  misc_feature (1)..(434): Homolog of NCBI NO: 18412850 NR Description: putative protein; protein id: At5g01360.1, by cDNA: 153592. [Arabidopsis thaliana]
  misc_feature (205)..(434): Homolog of NCBI NO: 11291874 NR Description: hypothetical protein T10O8.70 - Arabidopsis >gi|7320714|emb|CAB81919.1| putative protein [Arabidopsis
  misc_feature (1)..(197): Homolog of NCBI NO: 11291874 NR Description: hypothetical protein T10O8.70 - Arabidopsis >gi|7320714|emb|CAB81919.1| putative protein [Arabidopsis
  misc_feature (60)..(434): Homolog of NCBI NO: 15228789 NR Description: putative protein; protein id: At3g55990.1
  misc_feature (60)..(434): Homolog of NCBI NO: 26452343 NR Description: unknown protein [Arabidopsis thaliana]
  misc_feature (72)..(434): Homolog of NCBI NO: 15219382 NR Description: hypothetical protein; protein id: At1g73140.1
  misc_feature (64)..(434): Homolog of NCBI NO: 28393743 NR Description: unknown protein [Arabidopsis thaliana]
  misc_feature (92)..(434): Homolog of NCBI NO: 28876013 NR Description: unknown protein [Oryza sativa (japonica
  misc_feature (64)..(434): Homolog of NCBI NO: 15226647 NR Description: hypothetical protein; protein id: At2g40320.1
  misc_feature (86)..(434): Homolog of NCBI NO: 18405283 NR Description: expressed protein; protein id: At2g40150.1, by cDNA: gi_13877598 [Arabidopsis thaliana] Unknown protein [Arabidopsis thaliana]

SEQ ID NO: 88787 - protein, 407 aa, Arabidopsis thaliana; identical to SEQ ID NO: 42956
  peptide (1)..(407): Ceres Seq. ID no. 12712448
  misc_feature (235)..(407): Pfam Name: Arabidopsis proteins of unknown function Pfam Description: Arabidopsis proteins of unknown function
  misc_feature (1)..(407): Homolog of NCBI NO: 18412850 NR Description: putative protein; protein id: At5g01360.1, by cDNA: 153592. [Arabidopsis thaliana]
  misc_feature (178)..(407): Homolog of NCBI NO: 11291874 NR Description: hypothetical protein T10O8.70 - Arabidopsis >gi|7320714|emb|CAB81919.1| putative protein [Arabidopsis
  misc_feature (1)..(170): Homolog of NCBI NO: 11291874 NR Description: hypothetical protein T10O8.70 - Arabidopsis >gi|7320714|emb|CAB81919.1| putative protein [Arabidopsis
  misc_feature (33)..(407): Homolog of NCBI NO: 15228789 NR Description: putative protein; protein id: At3g55990.1
  misc_feature (33)..(407): Homolog of NCBI NO: 26452343 NR Description: unknown protein [Arabidopsis thaliana]
  misc_feature (45)..(407): Homolog of NCBI NO: 15219382 NR Description: hypothetical protein; protein id: At1g73140.1
  misc_feature (37)..(407): Homolog of NCBI NO: 28393743 NR Description: unknown protein [Arabidopsis thaliana]
  misc_feature (65)..(407): Homolog of NCBI NO: 28876013 NR Description: unknown protein [Oryza sativa (japonica
  misc_feature (37)..(407): Homolog of NCBI NO: 15226647 NR Description: hypothetical protein; protein id: At2g40320.1
  misc_feature (59)..(407): Homolog of NCBI NO: 18405283 NR Description: expressed protein; protein id: At2g40150.1, by cDNA: gi_13877598 [Arabidopsis thaliana] Unknown protein [Arabidopsis thaliana]

SEQ ID NO: 88788 - protein, 311 aa, Arabidopsis thaliana; identical to SEQ ID NO: 42957
  peptide (1)..(311): Ceres Seq. ID no. 12712449
  misc_feature (139)..(311): Pfam Name: Arabidopsis proteins of unknown function Pfam Description: Arabidopsis proteins of unknown function
  misc_feature (1)..(311): Homolog of NCBI NO: 18412850 NR Description: putative protein; protein id: At5g01360.1, by cDNA: 153592. [Arabidopsis thaliana]
  misc_feature (82)..(311): Homolog of NCBI NO: 11291874 NR Description: hypothetical protein T10O8.70 - Arabidopsis >gi|7320714|emb|CAB81919.1| putative protein [Arabidopsis
  misc_feature (1)..(74): Homolog of NCBI NO: 11291874 NR Description: hypothetical protein T10O8.70 - Arabidopsis >gi|7320714|emb|CAB81919.1| putative protein [Arabidopsis
  misc_feature (1)..(311): Homolog of NCBI NO: 15228789 NR Description: putative protein; protein id: At3g55990.1
  misc_feature (1)..(311): Homolog of NCBI NO: 26452343 NR Description: unknown protein [Arabidopsis thaliana]
  misc_feature (1)..(311): Homolog of NCBI NO: 15219382 NR Description: hypothetical protein; protein id: At1g73140.1
  misc_feature (1)..(311): Homolog of NCBI NO: 28393743 NR Description: unknown protein [Arabidopsis thaliana]
  misc_feature (1)..(311): Homolog of NCBI NO: 28876013 NR Description: unknown protein [Oryza sativa (japonica
  misc_feature (1)..(311): Homolog of NCBI NO: 15226647 NR Description: hypothetical protein; protein id: At2g40320.1
  misc_feature (1)..(311): Homolog of NCBI NO: 18405283 NR Description: expressed protein; protein id: At2g40150.1, by cDNA: gi_13877598 [Arabidopsis thaliana] Unknown protein [Arabidopsis thaliana]

SEQ ID NO: 88789 - DNA, 1065 bp, Arabidopsis thaliana
  misc_feature (1)..(1065): Ceres Seq. ID no. 12712466
  misc_feature: MA Experiment ID: 20000171 Result: Up-regulated in Transcription
  misc_feature: MA Experiment 20000171 PARAMETER Experiment Name: At_42deg_Heat_P Parameter: Age (day) Value: 14
  misc_feature: MA Experiment 20000171 PARAMETER Experiment Name: At_42deg_Heat_P Parameter: Organism Value: A. thaliana
  misc_feature: MA Experiment 20000171 PARAMETER Experiment Name: At_42deg_Heat_P Parameter: Plant Line Value: WS
  misc_feature: MA Experiment 20000171 PARAMETER Experiment Name: At_42deg_Heat_P Parameter: Temperature (deg C) Value: 42 vs. 22
  misc_feature: MA Experiment 20000171 PARAMETER Experiment Name: At_42deg_Heat_P Parameter: Timepoint (hr) Value: 1
  misc_feature: MA Experiment 20000171 PARAMETER Experiment Name: At_42deg_Heat_P Parameter: Tissue Value: Aerial
  misc_feature: MA Experiment ID: 20000173 Result: Up-regulated in Transcription
  misc_feature: MA Experiment 20000173 PARAMETER Experiment Name: At_42deg_Heat_P Parameter: Age (day) Value: 14
  misc_feature: MA Experiment 20000173 PARAMETER Experiment Name: At_42deg_Heat_P Parameter: Organism Value: A. thaliana
  misc_feature: MA Experiment 20000173 PARAMETER Experiment Name: At_42deg_Heat_P Parameter: Plant Line Value: WS
  misc_feature: MA Experiment 20000173 PARAMETER Experiment Name: At_42deg_Heat_P Parameter: Temperature (deg C) Value: 42 vs. 22
  misc_feature: MA Experiment 20000173 PARAMETER Experiment Name: At_42deg_Heat_P Parameter: Timepoint (hr) Value: 6
  misc_feature: MA Experiment 20000173 PARAMETER Experiment Name: At_42deg_Heat_P Parameter: Tissue Value: Aerial
atgaagtcatcgagaatgaagtttgcaaagaagttgaaatcaattagagccggagaatatctgaatcaggatcgaattctccaggttctttctgctgcagatgagtttcttccaaagatatctaaccacattcctcagattacatccgccgcttctatctggagaacccctcaaaagtctgaaaatcaaattgcaaatgtaacggaacttttggaaaacgtgagacaaggagaagaagaagcttctggaaattttgtcggcgacgaggagaacgtacggcctccggtgaatcagattccgagagttccgtgtgatcggaaagagagtaaactggcagtttcatgcggatctgatacaggaatcggaagaaagagtttcggatctggatttagaagacctgatttgaattcgaccacacttttcgatccgaaactgttagaagcatttgaattagctgcgttatgctttaggaagattaaggatttttccagagaagccagagtcaatgatgaagacgacatcgtctttcccgaggaagaggaaatcagaaaagacgggaataacggaaatacccttatggatccgttgttggaattcgaggaacggtgtcctccgggaggagaggaatccgttgttttctacacaacgactcttcgaggaatcagaaaaacgttcgacgattgcaacatgatccgatttctgctggatagttttaaggttaagtactacgagagagatgtgtcgatgcatagagagtatagagaagagctccgacgaatctcagcggcggaaacagaggtgttgcctccggttctgttcgtaaaaggaaggtgtatcggtggagctcagagagtgttgggactgcacgagcaagggaagtttaagattctctttgagggcattccaatcaccggagatgaacgttgccggcggtgcgatggttttaggtttttgatgtgtgatggatgcagaggtagtcgccggattatctctggtgatggatcaagaattcagtgtttgatatgtaatgagaatgggttaattgtgtgcgttggttgctcctaa

SEQ ID NO: 88790 - protein, 354 aa, Arabidopsis thaliana
  peptide (1)..(354): Ceres Seq. ID no. 12712467
  misc_feature (210)..(298): Pfam Name: Glutaredoxin Pfam Description: Glutaredoxin
  misc_feature (1)..(188): Homolog of NCBI NO: 15240974 NR Description: putative protein; protein id: At5g01420.1
  misc_feature (179)..(354): Homolog of NCBI NO: 15240974 NR Description: putative protein; protein id: At5g01420.1
  misc_feature (1)..(188): Homolog of NCBI NO: 26451045 NR Description: unknown protein [Arabidopsis thaliana]
  misc_feature (179)..(354): Homolog of NCBI NO: 26451045 NR Description: unknown protein [Arabidopsis thaliana]
  misc_feature (140)..(354): Homolog of NCBI NO: 15237554 NR Description: putative protein; protein id: At5g03870.1
  misc_feature (196)..(354): Homolog of NCBI NO: 15240060 NR Description: putative protein; protein id: At5g06470.1 thaliana] >gi|9758427|dbj|BAB08969.1|
  misc_feature (194)..(353): Homolog of NCBI NO: 34899868 NR Description: OJ1714_H10.16 [Oryza sativa (japonica
  misc_feature (195)..(354): Homolog of NCBI NO: 38346321 NR Description: OJ000126_13.3 [Oryza sativa (japonica
  misc_feature (164)..(354): Homolog of NCBI NO: 15235179 NR Description: putative protein; protein id: At4g10630.1
  misc_feature (184)..(354): Homolog of NCBI NO: 15223291 NR Description: unknown protein; protein id: At1g32760.1 thaliana] >gi|6714276|gb|AAF25972.1|AC017118_9 F6N18.14
MKSSRMKFAKKLKSIRAGEYLNQDRILQVLSAADEFLPKISNHIPQITSAASIWRTPQKSENQIANVTELLENVRQGEEEASGNFVGDEENVRPPVNQIPRVPCDRKESKLAVSCGSDTGIGRKSFGSGFRRPDLNSTTLFDPKLLEAFELAALCFRKIKDFSREARVNDEDDIVFPEEEEIRKDGNNGNTLMDPLLEFEERCPPGGEESVVFYTTTLRGIRKTFDDCNMIRFLLDSFKVKYYERDVSMHREYREELRRISAAETEVLPPVLFVKGRCIGGAQRVLGLHEQGKFKILFEGIPITGDERCRRCDGFRFLMCDGCRGSRRIISGDGSRIQCLICNENGLIVCVGCS

SEQ ID NO: 88791 - protein, 349 aa, Arabidopsis thaliana
  peptide (1)..(349): Ceres Seq. ID no. 12712468
  misc_feature (205)..(293): Pfam Name: Glutaredoxin Pfam Description: Glutaredoxin
  misc_feature (1)..(183): Homolog of NCBI NO: 15240974 NR Description: putative protein; protein id: At5g01420.1
  misc_feature (174)..(349): Homolog of NCBI NO: 15240974 NR Description: putative protein; protein id: At5g01420.1
  misc_feature (1)..(183): Homolog of NCBI NO: 26451045 NR Description: unknown protein [Arabidopsis thaliana]
  misc_feature (174)..(349): Homolog of NCBI NO: 26451045 NR Description: unknown protein [Arabidopsis thaliana]
  misc_feature (135)..(349): Homolog of NCBI NO: 15237554 NR Description: putative protein; protein id: At5g03870.1
  misc_feature (191)..(349): Homolog of NCBI NO: 15240060 NR Description: putative protein; protein id: At5g06470.1 thaliana] >gi|9758427|dbj|BAB08969.1|
  misc_feature (189)..(348): Homolog of NCBI NO: 34899868 NR Description: OJ1714_H10.16 [Oryza sativa (japonica
  misc_feature (190)..(349): Homolog of NCBI NO: 38346321 NR Description: OJ000126_13.3 [Oryza sativa (japonica
  misc_feature (159)..(349): Homolog of NCBI NO: 15235179 NR Description: putative protein; protein id: At4g10630.1
  misc_feature (179)..(349): Homolog of NCBI NO: 15223291 NR Description: unknown protein; protein id: At1g32760.1 thaliana] >gi|6714276|gb|AAF25972.1|AC017118_9 F6N18.14
MKFAKKLKSIRAGEYLNQDRILQVLSAADEFLPKISNHIPQITSAASIWRTPQKSENQIANVTELLENVRQGEEEASGNFVGDEENVRPPVNQIPRVPCDRKESKLAVSCGSDTGIGRKSFGSGFRRPDLNSTTLFDPKLLEAFELAALCFRKIKDFSREARVNDEDDIVFPEEEEIRKDGNNGNTLMDPLLEFEERCPPGGEESVVFYTTTLRGIRKTFDDCNMIRFLLDSFKVKYYERDVSMHREYREELRRISAAETEVLPPVLFVKGRCIGGAQRVLGLHEQGKFKILFEGIPITGDERCRRCDGFRFLMCDGCRGSRRIISGDGSRIQCLICNENGLIVCVGCS

SEQ ID NO: 88792 - DNA, 1125 bp, Arabidopsis thaliana
  misc_feature (1)..(1125): Ceres Seq. ID no. 12712511
  misc_feature: MA Experiment ID: 20000436 Result: Up-regulated in Transcription
  misc_feature: MA Experiment 20000436 PARAMETER Experiment Name: At_Drought_P Parameter: Age (day) Value: 7
  misc_feature: MA Experiment 20000436 PARAMETER Experiment Name: At_Drought_P Parameter: Organism Value: A. thaliana
  misc_feature: MA Experiment 20000436 PARAMETER Experiment Name: At_Drought_P Parameter: Plant Line Value: WS
  misc_feature: MA Experiment 20000436 PARAMETER Experiment Name: At_Drought_P Parameter: Timepoint (hr) Value: 12
  misc_feature: MA Experiment 20000436 PARAMETER Experiment Name: At_Drought_P Parameter: Tissue Value: Whole Plant
  misc_feature: MA Experiment 20000436 PARAMETER Experiment Name: At_Drought_P Parameter: Treatment Value: Drought vs. No Drought
  misc_feature: MA Experiment ID: 20000437 Result: Up-regulated in Transcription
  misc_feature: MA Experiment 20000437 PARAMETER Experiment Name: At_Drought_P Parameter: Age (day) Value: 8
  misc_feature: MA Experiment 20000437 PARAMETER Experiment Name: At_Drought_P Parameter: Organism Value: A. thaliana
  misc_feature: MA Experiment 20000437 PARAMETER Experiment Name: At_Drought_P Parameter: Plant Line Value: WS
  misc_feature: MA Experiment 20000437 PARAMETER Experiment Name: At_Drought_P Parameter: Timepoint (hr) Value: 24
  misc_feature: MA Experiment 20000437 PARAMETER Experiment Name: At_Drought_P Parameter: Tissue Value: Whole Plant
  misc_feature: MA Experiment 20000437 PARAMETER Experiment Name: At_Drought_P Parameter: Treatment Value: Drought vs. No Drought
  misc_feature: MA Experiment ID: 20001451 Result: Up-regulated in Transcription
  misc_feature: MA Experiment 20001451 PARAMETER Experiment Name: At_Far-red-induction_P Parameter: Age (day) Value: 7
  misc_feature: MA Experiment 20001451 PARAMETER Experiment Name: At_Far-red-induction_P Parameter: Light Value: Far-red vs. White
  misc_feature: MA Experiment 20001451 PARAMETER Experiment Name: At_Far-red-induction_P Parameter: Organism Value: A. thaliana
  misc_feature: MA Experiment 20001451 PARAMETER Experiment Name: At_Far-red-induction_P Parameter: Plant Line Value: Columbia
  misc_feature: MA Experiment 20001451 PARAMETER Experiment Name: At_Far-red-induction_P Parameter: Timepoint (hr) Value: 24
  misc_feature: MA Experiment 20001451 PARAMETER Experiment Name: At_Far-red-induction_P Parameter: Tissue Value: Whole Plant
  misc_feature: MA Experiment ID: 20001905 Result: Up-regulated in Transcription
  misc_feature: MA Experiment 20001905 PARAMETER Experiment Name: At_Drought_Reproduction_P Parameter: Age (day) Value: 40
  misc_feature: MA Experiment 20001905 PARAMETER Experiment Name: At_Drought_Reproduction_P Parameter: Organism Value: A. thaliana
  misc_feature: MA Experiment 20001905 PARAMETER Experiment Name: At_Drought_Reproduction_P Parameter: Plant Line Value: WS
  misc_feature: MA Experiment 20001905 PARAMETER Experiment Name: At_Drought_Reproduction_P Parameter: Timepoint (day) Value: 10
  misc_feature: MA Experiment 20001905 PARAMETER Experiment Name: At_Drought_Reproduction_P Parameter: Tissue Value: Rosettes
  misc_feature: MA Experiment 20001905 PARAMETER Experiment Name: At_Drought_Reproduction_P Parameter: Treatment Value: Drought vs. No Drought
  misc_feature: MA Experiment ID: 20001906 Result: Up-regulated in Transcription
  misc_feature: MA Experiment 20001906 PARAMETER Experiment Name: At_Drought_Reproduction_P Parameter: Age (day) Value: 35
  misc_feature: MA Experiment 20001906 PARAMETER Experiment Name: At_Drought_Reproduction_P Parameter: Organism Value: A. thaliana
  misc_feature: MA Experiment 20001906 PARAMETER Experiment Name: At_Drought_Reproduction_P Parameter: Plant Line Value: WS
  misc_feature: MA Experiment 20001906 PARAMETER Experiment Name: At_Drought_Reproduction_P Parameter: Timepoint (day) Value: 5
  misc_feature: MA Experiment 20001906 PARAMETER Experiment Name: At_Drought_Reproduction_P Parameter: Tissue Value: Siliques
  misc_feature: MA Experiment 20001906 PARAMETER Experiment Name: At_Drought_Reproduction_P Parameter: Treatment Value: Drought vs. No Drought
  misc_feature: MA Experiment ID: 20001911 Result: Up-regulated in Transcription
  misc_feature: MA Experiment 20001911 PARAMETER Experiment Name: At_Drought_Reproduction_P Parameter: Age (day) Value: 40
  misc_feature: MA Experiment 20001911 PARAMETER Experiment Name: At_Drought_Reproduction_P Parameter: Organism Value: A. thaliana
  misc_feature: MA Experiment 20001911 PARAMETER Experiment Name: At_Drought_Reproduction_P Parameter: Plant Line Value: WS
  misc_feature: MA Experiment 20001911 PARAMETER Experiment Name: At_Drought_Reproduction_P Parameter: Timepoint (day) Value: 10
  misc_feature: MA Experiment 20001911 PARAMETER Experiment Name: At_Drought_Reproduction_P Parameter: Tissue Value: Flowers
  misc_feature: MA Experiment 20001911 PARAMETER Experiment Name: At_Drought_Reproduction_P Parameter: Treatment Value: Drought vs. No Drought
atgaagctagaggtgtgtgggagaatgggttggcacacacgggtcacagtttcacagacacgcggctcctcgatggttgtcttccgccgacagccgccgcgtacgagacgagacgcgattcaccggagagtcaaagaggcaaggaggagaaagccaatggcacatgccacgtttacgtcggaagggcagaatatggagtcgtttcgactcttgagtggccacaaaatcccagccgttggactcggcacgtggcgatctgggtctcaagccgcccacgccgttgtcactgcaatcgtcgagggtggctataggcacatagatacagcttgggagtatggtgatcagagagaggtcggtcaaggaataaagagggcgatgcacgctggccttgaaaggagggacctctttgtgacctcgaagctttggtgcactgagttatctcctgagagagtgcgtcctgctctgcaaaacacccttaaagagcttcaattagagtaccttgatctctacttgattcactggcctatccggctaagagaaggagccagtaagccaccaaaggcaggggacgttcttgactttgacatggaaggagtttggagagaaatggagaatctttccaaggacagtctcgtcaggaatatcggtgtctgtaactttacagtcactaagctcaataagctgctaggatttgctgaactgatccctgccgtttgccagatggaaatgcatcctggttggagaaacgataggatactcgaattctgcaagaagaatgagatccatgttactgcctattctccattgggatctcaagaaggcgggagagatctgatacacgatcagacggtggataggatagcgaagaagctgaataagacaccgggacagattctagtgaaatggggtttgcagagaggaacaagtgtcatccctaagtcattgaatccagagaggatcaaagagaacatcaaagtgtttgattgggtgatccctgaacaagacttccaagctctcaacagcatcactgaccagaaacgagtgatagacggtgaggatcttttcgtcaacaagaccgaaggtccattccgtagtgtggctgatctatgggaccatgaagactaa

SEQ ID NO: 88793 - protein, 374 aa, Arabidopsis thaliana
  peptide (1)..(374): Ceres Seq. ID no. 12712512
  misc_feature (53)..(374): Homolog of NCBI NO: 30679355 NR Description: aldose reductase, putative [Arabidopsis thaliana]
  misc_feature (143)..(374): Homolog of NCBI NO: 30679359 NR Description: aldose reductase, putative [Arabidopsis thaliana]
  misc_feature (53)..(144): Homolog of NCBI NO: 30679359 NR Description: aldose reductase, putative [Arabidopsis thaliana]
  misc_feature (53)..(374): Homolog of NCBI NO: 11250961 NR Description: aldose reductase-like protein - Arabidopsis
  misc_feature (53)..(374): Homolog of NCBI NO: 113595 NR Description: Aldose reductase (AR) (Aldehyde reductase)
  misc_feature (53)..(374): Homolog of NCBI NO: 728592 NR Description: aldose reductase [Hordeum vulgare]
  misc_feature (53)..(374): Homolog of NCBI NO: 543632 NR Description: aldehyde reductase (EC 1.1.1.21), NADPH-dependent
  misc_feature (53)..(374): Homolog of NCBI NO: 2130022 NR Description: aldose reductase homolog - wild oat
  misc_feature (53)..(373): Homolog of NCBI NO: 4539944 NR Description: aldose reductase ALDRXV4 [Xerophyta viscosa]
  misc_feature (68)..(373): Homolog of NCBI NO: 30687247 NR Description: aldo/keto reductase family [Arabidopsis thaliana]
MKLEVCGRMGWHTRVTVSQTRGSSMVVFRRQPPRTRRDAIHRRVKEARRRKPMAHATFTSEGQNMESFRLLSGHKIPAVGLGTWRSGSQAAHAVVTAIVEGGYRHIDTAWEYGDQREVGQGIKRAMHAGLERRDLFVTSKLWCTELSPERVRPALQNTLKELQLEYLDLYLIHWPIRLREGASKPPKAGDVLDFDMEGVWREMENLSKDSLVRNIGVCNFTVTKLNKLLGFAELIPAVCQMEMHPGWRNDRILEFCKKNEIHVTAYSPLGSQEGGRDLIHDQTVDRIAKKLNKTPGQILVKWGLQRGTSVIPKSLNPERIKENIKVFDWVIPEQDFQALNSITDQKRVIDGEDLFVNKTEGPFRSVADLWDHED

SEQ ID NO: 88794 - protein, 366 aa, Arabidopsis thaliana
  peptide (1)..(366): Ceres Seq. ID no. 12712513
  misc_feature (45)..(366): Homolog of NCBI NO: 30679355 NR Description: aldose reductase, putative [Arabidopsis thaliana]
  misc_feature (135)..(366): Homolog of NCBI NO: 30679359 NR Description: aldose reductase, putative [Arabidopsis thaliana]
  misc_feature (45)..(136): Homolog of NCBI NO: 30679359 NR Description: aldose reductase, putative [Arabidopsis thaliana]
  misc_feature (45)..(366): Homolog of NCBI NO: 11250961 NR Description: aldose reductase-like protein - Arabidopsis
  misc_feature (45)..(366): Homolog of NCBI NO: 113595 NR Description: Aldose reductase (AR) (Aldehyde reductase)
  misc_feature (45)..(366): Homolog of NCBI NO: 728592 NR Description: aldose reductase [Hordeum vulgare]
  misc_feature (45)..(366): Homolog of NCBI NO: 543632 NR Description: aldehyde reductase (EC 1.1.1.21), NADPH-dependent
  misc_feature (45)..(366): Homolog of NCBI NO: 2130022 NR Description: aldose reductase homolog - wild oat
  misc_feature (45)..(365): Homolog of NCBI NO: 4539944 NR Description: aldose reductase ALDRXV4 [Xerophyta viscosa]
  misc_feature (60)..(365): Homolog of NCBI NO: 30687247 NR Description: aldo/keto reductase family [Arabidopsis thaliana]
MGWHTRVTVSQTRGSSMVVFRRQPPRTRRDAIHRRVKEARRRKPMAHATFTSEGQNMESFRLLSGHKIPAVGLGTWRSGSQAAHAVVTAIVEGGYRHIDTAWEYGDQREVGQGIKRAMHAGLERRDLFVTSKLWCTELSPERVRPALQNTLKELQLEYLDLYLIHWPIRLREGASKPPKAGDVLDFDMEGVWREMENLSKDSLVRNIGVCNFTVTKLNKLLGFAELIPAVCQMEMHPGWRNDRILEFCKKNEIHVTAYSPLGSQEGGRDLIHDQTVDRIAKKLNKTPGQILVKWGLQRGTSVIPKSLNPERIKENIKVFDWVIPEQDFQALNSITDQKRVIDGEDLFVNKTEGPFRSVADLWDHED

SEQ ID NO: 88795 - protein, 350 aa, Arabidopsis thaliana
  peptide (1)..(350): Ceres Seq. ID no. 12712514
  misc_feature (29)..(350): Homolog of NCBI NO: 30679355 NR Description: aldose reductase, putative [Arabidopsis thaliana]
  misc_feature (119)..(350): Homolog of NCBI NO: 30679359 NR Description: aldose reductase, putative [Arabidopsis thaliana]
  misc_feature (29)..(120): Homolog of NCBI NO: 30679359 NR Description: aldose reductase, putative [Arabidopsis thaliana]
  misc_feature (29)..(350): Homolog of NCBI NO: 11250961 NR Description: aldose reductase-like protein - Arabidopsis
  misc_feature (29)..(350): Homolog of NCBI NO: 113595 NR Description: Aldose reductase (AR) (Aldehyde reductase)
  misc_feature (29)..(350): Homolog of NCBI NO: 728592 NR Description: aldose reductase [Hordeum vulgare]
  misc_feature (29)..(350): Homolog of NCBI NO: 543632 NR Description: aldehyde reductase (EC 1.1.1.21), NADPH-dependent
  misc_feature (29)..(350): Homolog of NCBI NO: 2130022 NR Description: aldose reductase homolog - wild oat
  misc_feature (29)..(349): Homolog of NCBI NO: 4539944 NR Description: aldose reductase ALDRXV4 [Xerophyta viscosa]
  misc_feature (44)..(349): Homolog of NCBI NO: 30687247 NR Description: aldo/keto reductase family [Arabidopsis thaliana]
MVVFRRQPPRTRRDAIHRRVKEARRRKPMAHATFTSEGQNMESFRLLSGHKIPAVGLGTWRSGSQAAHAVVTAIVEGGYRHIDTAWEYGDQREVGQGIKRAMHAGLERRDLFVTSKLWCTELSPERVRPALQNTLKELQLEYLDLYLIHWPIRLREGASKPPKAGDVLDFDMEGVWREMENLSKDSLVRNIGVCNFTVTKLNKLLGFAELIPAVCQMEMHPGWRNDRILEFCKKNEIHVTAYSPLGSQEGGRDLIHDQTVDRIAKKLNKTPGQILVKWGLQRGTSVIPKSLNPERIKENIKVFDWVIPEQDFQALNSITDQKRVIDGEDLFVNKTEGPFRSVADLWDHED

SEQ ID NO: 88796 - DNA, 777 bp, Arabidopsis thaliana
  misc_feature (1)..(777): Ceres Seq. ID no. 12712591
  misc_feature: MA Experiment ID: 20000315 Result: Down-regulated in Transcription
  misc_feature: MA Experiment 20000315 PARAMETER Experiment Name: At_14day_Shoots-Roots_Sub_P Parameter: Age (day) Value: 14
  misc_feature: MA Experiment 20000315 PARAMETER Experiment Name: At_14day_Shoots-Roots_Sub_P Parameter: Organism Value: A. thaliana
  misc_feature: MA Experiment 20000315 PARAMETER Experiment Name: At_14day_Shoots-Roots_Sub_P Parameter: Plant Line Value: WS
  misc_feature: MA Experiment 20000315 PARAMETER Experiment Name: At_14day_Shoots-Roots_Sub_P Parameter: Tissue Value: Shoots vs. Whole Plant
  misc_feature: MA Experiment ID: 20000327 Result: Down-regulated in Transcription
  misc_feature: MA Experiment 20000327 PARAMETER Experiment Name: At_42deg_Heat_Sub_P Parameter: Age (day) Value: 14
  misc_feature: MA Experiment 20000327 PARAMETER Experiment Name: At_42deg_Heat_Sub_P Parameter: Organism Value: A. thaliana
  misc_feature: MA Experiment 20000327 PARAMETER Experiment Name: At_42deg_Heat_Sub_P Parameter: Plant Line Value: WS
  misc_feature: MA Experiment 20000327 PARAMETER Experiment Name: At_42deg_Heat_Sub_P Parameter: Temperature (deg C) Value: 42 vs. 22
  misc_feature: MA Experiment 20000327 PARAMETER Experiment Name: At_42deg_Heat_Sub_P Parameter: Timepoint (hr) Value: 1
  misc_feature: MA Experiment 20000327 PARAMETER Experiment Name: At_42deg_Heat_Sub_P Parameter: Tissue Value: Aerial
  misc_feature: MA Experiment ID: 20000328 Result: Down-regulated in Transcription
  misc_feature: MA Experiment 20000328 PARAMETER Experiment Name: At_42deg_Heat_Sub_P Parameter: Age (day) Value: 14
  misc_feature: MA Experiment 20000328 PARAMETER Experiment Name: At_42deg_Heat_Sub_P Parameter: Organism Value: A. thaliana
  misc_feature: MA Experiment 20000328 PARAMETER Experiment Name: At_42deg_Heat_Sub_P Parameter: Plant Line Value: WS
  misc_feature: MA Experiment 20000328 PARAMETER Experiment Name: At_42deg_Heat_Sub_P Parameter: Temperature (deg C) Value: 42 vs. 22
  misc_feature: MA Experiment 20000328 PARAMETER Experiment Name: At_42deg_Heat_Sub_P Parameter: Timepoint (hr) Value: 6
  misc_feature: MA Experiment 20000328 PARAMETER Experiment Name: At_42deg_Heat_Sub_P Parameter: Tissue Value: Aerial
  misc_feature: MA Experiment ID: 20000355 Result: Up-regulated in Transcription
  misc_feature: MA Experiment 20000355 PARAMETER Experiment Name: At_Siliques_Sub_P Parameter: Age (day) Value: 21
  misc_feature: MA Experiment 20000355 PARAMETER Experiment Name: At_Siliques_Sub_P Parameter: Organism Value: A. thaliana
  misc_feature: MA Experiment 20000355 PARAMETER Experiment Name: At_Siliques_Sub_P Parameter: Plant Line Value: WS
  misc_feature: MA Experiment 20000355 PARAMETER Experiment Name: At_Siliques_Sub_P Parameter: Tissue Value: Less Than 5mm Siliques vs. Whole Plant
  misc_feature: MA Experiment ID: 20000440 Result: Up-regulated in Transcription
  misc_feature: MA Experiment 20000440 PARAMETER Experiment Name: At_Closed-Flower__Sub_P Parameter: Tissue Value: Closed Flower vs. Whole Plant
atggaggagattctagagaatcttaatgagttcatcaaactgaattcatcgtcacaaggcaagatcatagctgttgattatatacggggaaggaggattgtatgtgtgacttcagggggaacaacggttccattggagcaacgatgtgttaggtatatcgataatttcagctccggaaacagaggtgctgcttctactgagagttcatactcacatttggaagctgtgaaaatggctgttatggatcagcaaactgcagtagcagaaggcagcttactaaaactcccattctcaaccatatatgagtatcttcagatgttgcggttgattgcagaggcattgaaagatgttggtccatgttcaatgttttatcttgctgctgctgtatctgacttctatgtgccatggaagagcatgacagagcacaaaatagaatcaggatctggtcctttagacataagactagctcaagtccctaaaatgctatcagtcttgagatcaaattgggctccaaaggccttctgcatatcattcaagcttgagacagactcaaagattctgatggagaaggctacaaaggctctaagaaaatacaaagtgcacgcagttgtagccaatgagctatcaacccgtaaggaagaagttgtggttgtttcaagcagcggtaatgttgtggttagacgcgaatgcgataagcctgaatcttttgttgaagataatctcattcgtctcatcgtagatcgacattcaacatacatcaaagaatctcacaactga

SEQ ID NO: 88797 - protein, 258 aa, Arabidopsis thaliana
  peptide (1)..(258): Ceres Seq. ID no. 12712592
  misc_feature (71)..(229): Pfam Name: DNA / pantothenate metabolism flavoprotein Pfam Description: DNA / pantothenate metabolism flavoprotein
  misc_feature (71)..(256): Homolog of NCBI NO: 8778623 NR Description: F5O11.7 [Arabidopsis thaliana]
  misc_feature (2)..(68): Homolog of NCBI NO: 8778623 NR Description: F5O11.7 [Arabidopsis thaliana]
  misc_feature (1)..(258): Homolog of NCBI NO: 15241677 NR Description: putative protein; protein id: At5g02080.1
  misc_feature (15)..(256): Homolog of NCBI NO: 30682728 NR Description: expressed protein [Arabidopsis thaliana]
  misc_feature (52)..(255): Homolog of NCBI NO: 40253297 NR Description: putative Chain A, Crystal Structure Of
  misc_feature (2)..(67): Homolog of NCBI NO: 40253297 NR Description: putative Chain A, Crystal Structure Of
  misc_feature (62)..(253): Homolog of NCBI NO: 34810081 NR Description: Chain A, Crystal Structure Of Synthetase >gi|34810082|pdb|1P9O|B Chain B, Crystal Structure Of
  misc_feature (29)..(68): Homolog of NCBI NO: 34810081 NR Description: Chain A, Crystal Structure Of Synthetase >gi|34810082|pdb|1P9O|B Chain B, Crystal Structure Of
  misc_feature (62)..(253): Homolog of NCBI NO: 18255582 NR Description: RIKEN cDNA 6330579B17 gene [Mus musculus]
  misc_feature (29)..(67): Homolog of NCBI NO: 18255582 NR Description: RIKEN cDNA 6330579B17 gene [Mus musculus]
MEEILENLNEFIKLNSSSQGKIIAVDYIRGRRIVCVTSGGTTVPLEQRCVRYIDNFSSGNRGAASTESSYSHLEAVKMAVMDQQTAVAEGSLLKLPFSTIYEYLQMLRLIAEALKDVGPCSMFYLAAAVSDFYVPWKSMTEHKIESGSGPLDIRLAQVPKMLSVLRSNWAPKAFCISFKLETDSKILMEKATKALRKYKVHAVVANELSTRKEEVVVVSSSGNVVVRRECDKPESFVEDNLIRLIVDRHSTYIKESHN

SEQ ID NO: 88798 - protein, 181 aa, Arabidopsis thaliana
  peptide (1)..(181): Ceres Seq. ID no. 12712593
  misc_feature (1)..(152): Pfam Name: DNA / pantothenate metabolism flavoprotein Pfam Description: DNA / pantothenate metabolism flavoprotein
  misc_feature (1)..(179): Homolog of NCBI NO: 8778623 NR Description: F5O11.7 [Arabidopsis thaliana]
  misc_feature (1)..(181): Homolog of NCBI NO: 15241677 NR Description: putative protein; protein id: At5g02080.1
  misc_feature (1)..(179): Homolog of NCBI NO: 30682728 NR Description: expressed protein [Arabidopsis thaliana]
  misc_feature (1)..(178): Homolog of NCBI NO: 40253297 NR Description: putative Chain A, Crystal Structure Of
  misc_feature (1)..(176): Homolog of NCBI NO: 34810081 NR Description: Chain A, Crystal Structure Of Synthetase >gi|34810082|pdb|1P9O|B Chain B, Crystal Structure Of
  misc_feature (1)..(176): Homolog of NCBI NO: 18255582 NR Description: RIKEN cDNA 6330579B17 gene [Mus musculus]
  misc_feature (1)..(176): Homolog of NCBI NO: 34870890 NR Description: similar to RIKEN cDNA 6330579B17 gene [Rattus
  misc_feature (1)..(142): Homolog of NCBI NO: 13375919 NR Description: hypothetical protein FLJ11838 [Homo sapiens]
  misc_feature (1)..(142): Homolog of NCBI NO: 13385982 NR Description: RIKEN cDNA 6330579B17 [Mus musculus]
  misc_feature (9)..(181): Homolog of NCBI NO: 40556035 NR Description: CNPV097 conserved hypothetical protein [Canarypox >gi|40233860|gb|AAR83443.1| CNPV097 conserved hypothetical
MAVMDQQTAVAEGSLLKLPFSTIYEYLQMLRLIAEALKDVGPCSMFYLAAAVSDFYVPWKSMTEHKIESGSGPLDIRLAQVPKMLSVLRSNWAPKAFCISFKLETDSKILMEKATKALRKYKVHAVVANELSTRKEEVVVVSSSGNVVVRRECDKPESFVEDNLIRLIVDRHSTYIKESHN

SEQ ID NO: 88799 - protein, 178 aa, Arabidopsis thaliana
  peptide (1)..(178): Ceres Seq. ID no. 12712594
  misc_feature (1)..(149): Pfam Name: DNA / pantothenate metabolism flavoprotein Pfam Description: DNA / pantothenate metabolism flavoprotein
  misc_feature (1)..(176): Homolog of NCBI NO: 8778623 NR Description: F5O11.7 [Arabidopsis thaliana]
  misc_feature (1)..(178): Homolog of NCBI NO: 15241677 NR Description: putative protein; protein id: At5g02080.1
  misc_feature (1)..(176): Homolog of NCBI NO: 30682728 NR Description: expressed protein [Arabidopsis thaliana]
  misc_feature (1)..(175): Homolog of NCBI NO: 40253297 NR Description: putative Chain A, Crystal Structure Of
  misc_feature (1)..(173): Homolog of NCBI NO: 34810081 NR Description: Chain A, Crystal Structure Of Synthetase >gi|34810082|pdb|1P9O|B Chain B, Crystal Structure Of
  misc_feature (1)..(173): Homolog of NCBI NO: 18255582 NR Description: RIKEN cDNA 6330579B17 gene [Mus musculus]
  misc_feature (1)..(173): Homolog of NCBI NO: 34870890 NR Description: similar to RIKEN cDNA 6330579B17 gene [Rattus
  misc_feature (1)..(139): Homolog of NCBI NO: 13375919 NR Description: hypothetical protein FLJ11838 [Homo sapiens]
  misc_feature (1)..(139): Homolog of NCBI NO: 13385982 NR Description: RIKEN cDNA 6330579B17 [Mus musculus]
  misc_feature (6)..(178): Homolog of NCBI NO: 40556035 NR Description: CNPV097 conserved hypothetical protein [Canarypox >gi|40233860|gb|AAR83443.1| CNPV097 conserved hypothetical
MDQQTAVAEGSLLKLPFSTIYEYLQMLRLIAEALKDVGPCSMFYLAAAVSDFYVPWKSMTEHKIESGSGPLDIRLAQVPKMLSVLRSNWAPKAFCISFKLETDSKILMEKATKALRKYKVHAVVANELSTRKEEVVVVSSSGNVVVRRECDKPESFVEDNLIRLIVDRHSTYIKESHN

SEQ ID NO: 88800 - DNA, 897 bp, Arabidopsis thaliana
  misc_feature (1)..(897): Ceres Seq. ID no. 12712605
  misc_feature: MA Experiment ID: 20000180 Result: Down-regulated in Transcription
  misc_feature: MA Experiment 20000180 PARAMETER Experiment Name: At_Germinating_Seeds_P Parameter: Age (hr) Value: 24 vs. 0
  misc_feature: MA Experiment 20000180 PARAMETER Experiment Name: At_Germinating_Seeds_P Parameter: Tissue Value: Germinating Seeds
  misc_feature: MA Experiment ID: 20000184 Result: Down-regulated in Transcription
  misc_feature: MA Experiment 20000184 PARAMETER Experiment Name: At_Shoots__P Parameter: Age (day) Value: 7
  misc_feature: MA Experiment 20000184 PARAMETER Experiment Name: At_Shoots__P Parameter: Tissue Value: Shoots vs. Whole Plant
  misc_feature: MA Experiment ID: 20000185 Result: Down-regulated in Transcription
  misc_feature: MA Experiment 20000185 PARAMETER Experiment Name: At_Roots__P Parameter: Age (day) Value: 7 vs. 21
  misc_feature: MA Experiment 20000185 PARAMETER Experiment Name: At_Roots__P Parameter: Organism Value: A. thaliana
  misc_feature: MA Experiment 20000185 PARAMETER Experiment Name: At_Roots__P Parameter: Tissue Value: Roots vs. Whole Plant
  misc_feature: MA Experiment ID: 20001248 Result: Up-regulated in Transcription
  misc_feature: MA Experiment 20001248 PARAMETER Experiment Name: At_Far-red-induction_P Parameter: Age (day) Value: 7
  misc_feature: MA Experiment 20001248 PARAMETER Experiment Name: At_Far-red-induction_P Parameter: Light Value: Far-red vs. White
  misc_feature: MA Experiment 20001248 PARAMETER Experiment Name: At_Far-red-induction_P Parameter: Organism Value: A. thaliana
  misc_feature: MA Experiment 20001248 PARAMETER Experiment Name: At_Far-red-induction_P Parameter: Plant Line Value: Columbia
  misc_feature: MA Experiment 20001248 PARAMETER Experiment Name: At_Far-red-induction_P Parameter: Timepoint (hr) Value: 4
  misc_feature: MA Experiment 20001248 PARAMETER Experiment Name: At_Far-red-induction_P Parameter: Tissue Value: Whole Plant
  misc_feature: MA Experiment ID: 20001450 Result: Up-regulated in Transcription
  misc_feature: MA Experiment 20001450 PARAMETER Experiment Name: At_Far-red-induction_P Parameter: Age (day) Value: 7
  misc_feature: MA Experiment 20001450 PARAMETER Experiment Name: At_Far-red-induction_P Parameter: Light Value: Far-red vs. White
  misc_feature: MA Experiment 20001450 PARAMETER Experiment Name: At_Far-red-induction_P Parameter: Organism Value: A. thaliana
  misc_feature: MA Experiment 20001450 PARAMETER Experiment Name: At_Far-red-induction_P Parameter: Plant Line Value: Columbia
  misc_feature: MA Experiment 20001450 PARAMETER Experiment Name: At_Far-red-induction_P Parameter: Timepoint (hr) Value: 8
  misc_feature: MA Experiment 20001450 PARAMETER Experiment Name: At_Far-red-induction_P Parameter: Tissue Value: Whole Plant
  misc_feature: MA Experiment ID: 20001451 Result: Up-regulated in Transcription
  misc_feature: MA Experiment 20001451 PARAMETER Experiment Name: At_Far-red-induction_P Parameter: Age (day) Value: 7
  misc_feature: MA Experiment 20001451 PARAMETER Experiment Name: At_Far-red-induction_P Parameter: Light Value: Far-red vs. White
  misc_feature: MA Experiment 20001451 PARAMETER Experiment Name: At_Far-red-induction_P Parameter: Organism Value: A. thaliana
  misc_feature: MA Experiment 20001451 PARAMETER Experiment Name: At_Far-red-induction_P Parameter: Plant Line Value: Columbia
  misc_feature: MA Experiment 20001451 PARAMETER Experiment Name: At_Far-red-induction_P Parameter: Timepoint (hr) Value: 24
  misc_feature: MA Experiment 20001451 PARAMETER Experiment Name: At_Far-red-induction_P Parameter: Tissue Value: Whole Plant
atggtttttgaggaggatcgaaaatggtttgcagaagctatgcaatcacaaacggtagatgtagtcaagcggttgaaggagattacacaggtattgcagacacctcaacaagttttggaggctcatgaagtgacccctcaagatattgaaggtttgttggatgagttgcaggaacatgttgaatcgattgatatggctaatgatcttcattccgttggaggcttggtacctcttcttggctacctcaaaaactccaatgctaatatccgggctaagtctgcagatgttgtaagcacaatagttgagaacaatcctcggagtcaagaatcagttatggaagccaatggtttagagtccttgcttttaaggtttacttcagacaccgatatgcattctcgaacacaggctctcggtgcaatatcatctttgattcgcaataataaacctgggatcacaggtttccggattgcaaatggttactctggtttaaaagatgctttggaaactgatagtgtgagatttcaaaggaaagctttaaacttgttgcattatcttctacaagagaatgactcagactccgatattgctatagaattcgggcttcaccatttgatgatgcacctcgtgtctagcttcgatgctgatgtaagagaagctgctcttcgaggattgcttgagctcgtgaaagctagaaaagactgtagtacttgtggttctagcatagtgaaaggcgatgagagactcagacagattctaaaagatcggatcaaagcaatcagccgggtcaaagcaatgagcttgtttatgtcacaagaagatctatcagccgctaaagaggagaggcagctcttagattcactatggaccacaatcttcaacgaaccttcttctctttag

SEQ ID NO: 88801 - protein, 298 aa, Arabidopsis thaliana
  peptide (1)..(298): Ceres Seq. ID no. 12712606
  misc_feature (104)..(145): Pfam Name: Armadillo/beta-catenin-like repeat Pfam Description: Armadillo/beta-catenin-like repeat
  misc_feature (4)..(298): Homolog of NCBI NO: 15241689 NR Description: putative protein; protein id: At5g02150.1
  misc_feature (4)..(298): Homolog of NCBI NO: 21553998 NR Description: unknown [Arabidopsis thaliana]
  misc_feature (4)..(298): Homolog of NCBI NO: 6478927 NR Description: hypothetical protein [Arabidopsis thaliana]
  misc_feature (4)..(298): Homolog of NCBI NO: 18398480 NR Description: expressed protein; protein id: At3g09350.1, by cDNA: 19154. [Arabidopsis thaliana] unknown protein [Arabidopsis thaliana]
  misc_feature (2)..(298): Homolog of NCBI NO: 15232329 NR Description: putative protein; protein id: At3g53800.1, by cDNA: 37834. [Arabidopsis thaliana] >gi|11292176|pir||T45920
  misc_feature (2)..(298): Homolog of NCBI NO: 26449490 NR Description: unknown protein [Arabidopsis thaliana]
  misc_feature (4)..(298): Homolog of NCBI NO: 34897412 NR Description: putative Hsp70 binding protein [Oryza sativa
  misc_feature (11)..(254): Homolog of NCBI NO: 29436427 NR Description: Similar to RIKEN cDNA 1500019G21 gene [Danio
  misc_feature (11)..(254): Homolog of NCBI NO: 12667701 NR Description: Hsp70 binding protein [Danio rerio]
  misc_feature (15)..(231): Homolog of NCBI NO: 15231095 NR Description: hypothetical protein; protein id: At3g51980.1, by cDNA: gi_20268763 [Arabidopsis thaliana]
MVFEEDRKWFAEAMQSQTVDVVKRLKEITQVLQTPQQVLEAHEVTPQDIEGLLDELQEHVESIDMANDLHSVGGLVPLLGYLKNSNANIRAKSADVVSTIVENNPRSQESVMEANGLESLLLRFTSDTDMHSRTQALGAISSLIRNNKPGITGFRIANGYSGLKDALETDSVRFQRKALNLLHYLLQENDSDSDIAIEFGLHHLMMHLVSSFDADVREAALRGLLELVKARKDCSTCGSSIVKGDERLRQILKDRIKAISRVKAMSLFMSQEDLSAAKEERQLLDSLWTTIFNEPSSL

SEQ ID NO: 88802 - protein, 285 aa, Arabidopsis thaliana
  peptide (1)..(285): Ceres Seq. ID no. 12712607
  misc_feature (91)..(132): Pfam Name: Armadillo/beta-catenin-like repeat Pfam Description: Armadillo/beta-catenin-like repeat
  misc_feature (1)..(285): Homolog of NCBI NO: 15241689 NR Description: putative protein; protein id: At5g02150.1
  misc_feature (1)..(285): Homolog of NCBI NO: 21553998 NR Description: unknown [Arabidopsis thaliana]
  misc_feature (1)..(285): Homolog of NCBI NO: 6478927 NR Description: hypothetical protein [Arabidopsis thaliana]
  misc_feature (1)..(285): Homolog of NCBI NO: 18398480 NR Description: expressed protein; protein id: At3g09350.1, by cDNA: 19154. [Arabidopsis thaliana] unknown protein [Arabidopsis thaliana]
  misc_feature (1)..(285): Homolog of NCBI NO: 15232329 NR Description: putative protein; protein id: At3g53800.1, by cDNA: 37834. [Arabidopsis thaliana] >gi|11292176|pir||T45920
  misc_feature (1)..(285): Homolog of NCBI NO: 26449490 NR Description: unknown protein [Arabidopsis thaliana]
  misc_feature (1)..(285): Homolog of NCBI NO: 34897412 NR Description: putative Hsp70 binding protein [Oryza sativa
  misc_feature (1)..(241): Homolog of NCBI NO: 29436427 NR Description: Similar to RIKEN cDNA 1500019G21 gene [Danio
  misc_feature (1)..(241): Homolog of NCBI NO: 12667701 NR Description: Hsp70 binding protein [Danio rerio]
  misc_feature (2)..(218): Homolog of NCBI NO: 15231095 NR Description: hypothetical protein; protein id: At3g51980.1, by cDNA: gi_20268763 [Arabidopsis thaliana]
MQSQTVDVVKRLKEITQVLQTPQQVLEAHEVTPQDIEGLLDELQEHVESIDMANDLHSVGGLVPLLGYLKNSNANIRAKSADVVSTIVENNPRSQESVMEANGLESLLLRFTSDTDMHSRTQALGAISSLIRNNKPGITGFRIANGYSGLKDALETDSVRFQRKALNLLHYLLQENDSDSDIAIEFGLHHLMMHLVSSFDADVREAALRGLLELVKARKDCSTCGSSIVKGDERLRQILKDRIKAISRVKAMSLFMSQEDLSAAKEERQLLDSLWTTIFNEPSSL

SEQ ID NO: 88803 - protein, 234 aa, Arabidopsis thaliana
  peptide (1)..(234): Ceres Seq. ID no. 12712608
  misc_feature (40)..(81): Pfam Name: Armadillo/beta-catenin-like repeat Pfam Description: Armadillo/beta-catenin-like repeat
  misc_feature (1)..(234): Homolog of NCBI NO: 15241689 NR Description: putative protein; protein id: At5g02150.1
  misc_feature (1)..(234): Homolog of NCBI NO: 21553998 NR Description: unknown [Arabidopsis thaliana]
  misc_feature (1)..(234): Homolog of NCBI NO: 6478927 NR Description: hypothetical protein [Arabidopsis thaliana]
  misc_feature (1)..(234): Homolog of NCBI NO: 18398480 NR Description: expressed protein; protein id: At3g09350.1, by cDNA: 19154. [Arabidopsis thaliana] unknown protein [Arabidopsis thaliana]
  misc_feature (1)..(234): Homolog of NCBI NO: 15232329 NR Description: putative protein; protein id: At3g53800.1, by cDNA: 37834. [Arabidopsis thaliana] >gi|11292176|pir||T45920
  misc_feature (1)..(234): Homolog of NCBI NO: 26449490 NR Description: unknown protein [Arabidopsis thaliana]
  misc_feature (1)..(234): Homolog of NCBI NO: 34897412 NR Description: putative Hsp70 binding protein [Oryza sativa
  misc_feature (1)..(190): Homolog of NCBI NO: 29436427 NR Description: Similar to RIKEN cDNA 1500019G21 gene [Danio
  misc_feature (1)..(190): Homolog of NCBI NO: 12667701 NR Description: Hsp70 binding protein [Danio rerio]
  misc_feature (1)..(167): Homolog of NCBI NO: 15231095 NR Description: hypothetical protein; protein id: At3g51980.1, by cDNA: gi_20268763 [Arabidopsis thaliana]
MANDLHSVGGLVPLLGYLKNSNANIRAKSADVVSTIVENNPRSQESVMEANGLESLLLRFTSDTDMHSRTQALGAISSLIRNNKPGITGFRIANGYSGLKDALETDSVRFQRKALNLLHYLLQENDSDSDIAIEFGLHHLMMHLVSSFDADVREAALRGLLELVKARKDCSTCGSSIVKGDERLRQILKDRIKAISRVKAMSLFMSQEDLSAAKEERQLLDSLWTTIFNEPSSL

SEQ ID NO: 88804 - DNA, 1230 bp, Arabidopsis thaliana
  misc_feature (1)..(1230): Ceres Seq. ID no. 12712635
  misc_feature: MA Experiment ID: 108434 Result: Up-regulated in Transcription
  misc_feature: MA Experiment 108434 PARAMETER Experiment Name: At_Root_Tips_cDNA_P Parameter: Tissue Value: Root Tips
  misc_feature: MA Experiment ID: 108461 Result: Down-regulated in Transcription
  misc_feature: MA Experiment 108461 PARAMETER Experiment Name: At_Germinating_Seeds_cDNA_P Parameter: Age (day) Value: 1 vs. 0
  misc_feature: MA Experiment 108461 PARAMETER Experiment Name: At_Germinating_Seeds_cDNA_P Parameter: Tissue Value: Germinating Seeds
  misc_feature: MA Experiment ID: 108462 Result: Down-regulated in Transcription
  misc_feature: MA Experiment 108462 PARAMETER Experiment Name: At_Germinating_Seeds_cDNA_P Parameter: Age (day) Value: 2 vs. 0
  misc_feature: MA Experiment 108462 PARAMETER Experiment Name: At_Germinating_Seeds_cDNA_P Parameter: Tissue Value: Germinating Seeds
  misc_feature: MA Experiment ID: 108463 Result: Down-regulated in Transcription
  misc_feature: MA Experiment 108463 PARAMETER Experiment Name: At_Germinating_Seeds_cDNA_P Parameter: Age (day) Value: 3 vs. 0
  misc_feature: MA Experiment 108463 PARAMETER Experiment Name: At_Germinating_Seeds_cDNA_P Parameter: Tissue Value: Germinating Seeds
  misc_feature: MA Experiment ID: 108464 Result: Down-regulated in Transcription
  misc_feature: MA Experiment 108464 PARAMETER Experiment Name: At_Germinating_Seeds_cDNA_P Parameter: Age (day) Value: 4 vs. 0
  misc_feature: MA Experiment 108464 PARAMETER Experiment Name: At_Germinating_Seeds_cDNA_P Parameter: Tissue Value: Germinating Seeds
  misc_feature: MA Experiment ID: 108561 Result: Down-regulated in Transcription
  misc_feature: MA Experiment 108561 PARAMETER Experiment Name: At_100uM_ABA_cDNA_P Parameter: Timepoint (hr) Value: 6
  misc_feature: MA Experiment 108561 PARAMETER Experiment Name: At_100uM_ABA_cDNA_P Parameter: Tissue Value: Aerial
  misc_feature: MA Experiment 108561 PARAMETER Experiment Name: At_100uM_ABA_cDNA_P Parameter: Treatment Value: 100uM ABA vs. No Treatment
  misc_feature: MA Experiment ID: 108579 Result: Up-regulated in Transcription
  misc_feature: MA Experiment 108579 PARAMETER Experiment Name: At_4deg_Cold_cDNA_P Parameter: Temperature (deg C) Value: 4 vs. 22
  misc_feature: MA Experiment 108579 PARAMETER Experiment Name: At_4deg_Cold_cDNA_P Parameter: Timepoint (hr) Value: 6
  misc_feature: MA Experiment 108579 PARAMETER Experiment Name: At_4deg_Cold_cDNA_P Parameter: Tissue Value: Aerial
  misc_feature: MA Experiment ID: 108607 Result: Down-regulated in Transcription
  misc_feature: MA Experiment 108607 PARAMETER Experiment Name: At_100uM_ABA_cDNA_P Parameter: Timepoint (hr) Value: 4
  misc_feature: MA Experiment 108607 PARAMETER Experiment Name: At_100uM_ABA_cDNA_P Parameter: Tissue Value: Aerial
  misc_feature: MA Experiment 108607 PARAMETER Experiment Name: At_100uM_ABA_cDNA_P Parameter: Treatment Value: 100uM ABA vs. No Treatment
  misc_feature: MA Experiment ID: 20000093 Result: Down-regulated in Transcription
  misc_feature: MA Experiment 20000093 PARAMETER Experiment Name: At_42deg_Heat_cDNA_P Parameter: Temperature (deg C) Value: 42 vs. 22
  misc_feature: MA Experiment 20000093 PARAMETER Experiment Name: At_42deg_Heat_cDNA_P Parameter: Timepoint (hr) Value: 0.5
  misc_feature: MA Experiment 20000093 PARAMETER Experiment Name: At_42deg_Heat_cDNA_P Parameter: Tissue Value: Aerial
  misc_feature: MA Experiment ID: 20000171 Result: Down-regulated in Transcription
  misc_feature: MA Experiment 20000171 PARAMETER Experiment Name: At_42deg_Heat_P Parameter: Age (day) Value: 14
  misc_feature: MA Experiment 20000171 PARAMETER Experiment Name: At_42deg_Heat_P Parameter: Organism Value: A. thaliana
  misc_feature: MA Experiment 20000171 PARAMETER Experiment Name: At_42deg_Heat_P Parameter: Plant Line Value: WS
  misc_feature: MA Experiment 20000171 PARAMETER Experiment Name: At_42deg_Heat_P Parameter: Temperature (deg C) Value: 42 vs. 22
  misc_feature: MA Experiment 20000171 PARAMETER Experiment Name: At_42deg_Heat_P Parameter: Timepoint (hr) Value: 1
  misc_feature: MA Experiment 20000171 PARAMETER Experiment Name: At_42deg_Heat_P Parameter: Tissue Value: Aerial
  misc_feature: MA Experiment ID: 20000180 Result: Down-regulated in Transcription
  misc_feature: MA Experiment 20000180 PARAMETER Experiment Name: At_Germinating_Seeds_P Parameter: Age (hr) Value: 24 vs. 0
  misc_feature: MA Experiment 20000180 PARAMETER Experiment Name: At_Germinating_Seeds_P Parameter: Tissue Value: Germinating Seeds
  misc_feature: MA Experiment ID: 20000227 Result: Up-regulated in Transcription
  misc_feature: MA Experiment 20000227 PARAMETER Experiment Name: At_Root-Tips-vs-Tops_P Parameter: Tissue Value: Root Tips vs. Root Tops
  misc_feature: MA Experiment ID: 20000234 Result: Down-regulated in Transcription
  misc_feature: MA Experiment 20000234 PARAMETER Experiment Name: At_Siliques_P Parameter: Age (day) Value: 21
  misc_feature: MA Experiment 20000234 PARAMETER Experiment Name: At_Siliques_P Parameter: Organism Value: A. thaliana
  misc_feature: MA Experiment 20000234 PARAMETER Experiment Name: At_Siliques_P Parameter: Plant Line Value: WS
  misc_feature: MA Experiment 20000234 PARAMETER Experiment Name: At_Siliques_P Parameter: Tissue Value: Less Than 5mm Siliques vs. Whole Plant
  misc_feature: MA Experiment ID: 20000235 Result: Down-regulated in Transcription
  misc_feature: MA Experiment 20000235 PARAMETER Experiment Name: At_Siliques_P Parameter: Age (day) Value: 21
  misc_feature: MA Experiment 20000235 PARAMETER Experiment Name: At_Siliques_P Parameter: Organism Value: A. thaliana
  misc_feature: MA Experiment 20000235 PARAMETER Experiment Name: At_Siliques_P Parameter: Plant Line Value: WS
  misc_feature: MA Experiment 20000235 PARAMETER Experiment Name: At_Siliques_P Parameter: Tissue Value: 5-10mm Siliques vs. Whole Plant
  misc_feature: MA Experiment ID: 20000438 Result: Down-regulated in Transcription
  misc_feature: MA Experiment 20000438 PARAMETER Experiment Name: At_Shoots__P Parameter: Age (day) Value: 14
  misc_feature: MA Experiment 20000438 PARAMETER Experiment Name: At_Shoots__P Parameter: Tissue Value: Shoots vs. Whole Plant
  misc_feature: MA Experiment ID: 20000495 Result: Up-regulated in Transcription
  misc_feature: MA Experiment 20000495 PARAMETER Experiment Name: At_Guard_Cells_P Parameter: Harvest Date Value: 8/2/2002
  misc_feature: MA Experiment 20000495 PARAMETER Experiment Name: At_Guard_Cells_P Parameter: Organism Value: A. thaliana
  misc_feature: MA Experiment 20000495 PARAMETER Experiment Name: At_Guard_Cells_P Parameter: Tissue Value: Guard Cells vs. Leaves
  misc_feature: MA Experiment ID: 20000496 Result: Up-regulated in Transcription
  misc_feature: MA Experiment 20000496 PARAMETER Experiment Name: At_Guard_Cells_P Parameter: Harvest Date Value: 7/19/2002
  misc_feature: MA Experiment 20000496 PARAMETER Experiment Name: At_Guard_Cells_P Parameter: Organism Value: Canola
  misc_feature: MA Experiment 20000496 PARAMETER Experiment Name: At_Guard_Cells_P Parameter: Tissue Value: Guard Cells vs. Leaves
  misc_feature: MA Experiment ID: 20000794 Result: Up-regulated in Transcription
  misc_feature: MA Experiment 20000794 PARAMETER Experiment Name: At_Petals_P Parameter: Age (day) Value: 23-25 days
  misc_feature: MA Experiment 20000794 PARAMETER Experiment Name: At_Petals_P Parameter: Plant Line Value: WS
  misc_feature: MA Experiment 20000794 PARAMETER Experiment Name: At_Petals_P Parameter: Tissue Value: Petals vs. Whole plant
  misc_feature: MA Experiment ID: 20001248 Result: Up-regulated in Transcription
  misc_feature: MA Experiment 20001248 PARAMETER Experiment Name: At_Far-red-induction_P Parameter: Age (day) Value: 7
  misc_feature: MA Experiment 20001248 PARAMETER Experiment Name: At_Far-red-induction_P Parameter: Light Value: Far-red vs. White
  misc_feature: MA Experiment 20001248 PARAMETER Experiment Name: At_Far-red-induction_P Parameter: Organism Value: A. thaliana
  misc_feature: MA Experiment 20001248 PARAMETER Experiment Name: At_Far-red-induction_P Parameter: Plant Line Value: Columbia
  misc_feature: MA Experiment 20001248 PARAMETER Experiment Name: At_Far-red-induction_P Parameter: Timepoint (hr) Value: 4
  misc_feature: MA Experiment 20001248 PARAMETER Experiment Name: At_Far-red-induction_P Parameter: Tissue Value: Whole Plant
  misc_feature: MA Experiment ID: 20001451 Result: Up-regulated in Transcription
  misc_feature: MA Experiment 20001451 PARAMETER Experiment Name: At_Far-red-induction_P Parameter: Age (day) Value: 7
  misc_feature: MA Experiment 20001451 PARAMETER Experiment Name: At_Far-red-induction_P Parameter: Light Value: Far-red vs. White
  misc_feature: MA Experiment 20001451 PARAMETER Experiment Name: At_Far-red-induction_P Parameter: Organism Value: A. thaliana
  misc_feature: MA Experiment 20001451 PARAMETER Experiment Name: At_Far-red-induction_P Parameter: Plant Line Value: Columbia
  misc_feature: MA Experiment 20001451 PARAMETER Experiment Name: At_Far-red-induction_P Parameter: Timepoint (hr) Value: 24
  misc_feature: MA Experiment 20001451 PARAMETER Experiment Name: At_Far-red-induction_P Parameter: Tissue Value: Whole Plant
  misc_feature: MA Experiment ID: 20001556 Result: Up-regulated in Transcription
  misc_feature: MA Experiment 20001556 PARAMETER Experiment Name: At_Drought_Soil_Dry_P Parameter: Age (day) Value: 26
  misc_feature: MA Experiment 20001556 PARAMETER Experiment Name: At_Drought_Soil_Dry_P Parameter: Organism Value: A. thaliana
  misc_feature: MA Experiment 20001556 PARAMETER Experiment Name: At_Drought_Soil_Dry_P Parameter: Plant Line Value: WS
  misc_feature: MA Experiment 20001556 PARAMETER Experiment Name: At_Drought_Soil_Dry_P Parameter: Post Timepoint (hr) Value: None
  misc_feature: MA Experiment 20001556 PARAMETER Experiment Name: At_Drought_Soil_Dry_P Parameter: Post-Treatment Value: None
  misc_feature: MA Experiment 20001556 PARAMETER Experiment Name: At_Drought_Soil_Dry_P Parameter: Timepoint (day) Value: 12
  misc_feature: MA Experiment 20001556 PARAMETER Experiment Name: At_Drought_Soil_Dry_P Parameter: Treatment Value: Drought vs. No Drought
acattcctctcttctctctctcttttcccaaaaaccaaaaccttttttccgtaccaaggtcaacaaatggcggcgaaagtaattacatttatggcggttatggtggttactgcctttacggccaacgccaaaatccccggagtttacaccggtggtccttggatcaatgctcacgccaccttctacggtgaagctgacgcttccggcactatgggtggtgcgtgtgggtacgggaatttgtatagccaaggttacggagtgaacacggcggctttaagcactgccttattcaacaatggtttgagttgtggctcttgctttgagcttaagtgtatcaatgatccaggatggtgtcttcctggaaacccatcaattcttatcaccgccactaatttctgccctcctaactttaatcaagctagcgacaatggtggttggtgtaatcctcctcgtgagcactttgatctcgctatgcctatgtttctttccatcgctaagtataaggctggtatcgtccccgtctcttaccgcaggatcccatgtaggaagaagggaggaatcagattcacaatcaatggattcaagtacttcaacttggtgctggtcactaacgtagccggagctggagacgtcattaaggtgagtgtgaaaggatccaacacacaatggttagatctgagccggaactggggacaaaactggcaatccaacgcacttcttgtcggccaatctctttctttccgagtcaaaacctctgatggccgaagctccacctccaacaacattgctcccagtaactggcaatttggccagacctactccggcaagaacttccgcgtctgatttctagaatatgaaaaagagtcgtgtggcggaagatactaaagcttttttttatatcaaatatatatatttacgtgtctttgatttagtttacgatttggaattggggttttaccatttttcccttattttctcagggaaagtattgggattgcttggtttgcaagttagggtttactttaaagattagggctatattgttttttttgttttttttggtgtgttgtgtcttgtttggtatgtagtcttgtagagaggctgaagcggctgcagaaagaaagggttgggataaagattcatgtagcccgcagctctcttttacgttatgattgtattaaagtatatatatatcatgaagaaattaaacatggtttcttcgatttatat

SEQ ID NO: 88805 - protein, 280 aa, Arabidopsis thaliana; identical to SEQ ID NO: 34928
  peptide (1)..(280): Ceres Seq. ID no. 12712636
  misc_feature (187)..(264): Pfam Name: Pollen allergen Pfam Description: Pollen allergen
  misc_feature (23)..(280): Homolog of NCBI NO: 15241741 NR Description: expansin, putative; protein id: At5g02260.1, by cDNA: 21205., supported by cDNA: gi_15451011, supported by
  misc_feature (23)..(280): Homolog of NCBI NO: 29467509 NR Description: expansin [Pyrus communis]
  misc_feature (24)..(280): Homolog of NCBI NO: 15224330 NR Description: expansin, putative; protein id: At2g37640.1, by cDNA: gi_19699321 [Arabidopsis thaliana]
  misc_feature (23)..(280): Homolog of NCBI NO: 1076531 NR Description: pollen allergen homolog, hypothetical (clone - garden pea >gi|732905|emb|CAA59470.1| homology with pollen
  misc_feature (23)..(280): Homolog of NCBI NO: 20502784 NR Description: expansin 11 precursor [Rumex palustris]
  misc_feature (32)..(280): Homolog of NCBI NO: 29466643 NR Description: expansin [Prunus persica]
  misc_feature (23)..(280): Homolog of NCBI NO: 20502782 NR Description: expansin 10 precursor [Rumex palustris]
  misc_feature (23)..(280): Homolog of NCBI NO: 20502786 NR Description: expansin 12 precursor [Rumex palustris]
  misc_feature (21)..(280): Homolog of NCBI NO: 4138914 NR Description: expansin precursor [Lycopersicon esculentum]
  misc_feature (32)..(280): Homolog of NCBI NO: 13898655 NR Description: expansin [Prunus cerasus]

SEQ ID NO: 88806 - protein, 258 aa, Arabidopsis thaliana; identical to SEQ ID NO: 34929
  peptide (1)..(258): Ceres Seq. ID no. 12712637
  misc_feature (165)..(242): Pfam Name: Pollen allergen Pfam Description: Pollen allergen
  misc_feature (1)..(258): Homolog of NCBI NO: 15241741 NR Description: expansin, putative; protein id: At5g02260.1, by cDNA: 21205., supported by cDNA: gi_15451011, supported by
  misc_feature (1)..(258): Homolog of NCBI NO: 29467509 NR Description: expansin [Pyrus communis]
  misc_feature (2)..(258): Homolog of NCBI NO: 15224330 NR Description: expansin, putative; protein id: At2g37640.1, by cDNA: gi_19699321 [Arabidopsis thaliana]
  misc_feature (1)..(258): Homolog of NCBI NO: 1076531 NR Description: pollen allergen homolog, hypothetical (clone - garden pea >gi|732905|emb|CAA59470.1| homology with pollen
  misc_feature (1)..(258): Homolog of NCBI NO: 20502784 NR Description: expansin 11 precursor [Rumex palustris]
  misc_feature (10)..(258): Homolog of NCBI NO: 29466643 NR Description: expansin [Prunus persica]
  misc_feature (1)..(258): Homolog of NCBI NO: 20502782 NR Description: expansin 10 precursor [Rumex palustris]
  misc_feature (1)..(258): Homolog of NCBI NO: 20502786 NR Description: expansin 12 precursor [Rumex palustris]
  misc_feature (1)..(258): Homolog of NCBI NO: 4138914 NR Description: expansin precursor [Lycopersicon esculentum]
  misc_feature (10)..(258): Homolog of NCBI NO: 13898655 NR Description: expansin [Prunus cerasus]

SEQ ID NO: 88807 - protein, 250 aa, Arabidopsis thaliana; identical to SEQ ID NO: 34930
  peptide (1)..(250): Ceres Seq. ID no. 12712638
  misc_feature (157)..(234): Pfam Name: Pollen allergen Pfam Description: Pollen allergen
  misc_feature (1)..(250): Homolog of NCBI NO: 15241741 NR Description: expansin, putative; protein id: At5g02260.1, by cDNA: 21205., supported by cDNA: gi_15451011, supported by
  misc_feature (1)..(250): Homolog of NCBI NO: 29467509 NR Description: expansin [Pyrus communis]
  misc_feature (1)..(250): Homolog of NCBI NO: 15224330 NR Description: expansin, putative; protein id: At2g37640.1, by cDNA: gi_19699321 [Arabidopsis thaliana]
  misc_feature (1)..(250): Homolog of NCBI NO: 1076531 NR Description: pollen allergen homolog, hypothetical (clone - garden pea >gi|732905|emb|CAA59470.1| homology with pollen
  misc_feature (1)..(250): Homolog of NCBI NO: 20502784 NR Description: expansin 11 precursor [Rumex palustris]
  misc_feature (2)..(250): Homolog of NCBI NO: 29466643 NR Description: expansin [Prunus persica]
  misc_feature (1)..(250): Homolog of NCBI NO: 20502782 NR Description: expansin 10 precursor [Rumex palustris]
  misc_feature (1)..(250): Homolog of NCBI NO: 20502786 NR Description: expansin 12 precursor [Rumex palustris]
  misc_feature (1)..(250): Homolog of NCBI NO: 4138914 NR Description: expansin precursor [Lycopersicon esculentum]
  misc_feature (2)..(250): Homolog of NCBI NO: 13898655 NR Description: expansin [Prunus cerasus]

SEQ ID NO: 88808 - DNA, 2255 bp, Arabidopsis thaliana
  misc_feature (1)..(2255): Ceres Seq. ID no. 12712671
  misc_feature: MA Experiment ID: 20000314 Result: Down-regulated in Transcription
  misc_feature: MA Experiment 20000314 PARAMETER Experiment Name: At_14day_Shoots-Roots_Sub_P Parameter: Age (day) Value: 14
  misc_feature: MA Experiment 20000314 PARAMETER Experiment Name: At_14day_Shoots-Roots_Sub_P Parameter: Organism Value: A. thaliana
  misc_feature: MA Experiment 20000314 PARAMETER Experiment Name: At_14day_Shoots-Roots_Sub_P Parameter: Plant Line Value: WS
  misc_feature: MA Experiment 20000314 PARAMETER Experiment Name: At_14day_Shoots-Roots_Sub_P Parameter: Tissue Value: Roots vs. Whole Plant
  misc_feature: MA Experiment ID: 20000327 Result: Up-regulated in Transcription
  misc_feature: MA Experiment 20000327 PARAMETER Experiment Name: At_42deg_Heat_Sub_P Parameter: Age (day) Value: 14
  misc_feature: MA Experiment 20000327 PARAMETER Experiment Name: At_42deg_Heat_Sub_P Parameter: Organism Value: A. thaliana
  misc_feature: MA Experiment 20000327 PARAMETER Experiment Name: At_42deg_Heat_Sub_P Parameter: Plant Line Value: WS
  misc_feature: MA Experiment 20000327 PARAMETER Experiment Name: At_42deg_Heat_Sub_P Parameter: Temperature (deg C) Value: 42 vs. 22
  misc_feature: MA Experiment 20000327 PARAMETER Experiment Name: At_42deg_Heat_Sub_P Parameter: Timepoint (hr) Value: 1
  misc_feature: MA Experiment 20000327 PARAMETER Experiment Name: At_42deg_Heat_Sub_P Parameter: Tissue Value: Aerial
  misc_feature: MA Experiment ID: 20000328 Result: Up-regulated in Transcription
  misc_feature: MA Experiment 20000328 PARAMETER Experiment Name: At_42deg_Heat_Sub_P Parameter: Age (day) Value: 14
  misc_feature: MA Experiment 20000328 PARAMETER Experiment Name: At_42deg_Heat_Sub_P Parameter: Organism Value: A. thaliana
  misc_feature: MA Experiment 20000328 PARAMETER Experiment Name: At_42deg_Heat_Sub_P Parameter: Plant Line Value: WS
  misc_feature: MA Experiment 20000328 PARAMETER Experiment Name: At_42deg_Heat_Sub_P Parameter: Temperature (deg C) Value: 42 vs. 22
  misc_feature: MA Experiment 20000328 PARAMETER Experiment Name: At_42deg_Heat_Sub_P Parameter: Timepoint (hr) Value: 6
  misc_feature: MA Experiment 20000328 PARAMETER Experiment Name: At_42deg_Heat_Sub_P Parameter: Tissue Value: Aerial
  misc_feature: MA Experiment ID: 20000355 Result: Down-regulated in Transcription
  misc_feature: MA Experiment 20000355 PARAMETER Experiment Name: At_Siliques_Sub_P Parameter: Age (day) Value: 21
  misc_feature: MA Experiment 20000355 PARAMETER Experiment Name: At_Siliques_Sub_P Parameter: Organism Value: A. thaliana
  misc_feature: MA Experiment 20000355 PARAMETER Experiment Name: At_Siliques_Sub_P Parameter: Plant Line Value: WS
  misc_feature: MA Experiment 20000355 PARAMETER Experiment Name: At_Siliques_Sub_P Parameter: Tissue Value: Less Than 5mm Siliques vs. Whole Plant
  misc_feature: MA Experiment ID: 20001807 Result: Up-regulated in Transcription
  misc_feature: MA Experiment 20001807 PARAMETER Experiment Name: At_50mM_NH4NO3_L-to-H_Sub_P Parameter: Timepoint (hr) Value: 6
  misc_feature: MA Experiment 20001807 PARAMETER Experiment Name: At_50mM_NH4NO3_L-to-H_Sub_P Parameter: Tissue Value: Leaf
  misc_feature: MA Experiment 20001807 PARAMETER Experiment Name: At_50mM_NH4NO3_L-to-H_Sub_P Parameter: Treatment Value: 50mM NH4NO3 vs 100mM Mannitol
accaaatacaaaccctagccgccttattcgtcttcttcgttctctagttttttcctcagtctctgttcttagatcccttgtagtttccaaatcttccgataaaaatgtcgggtaaaggagaaggaccagctatcggtatcgatcttggtaccacttactcttgcgtcggagtatggcaacacgaccgtgttgagatcattgctaatgatcaaggaaacagaaccacgccatcttacgttgctttcaccgactccgagaggttgatcggtgacgcagctaagaatcaggtcgccatgaaccccgttaacaccgttttcgacgctaagaggttgatcggtcgtcgtttctctgacagctctgttcagagtgacatgaaattgtggccattcaagattcaagccggacctgccgataagccaatgatctacgtcgaatacaagggtgaagagaaagagttcgcagctgaggagatttcttccatggttcttattaagatgcgtgagattgctgaggcttaccttggtgtcacaatcaagaacgccgttgttaccgttccagcttacttcaacgactctcagcgtcaggctacaaaggatgctggtgtcatcgctggtttgaacgttatgcgaatcatcaacgagcctacagccgccgctattgcctacggtcttgacaaaaaggctaccagcgttggagagaagaatgttcttatcttcgatcttggtggtggcacttttgatgtctctcttcttaccattgaagagggtatctttgaggtgaaggcaactgctggtgacacccatcttggtggggaagattttgacaacagaatggttaaccactttgtccaagagttcaagaggaagagtaagaaggatatcaccggtaacccaagagctcttaggaggttgagaacttcctgtgagagagcgaagaggactctttcttccactgctcagaccaccatcgagattgactctctatacgagggtatcgacttctactccaccatcacccgtgctagatttgaggagctcaacatggatctcttcaggaagtgtatggagccagttgagaagtgtcttcgtgatgctaagatggacaagagcactgttcatgatgttgtccttgttggtggttctacccgtatccctaaggttcagcaattgctccaggacttcttcaacggcaaagagctttgcaagtctattaaccctgatgaggctgttgcctacggtgctgctgtccagggagctattctcagcggtgaaggaaacgagaaggttcaagatcttctattgctcgatgtcactcctctctcccttggtttggaaactgccggtggtgtcatgaccactttgatcccaaggaacacaaccatcccaaccaagaaggaacaagtcttctccacctactcagacaaccaacccggtgtgttgatccaggtgtacgaaggagagagagccagaaccaaggacaacaaccttcttggtaaatttgagctctccggaattcctccagctcctcgtggtgtcccccagatcacagtctgctttgacattgatgccaatggtatcctcaatgtctctgctgaggacaagaccaccggacagaagaacaagatcaccatcaccaatgacaagggtcgtctctccaaggatgagattgagaagatggttcaagaggctgagaagtacaagtccgaagacgaggagcacaagaagaaggttgaagccaagaacgctctcgagaactacgcttacaacatgaggaacaccatccaagacgagaagattggtgagaagctcccggctgcagacaagaagaagatcgaggattctattgagcaggcgattcaatggctcgagggtaaccagttggctgaggctgatgagttcgaagacaagatgaaggaattggagagcatctgcaacccaatcattgccaagatgtaccaaggagctggtggtgaagccggtggtccaggtgcctctggtatggacgatgatgctccccctgcttcaggcggtgctggacctaagatcgaggaggtcgactaatttgttggacattgacctctctctttctcctatctctatctcttttacttgcttttttttgatctgttaagactttttatgttgggcttttttaaagaagcccattttgtggtgttttttggttagtactattttgaacaatggttggttctataccagtttagctacgatgacggataaaattaaaagtttgcc

SEQ ID NO: 88809 - protein, 651 aa, Arabidopsis thaliana; identical to SEQ ID NO: 22039
  peptide (1)..(651): Ceres Seq. ID no. 12712672
  misc_feature (6)..(626): Homolog of NCBI NO: 21263753 NR Description: Heat shock cognate 71 kDa protein (Hsc70.1)
  misc_feature (8)..(651): Homolog of NCBI NO: 14423732 NR Description: Heat shock 70 kDa protein
  misc_feature (1)..(635): Homolog of NCBI NO: 6016151 NR Description: Luminal binding protein 3 precursor (BiP3)
  misc_feature (3)..(635): Homolog of NCBI NO: 1037176 NR Description: immunoglobulin heavy chain binding protein
  misc_feature (1)..(626): Homolog of NCBI NO: 481576 NR Description: dnaK-type molecular chaperone GRP78/BiP - cinnamomi >gi|429118|emb|CAA53369.1| glucose regulated protein
  misc_feature (3)..(635): Homolog of NCBI NO: 29539338 NR Description: Heat shock 70 kDa protein [Cyanidioschyzon
  misc_feature (1)..(635): Homolog of NCBI NO: 23480384 NR Description: heat shock protein [Plasmodium yoelii yoelii]
  misc_feature (124)..(646): Homolog of NCBI NO: 4164594 NR Description: heat shock protein 70 [Paracoccidioides

SEQ ID NO: 88810 - protein, 588 aa, Arabidopsis thaliana; identical to SEQ ID NO: 22040
  peptide (1)..(588): Ceres Seq. ID no. 12712673
  misc_feature (1)..(563): Homolog of NCBI NO: 21263753 NR Description: Heat shock cognate 71 kDa protein (Hsc70.1)
  misc_feature (1)..(588): Homolog of NCBI NO: 14423732 NR Description: Heat shock 70 kDa protein
  misc_feature (1)..(572): Homolog of NCBI NO: 6016151 NR Description: Luminal binding protein 3 precursor (BiP3)
  misc_feature (1)..(572): Homolog of NCBI NO: 1037176 NR Description: immunoglobulin heavy chain binding protein
  misc_feature (1)..(563): Homolog of NCBI NO: 481576 NR Description: dnaK-type molecular chaperone GRP78/BiP - cinnamomi >gi|429118|emb|CAA53369.1| glucose regulated protein
  misc_feature (1)..(572): Homolog of NCBI NO: 29539338 NR Description: Heat shock 70 kDa protein [Cyanidioschyzon
  misc_feature (1)..(572): Homolog of NCBI NO: 23480384 NR Description: heat shock protein [Plasmodium yoelii yoelii]
  misc_feature (61)..(583): Homolog of NCBI NO: 4164594 NR Description: heat shock protein 70 [Paracoccidioides

SEQ ID NO: 88811 - protein, 562 aa, Arabidopsis thaliana; identical to SEQ ID NO: 22041
  peptide (1)..(562): Ceres Seq. ID no. 12712674
  misc_feature (1)..(537): Homolog of NCBI NO: 21263753 NR Description: Heat shock cognate 71 kDa protein (Hsc70.1)
  misc_feature (1)..(562): Homolog of NCBI NO: 14423732 NR Description: Heat shock 70 kDa protein
  misc_feature (1)..(546): Homolog of NCBI NO: 6016151 NR Description: Luminal binding protein 3 precursor (BiP3)
  misc_feature (1)..(546): Homolog of NCBI NO: 1037176 NR Description: immunoglobulin heavy chain binding protein
  misc_feature (1)..(537): Homolog of NCBI NO: 481576 NR Description: dnaK-type molecular chaperone GRP78/BiP - cinnamomi >gi|429118|emb|CAA53369.1| glucose regulated protein
  misc_feature (1)..(546): Homolog of NCBI NO: 29539338 NR Description: Heat shock 70 kDa protein [Cyanidioschyzon
  misc_feature (1)..(546): Homolog of NCBI NO: 23480384 NR Description: heat shock protein [Plasmodium yoelii yoelii]
  misc_feature (35)..(557): Homolog of NCBI NO: 4164594 NR Description: heat shock protein 70 [Paracoccidioides

SEQ ID NO: 88812 - DNA, 1278 bp, Arabidopsis thaliana
  misc_feature (1)..(1278): Ceres Seq. ID no. 12712683
  misc_feature: MA Experiment ID: 108435 Result: Down-regulated in Transcription
  misc_feature: MA Experiment 108435 PARAMETER Experiment Name: At_stm_Mutants_cDNA_P Parameter: Plant Line Value: wt Landsburg vs stm
  misc_feature: MA Experiment 108435 PARAMETER Experiment Name: At_stm_Mutants_cDNA_P Parameter: Tissue Value: Shoot Apical Meristem Region
  misc_feature: MA Experiment ID: 108462 Result: Down-regulated in Transcription
  misc_feature: MA Experiment 108462 PARAMETER Experiment Name: At_Germinating_Seeds_cDNA_P Parameter: Age (day) Value: 2 vs. 0
  misc_feature: MA Experiment 108462 PARAMETER Experiment Name: At_Germinating_Seeds_cDNA_P Parameter: Tissue Value: Germinating Seeds
  misc_feature: MA Experiment ID: 108463 Result: Down-regulated in Transcription
  misc_feature: MA Experiment 108463 PARAMETER Experiment Name: At_Germinating_Seeds_cDNA_P Parameter: Age (day) Value: 3 vs. 0
  misc_feature: MA Experiment 108463 PARAMETER Experiment Name: At_Germinating_Seeds_cDNA_P Parameter: Tissue Value: Germinating Seeds
  misc_feature: MA Experiment ID: 108464 Result: Down-regulated in Transcription
  misc_feature: MA Experiment 108464 PARAMETER Experiment Name: At_Germinating_Seeds_cDNA_P Parameter: Age (day) Value: 4 vs. 0
  misc_feature: MA Experiment 108464 PARAMETER Experiment Name: At_Germinating_Seeds_cDNA_P Parameter: Tissue Value: Germinating Seeds
  misc_feature: MA Experiment ID: 108561 Result: Down-regulated in Transcription
  misc_feature: MA Experiment 108561 PARAMETER Experiment Name: At_100uM_ABA_cDNA_P Parameter: Timepoint (hr) Value: 6
  misc_feature: MA Experiment 108561 PARAMETER Experiment Name: At_100uM_ABA_cDNA_P Parameter: Tissue Value: Aerial
  misc_feature: MA Experiment 108561 PARAMETER Experiment Name: At_100uM_ABA_cDNA_P Parameter: Treatment Value: 100uM ABA vs. No Treatment
  misc_feature: MA Experiment ID: 20000069 Result: Down-regulated in Transcription
  misc_feature: MA Experiment 20000069 PARAMETER Experiment Name: At_100uM_ABA_Mutants_cDNA_P Parameter: Plant Line Value: CS23
  misc_feature: MA Experiment 20000069 PARAMETER Experiment Name: At_100uM_ABA_Mutants_cDNA_P Parameter: Timepoint (hr) Value: 6
  misc_feature: MA Experiment 20000069 PARAMETER Experiment Name: At_100uM_ABA_Mutants_cDNA_P Parameter: Tissue Value: Aerial
  misc_feature: MA Experiment 20000069 PARAMETER Experiment Name: At_100uM_ABA_Mutants_cDNA_P Parameter: Treatment Value: 100uM ABA vs. No Treatment
  misc_feature: MA Experiment ID: 20000070 Result: Down-regulated in Transcription
  misc_feature: MA Experiment 20000070 PARAMETER Experiment Name: At_100uM_ABA_Mutants_cDNA_P Parameter: Plant Line Value: CS24
  misc_feature: MA Experiment 20000070 PARAMETER Experiment Name: At_100uM_ABA_Mutants_cDNA_P Parameter: Timepoint (hr) Value: 6
  misc_feature: MA Experiment 20000070 PARAMETER Experiment Name: At_100uM_ABA_Mutants_cDNA_P Parameter: Tissue Value: Aerial
  misc_feature: MA Experiment 20000070 PARAMETER Experiment Name: At_100uM_ABA_Mutants_cDNA_P Parameter: Treatment Value: 100uM ABA vs. No Treatment
  misc_feature: MA Experiment ID: 20000071 Result: Down-regulated in Transcription
  misc_feature: MA Experiment 20000071 PARAMETER Experiment Name: At_100uM_ABA_Mutants_cDNA_P Parameter: Plant Line Value: CS8104
  misc_feature: MA Experiment 20000071 PARAMETER Experiment Name: At_100uM_ABA_Mutants_cDNA_P Parameter: Timepoint (hr) Value: 6
  misc_feature: MA Experiment 20000071 PARAMETER Experiment Name: At_100uM_ABA_Mutants_cDNA_P Parameter: Tissue Value: Aerial
  misc_feature: MA Experiment 20000071 PARAMETER Experiment Name: At_100uM_ABA_Mutants_cDNA_P Parameter: Treatment Value: 100uM ABA vs. No Treatment
  misc_feature: MA Experiment ID: 20000072 Result: Down-regulated in Transcription
  misc_feature: MA Experiment 20000072 PARAMETER Experiment Name: At_100uM_ABA_Mutants_cDNA_P Parameter: Plant Line Value: CS8105
  misc_feature: MA Experiment 20000072 PARAMETER Experiment Name: At_100uM_ABA_Mutants_cDNA_P Parameter: Timepoint (hr) Value: 6
  misc_feature: MA Experiment 20000072 PARAMETER Experiment Name: At_100uM_ABA_Mutants_cDNA_P Parameter: Tissue Value: Aerial
  misc_feature: MA Experiment 20000072 PARAMETER Experiment Name: At_100uM_ABA_Mutants_cDNA_P Parameter: Treatment Value: 100uM ABA vs. No Treatment
  misc_feature: MA Experiment ID: 20000087 Result: Down-regulated in Transcription
  misc_feature: MA Experiment 20000087 PARAMETER Experiment Name: At_100uM_ABA_Mutants_cDNA_P Parameter: Plant Line Value: WS
  misc_feature: MA Experiment 20000087 PARAMETER Experiment Name: At_100uM_ABA_Mutants_cDNA_P Parameter: Timepoint (hr) Value: 6
  misc_feature: MA Experiment 20000087 PARAMETER Experiment Name: At_100uM_ABA_Mutants_cDNA_P Parameter: Tissue Value: Aerial
  misc_feature: MA Experiment 20000087 PARAMETER Experiment Name: At_100uM_ABA_Mutants_cDNA_P Parameter: Treatment Value: 100uM ABA vs. No Treatment
  misc_feature: MA Experiment ID: 20000088 Result: Down-regulated in Transcription
  misc_feature: MA Experiment 20000088 PARAMETER Experiment Name: At_100uM_ABA_Mutants_cDNA_P Parameter: Plant Line Value: Landsberg
  misc_feature: MA Experiment 20000088 PARAMETER Experiment Name: At_100uM_ABA_Mutants_cDNA_P Parameter: Timepoint (hr) Value: 6
  misc_feature: MA Experiment 20000088 PARAMETER Experiment Name: At_100uM_ABA_Mutants_cDNA_P Parameter: Tissue Value: Aerial
  misc_feature: MA Experiment 20000088 PARAMETER Experiment Name: At_100uM_ABA_Mutants_cDNA_P Parameter: Treatment Value: 100uM ABA vs. No Treatment
  misc_feature: MA Experiment ID: 20000117 Result: Down-regulated in Transcription
  misc_feature: MA Experiment 20000117 PARAMETER Experiment Name: At_100uM_ABA_Mutants_cDNA_P Parameter: Plant Line Value: Columbia
  misc_feature: MA Experiment 20000117 PARAMETER Experiment Name: At_100uM_ABA_Mutants_cDNA_P Parameter: Timepoint (hr) Value: 6
  misc_feature: MA Experiment 20000117 PARAMETER Experiment Name: At_100uM_ABA_Mutants_cDNA_P Parameter: Tissue Value: Aerial
  misc_feature: MA Experiment 20000117 PARAMETER Experiment Name: At_100uM_ABA_Mutants_cDNA_P Parameter: Treatment Value: 100uM ABA vs. No Treatment
  misc_feature: MA Experiment ID: 20000180 Result: Up-regulated in Transcription
  misc_feature: MA Experiment 20000180 PARAMETER Experiment Name: At_Germinating_Seeds_P Parameter: Age (hr) Value: 24 vs. 0
  misc_feature: MA Experiment 20000180 PARAMETER Experiment Name: At_Germinating_Seeds_P Parameter: Tissue Value: Germinating Seeds
  misc_feature: MA Experiment ID: 20000184 Result: Up-regulated in Transcription
  misc_feature: MA Experiment 20000184 PARAMETER Experiment Name: At_Shoots__P Parameter: Age (day) Value: 7
  misc_feature: MA Experiment 20000184 PARAMETER Experiment Name: At_Shoots__P Parameter: Tissue Value: Shoots vs. Whole Plant
  misc_feature: MA Experiment ID: 20000185 Result: Down-regulated in Transcription
  misc_feature: MA Experiment 20000185 PARAMETER Experiment Name: At_Roots__P Parameter: Age (day) Value: 7 vs. 21
  misc_feature: MA Experiment 20000185 PARAMETER Experiment Name: At_Roots__P Parameter: Organism Value: A. thaliana
  misc_feature: MA Experiment 20000185 PARAMETER Experiment Name: At_Roots__P Parameter: Tissue Value: Roots vs. Whole Plant
  misc_feature: MA Experiment ID: 20000211 Result: Down-regulated in Transcription
  misc_feature: MA Experiment 20000211 PARAMETER Experiment Name: At_0.001percent_MeJA__P Parameter: Age (day) Value: 14
  misc_feature: MA Experiment 20000211 PARAMETER Experiment Name: At_0.001percent_MeJA__P Parameter: Organism Value: A. thaliana
  misc_feature: MA Experiment 20000211 PARAMETER Experiment Name: At_0.001percent_MeJA__P Parameter: Plant Line Value: WS
  misc_feature: MA Experiment 20000211 PARAMETER Experiment Name: At_0.001percent_MeJA__P Parameter: Timepoint (hr) Value: 1
  misc_feature: MA Experiment 20000211 PARAMETER Experiment Name: At_0.001percent_MeJA__P Parameter: Tissue Value: Aerial
  misc_feature: MA Experiment 20000211 PARAMETER Experiment Name: At_0.001percent_MeJA__P Parameter: Treatment Value: 0.001percent MeJA vs. No Treatment
  misc_feature: MA Experiment ID: 20000224 Result: Down-regulated in Transcription
  misc_feature: MA Experiment ID: 20000234 Result: Up-regulated in Transcription
  misc_feature: MA Experiment 20000234 PARAMETER Experiment Name: At_Siliques_P Parameter: Age (day) Value: 21
  misc_feature: MA Experiment 20000234 PARAMETER Experiment Name: At_Siliques_P Parameter: Organism Value: A. thaliana
  misc_feature: MA Experiment 20000234 PARAMETER Experiment Name: At_Siliques_P Parameter: Plant Line Value: WS
  misc_feature: MA Experiment 20000234 PARAMETER Experiment Name: At_Siliques_P Parameter: Tissue Value: Less Than 5mm Siliques vs. Whole Plant
  misc_feature: MA Experiment ID: 20000235 Result: Up-regulated in Transcription
  misc_feature: MA Experiment 20000235 PARAMETER Experiment Name: At_Siliques_P Parameter: Age (day) Value: 21
  misc_feature: MA Experiment 20000235 PARAMETER Experiment Name: At_Siliques_P Parameter: Organism Value: A. thaliana
  misc_feature: MA Experiment 20000235 PARAMETER Experiment Name: At_Siliques_P Parameter: Plant Line Value: WS
  misc_feature: MA Experiment 20000235 PARAMETER Experiment Name: At_Siliques_P Parameter: Tissue Value: 5-10mm Siliques vs. Whole Plant
  misc_feature: MA Experiment ID: 20000264 Result: Up-regulated in Transcription
  misc_feature: MA Experiment 20000264 PARAMETER Experiment Name: At_Open_Flower_P Parameter: Age (day) Value: 21
  misc_feature: MA Experiment 20000264 PARAMETER Experiment Name: At_Open_Flower_P Parameter: Plant Line Value: WS
  misc_feature: MA Experiment 20000264 PARAMETER Experiment Name: At_Open_Flower_P Parameter: Tissue Value: Open Flower vs. Whole Plant
  misc_feature: MA Experiment ID: 20000265 Result: Up-regulated in Transcription
  misc_feature: MA Experiment 20000265 PARAMETER Experiment Name: At_Open_Flower_P Parameter: Age (day) Value: 21
  misc_feature: MA Experiment 20000265 PARAMETER Experiment Name: At_Open_Flower_P Parameter: Plant Line Value: WS
  misc_feature: MA Experiment 20000265 PARAMETER Experiment Name: At_Open_Flower_P Parameter: Tissue Value: Closed Flower vs. Whole Plant
  misc_feature: MA Experiment ID: 20000286 Result: Up-regulated in Transcription
  misc_feature: MA Experiment 20000286 PARAMETER Experiment Name: At_Open_Flower_P Parameter: Age (day) Value: 21
  misc_feature: MA Experiment 20000286 PARAMETER Experiment Name: At_Open_Flower_P Parameter: Plant Line Value: WS
  misc_feature: MA Experiment 20000286 PARAMETER Experiment Name: At_Open_Flower_P Parameter: Tissue Value: Half Open vs. Whole Plant
  misc_feature: MA Experiment ID: 20000308 Result: Down-regulated in Transcription
  misc_feature: MA Experiment 20000308 PARAMETER Experiment Name: At_100mM_NaCl__P Parameter: Age (day) Value: 17
  misc_feature: MA Experiment 20000308 PARAMETER Experiment Name: At_100mM_NaCl__P Parameter: Organism Value: A. thaliana
  misc_feature: MA Experiment 20000308 PARAMETER Experiment Name: At_100mM_NaCl__P Parameter: Plant Line Value: WS
  misc_feature: MA Experiment 20000308 PARAMETER Experiment Name: At_100mM_NaCl__P Parameter: Timepoint (hr) Value: 72
  misc_feature: MA Experiment 20000308 PARAMETER Experiment Name: At_100mM_NaCl__P Parameter: Tissue Value: Whole Plant
  misc_feature: MA Experiment 20000308 PARAMETER Experiment Name: At_100mM_NaCl__P Parameter: Treatment Value: 100mM NaCl vs. No Treatment
  misc_feature: MA Experiment ID: 20000437 Result: Down-regulated in Transcription
  misc_feature: MA Experiment 20000437 PARAMETER Experiment Name: At_Drought_P Parameter: Age (day) Value: 8
  misc_feature: MA Experiment 20000437 PARAMETER Experiment Name: At_Drought_P Parameter: Organism Value: A. thaliana
  misc_feature: MA Experiment 20000437 PARAMETER Experiment Name: At_Drought_P Parameter: Plant Line Value: WS
  misc_feature: MA Experiment 20000437 PARAMETER Experiment Name: At_Drought_P Parameter: Timepoint (hr) Value: 24
  misc_feature: MA Experiment 20000437 PARAMETER Experiment Name: At_Drought_P Parameter: Tissue Value: Whole Plant
  misc_feature: MA Experiment 20000437 PARAMETER Experiment Name: At_Drought_P Parameter: Treatment Value: Drought vs. No Drought
  misc_feature: MA Experiment ID: 20000438 Result: Up-regulated in Transcription
  misc_feature: MA Experiment 20000438 PARAMETER Experiment Name: At_Shoots__P Parameter: Age (day) Value: 14
  misc_feature: MA Experiment 20000438 PARAMETER Experiment Name: At_Shoots__P Parameter: Tissue Value: Shoots vs. Whole Plant
  misc_feature: MA Experiment ID: 20000439 Result: Down-regulated in Transcription
  misc_feature: MA Experiment 20000439 PARAMETER Experiment Name: At_Roots__P Parameter: Age (day) Value: 14 vs. 21
  misc_feature: MA Experiment 20000439 PARAMETER Experiment Name: At_Roots__P Parameter: Organism Value: A. thaliana
  misc_feature: MA Experiment 20000439 PARAMETER Experiment Name: At_Roots__P Parameter: Tissue Value: Roots vs. Whole Plant
  misc_feature: MA Experiment ID: 20001247 Result: Up-regulated in Transcription
  misc_feature: MA Experiment 20001247 PARAMETER Experiment Name: At_Far-red-induction_P Parameter: Age (day) Value: 7
  misc_feature: MA Experiment 20001247 PARAMETER Experiment Name: At_Far-red-induction_P Parameter: Light Value: Far-red vs. White
  misc_feature: MA Experiment 20001247 PARAMETER Experiment Name: At_Far-red-induction_P Parameter: Organism Value: A. thaliana
  misc_feature: MA Experiment 20001247 PARAMETER Experiment Name: At_Far-red-induction_P Parameter: Plant Line Value: Columbia
  misc_feature: MA Experiment 20001247 PARAMETER Experiment Name: At_Far-red-induction_P Parameter: Timepoint (hr) Value: 1
  misc_feature: MA Experiment 20001247 PARAMETER Experiment Name: At_Far-red-induction_P Parameter: Tissue Value: Whole Plant
  misc_feature: MA Experiment ID: 20001248 Result: Up-regulated in Transcription
  misc_feature: MA Experiment 20001248 PARAMETER Experiment Name: At_Far-red-induction_P Parameter: Age (day) Value: 7
  misc_feature: MA Experiment 20001248 PARAMETER Experiment Name: At_Far-red-induction_P Parameter: Light Value: Far-red vs. White
  misc_feature: MA Experiment 20001248 PARAMETER Experiment Name: At_Far-red-induction_P Parameter: Organism Value: A. thaliana
  misc_feature: MA Experiment 20001248 PARAMETER Experiment Name: At_Far-red-induction_P Parameter: Plant Line Value: Columbia
  misc_feature: MA Experiment 20001248 PARAMETER Experiment Name: At_Far-red-induction_P Parameter: Timepoint (hr) Value: 4
  misc_feature: MA Experiment 20001248 PARAMETER Experiment Name: At_Far-red-induction_P Parameter: Tissue Value: Whole Plant
  misc_feature: MA Experiment ID: 20001450 Result: Up-regulated in Transcription
  misc_feature: MA Experiment 20001450 PARAMETER Experiment Name: At_Far-red-induction_P Parameter: Age (day) Value: 7
  misc_feature: MA Experiment 20001450 PARAMETER Experiment Name: At_Far-red-induction_P Parameter: Light Value: Far-red vs. White
  misc_feature: MA Experiment 20001450 PARAMETER Experiment Name: At_Far-red-induction_P Parameter: Organism Value: A. thaliana
  misc_feature: MA Experiment 20001450 PARAMETER Experiment Name: At_Far-red-induction_P Parameter: Plant Line Value: Columbia
  misc_feature: MA Experiment 20001450 PARAMETER Experiment Name: At_Far-red-induction_P Parameter: Timepoint (hr) Value: 8
  misc_feature: MA Experiment 20001450 PARAMETER Experiment Name: At_Far-red-induction_P Parameter: Tissue Value: Whole Plant
  misc_feature: MA Experiment ID: 20001554 Result: Down-regulated in Transcription
  misc_feature: MA Experiment 20001554 PARAMETER Experiment Name: At_Drought_Soil_Dry_P Parameter: Age (day) Value: 21
  misc_feature: MA Experiment 20001554 PARAMETER Experiment Name: At_Drought_Soil_Dry_P Parameter: Organism Value: A. thaliana
  misc_feature: MA Experiment 20001554 PARAMETER Experiment Name: At_Drought_Soil_Dry_P Parameter: Plant Line Value: WS
  misc_feature: MA Experiment 20001554 PARAMETER Experiment Name: At_Drought_Soil_Dry_P Parameter: Post Timepoint (hr) Value: None
  misc_feature: MA Experiment 20001554 PARAMETER Experiment Name: At_Drought_Soil_Dry_P Parameter: Post-Treatment Value: None
  misc_feature: MA Experiment 20001554 PARAMETER Experiment Name: At_Drought_Soil_Dry_P Parameter: Timepoint (day) Value: 7
  misc_feature: MA Experiment 20001554 PARAMETER Experiment Name: At_Drought_Soil_Dry_P Parameter: Treatment Value: Drought vs. No Drought
  misc_feature: MA Experiment ID: 20001555 Result: Down-regulated in Transcription
  misc_feature: MA Experiment 20001555 PARAMETER Experiment Name: At_Drought_Soil_Dry_P Parameter: Age (day) Value: 24
  misc_feature: MA Experiment 20001555 PARAMETER Experiment Name: At_Drought_Soil_Dry_P Parameter: Organism Value: A. thaliana
  misc_feature: MA Experiment 20001555 PARAMETER Experiment Name: At_Drought_Soil_Dry_P Parameter: Plant Line Value: WS
  misc_feature: MA Experiment 20001555 PARAMETER Experiment Name: At_Drought_Soil_Dry_P Parameter: Post Timepoint (hr) Value: None
  misc_feature: MA Experiment 20001555 PARAMETER Experiment Name: At_Drought_Soil_Dry_P Parameter: Post-Treatment Value: None
  misc_feature: MA Experiment 20001555 PARAMETER Experiment Name: At_Drought_Soil_Dry_P Parameter: Timepoint (day) Value: 10
  misc_feature: MA Experiment 20001555 PARAMETER Experiment Name: At_Drought_Soil_Dry_P Parameter: Treatment Value: Drought vs. No Drought
  misc_feature: MA Experiment ID: 20001769 Result: Up-regulated in Transcription
  misc_feature: MA Experiment 20001769 PARAMETER Experiment Name: At_Far-red-enriched-adult_P Parameter: Age (day) Value: 28
  misc_feature: MA Experiment 20001769 PARAMETER Experiment Name: At_Far-red-enriched-adult_P Parameter: Light Value: Far-red enriched vs. White
  misc_feature: MA Experiment 20001769 PARAMETER Experiment Name: At_Far-red-enriched-adult_P Parameter: Organism Value: A. thaliana
  misc_feature: MA Experiment 20001769 PARAMETER Experiment Name: At_Far-red-enriched-adult_P Parameter: Plant Line Value: Columbia
  misc_feature: MA Experiment 20001769 PARAMETER Experiment Name: At_Far-red-enriched-adult_P Parameter: Timepoint (hr) Value: 4
  misc_feature: MA Experiment 20001769 PARAMETER Experiment Name: At_Far-red-enriched-adult_P Parameter: Tissue Value: Aerial
  misc_feature: MA Experiment ID: 20001770 Result: Up-regulated in Transcription
  misc_feature: MA Experiment 20001770 PARAMETER Experiment Name: At_Far-red-enriched-adult_P Parameter: Age (day) Value: 28
  misc_feature: MA Experiment 20001770 PARAMETER Experiment Name: At_Far-red-enriched-adult_P Parameter: Light Value: Far-red enriched vs. White
  misc_feature: MA Experiment 20001770 PARAMETER Experiment Name: At_Far-red-enriched-adult_P Parameter: Organism Value: A. thaliana
  misc_feature: MA Experiment 20001770 PARAMETER Experiment Name: At_Far-red-enriched-adult_P Parameter: Plant Line Value: Columbia
  misc_feature: MA Experiment 20001770 PARAMETER Experiment Name: At_Far-red-enriched-adult_P Parameter: Timepoint (hr) Value: 8
  misc_feature: MA Experiment 20001770 PARAMETER Experiment Name: At_Far-red-enriched-adult_P Parameter: Tissue Value: Aerial
  misc_feature: MA Experiment ID: 20001906 Result: Down-regulated in Transcription
  misc_feature: MA Experiment 20001906 PARAMETER Experiment Name: At_Drought_Reproduction_P Parameter: Age (day) Value: 35
  misc_feature: MA Experiment 20001906 PARAMETER Experiment Name: At_Drought_Reproduction_P Parameter: Organism Value: A. thaliana
  misc_feature: MA Experiment 20001906 PARAMETER Experiment Name: At_Drought_Reproduction_P Parameter: Plant Line Value: WS
  misc_feature: MA Experiment 20001906 PARAMETER Experiment Name: At_Drought_Reproduction_P Parameter: Timepoint (day) Value: 5
  misc_feature: MA Experiment 20001906 PARAMETER Experiment Name: At_Drought_Reproduction_P Parameter: Tissue Value: Siliques
  misc_feature: MA Experiment 20001906 PARAMETER Experiment Name: At_Drought_Reproduction_P Parameter: Treatment Value: Drought vs. No Drought
  misc_feature: MA Experiment ID: 20001911 Result: Down-regulated in Transcription
  misc_feature: MA Experiment 20001911 PARAMETER Experiment Name: At_Drought_Reproduction_P Parameter: Age (day) Value: 40
  misc_feature: MA Experiment 20001911 PARAMETER Experiment Name: At_Drought_Reproduction_P Parameter: Organism Value: A. thaliana
  misc_feature: MA Experiment 20001911 PARAMETER Experiment Name: At_Drought_Reproduction_P Parameter: Plant Line Value: WS
  misc_feature: MA Experiment 20001911 PARAMETER Experiment Name: At_Drought_Reproduction_P Parameter: Timepoint (day) Value: 10
  misc_feature: MA Experiment 20001911 PARAMETER Experiment Name: At_Drought_Reproduction_P Parameter: Tissue Value: Flowers
  misc_feature: MA Experiment 20001911 PARAMETER Experiment Name: At_Drought_Reproduction_P Parameter: Treatment Value: Drought vs. No Drought
ctcccaaacctatcttcttcttcctctcttgtctctctcgctctctctcttctacattgtttcttgaggtcaatctattaaaaatgggattatattcactaatcacaggaagaagaggaccaagtggatttggttcagcttcaacagctgaagaggttactcaagggattgatgcaactaatctcactgcaattatcacaggagggacaggaggaatagggatggagacagcgagagtgctgtcgaagagaggtgctcatgtggtgatcggtgcccgaaacatgggagctgcagaaaacgccaaaacagagattctcagacaaaacgcaaacgcacgtgtcactcttcttcaattagatctctcttccatcaaatccatcaaagcctttgttcgtgaatttcatgccctccatcttcctctcaatctcctcataaacaatgcaggagtaatgttctgtccataccaactctctgaagatggaatcgaattgcagtttgctacaaatcacattggtcactttctgttgacaaacttgctcttggacacaatgaagaacacagctaaaaccagtggtgttgaaggaagaattttgaatgtatcatctgtagctcatatctatacttaccaagaaggaatccaattcgacagcatcaatgacatttgcagttactcggataagcgagcttacggacaatcgaaactagccaatatattgcatgctaatgagctctcccgtcagcttcaggaagaaggagtaaacataacagcaaattcagttcaccctggtcttattctcaccaatctcttccaacacactgctcttttaatgaggttcctgaagttcttcagcttctacttgtggaaaaatatacctcagggagcagcaacaacatgttatgttgctctgcatccaagtgtgaagggagtaacaggaaagtactttgctgattgcaacgaagtcactccaagcaaacttgctagagatgagactttggcacagaaactctgggatttcagtgttaagctcattaactcggtttctaaaaagaactacctcggtttcgatgacaccacttgaatctctacggtgttcttgttgaatgttacctaaagagtgaaaaaaaagtaagaacaagtagagattgtgatgtttctttccacattatcgtatggtaactcatgagatgcattgttgtatgcttaaatattttatcgagtgaatatgtaaccgcgtcaatcttttcatagtatggacaataaaaagaagggttgttcat

SEQ ID NO: 88813 - protein, 358 aa, Arabidopsis thaliana
  peptide (1)..(358): Ceres Seq. ID no. 12712684
  misc_feature (28)..(358): Homolog of NCBI NO: 18413950 NR Description: putative protein; protein id: At5g02540.1, by cDNA: 26538., supported by cDNA: gi_20260301 [Arabidopsis
  misc_feature (28)..(358): Homolog of NCBI NO: 20260302 NR Description: putative protein [Arabidopsis thaliana]
  misc_feature (28)..(358): Homolog of NCBI NO: 21554820 NR Description: putativepod-specific dehydrogenase SAC25
  misc_feature (28)..(346): Homolog of NCBI NO: 629592 NR Description: hypothetical protein - rape
  misc_feature (28)..(348): Homolog of NCBI NO: 15224306 NR Description: putative oxidoreductase; protein id: At2g37540.1, by cDNA: gi_20466184 [Arabidopsis thaliana]
  misc_feature (28)..(348): Homolog of NCBI NO: 34895876 NR Description: P0009G03.18 [Oryza sativa (japonica
  misc_feature (30)..(358): Homolog of NCBI NO: 11250521 NR Description: hypothetical protein T22P11.130 - Arabidopsis >gi|7413643|emb|CAB85991.1| putative protein [Arabidopsis
  misc_feature (36)..(345): Homolog of NCBI NO: 23297050 NR Description: unknown protein [Arabidopsis thaliana]
  misc_feature (36)..(347): Homolog of NCBI NO: 30686197 NR Description: short-chain dehydrogenase/reductase family
  misc_feature (36)..(347): Homolog of NCBI NO: 18416145 NR Description: putative protein; protein id: At4g23430.1,
PKPIFFFLSCLSRSLSSTLFLEVNLLKMGLYSLITGRRGPSGFGSASTAEEVTQGIDATNLTAIITGGTGGIGMETARVLSKRGAHVVIGARNMGAAENAKTEILRQNANARVTLLQLDLSSIKSIKAFVREFHALHLPLNLLINNAGVMFCPYQLSEDGIELQFATNHIGHFLLTNLLLDTMKNTAKTSGVEGRILNVSSVAHIYTYQEGIQFDSINDICSYSDKRAYGQSKLANILHANELSRQLQEEGVNITANSVHPGLILTNLFQHTALLMRFLKFFSFYLWKNIPQGAATTCYVALHPSVKGVTGKYFADCNEVTPSKLARDETLAQKLWDFSVKLINSVSKKNYLGFDDTT

SEQ ID NO: 88814 - protein, 331 aa, Arabidopsis thaliana
  peptide (1)..(331): Ceres Seq. ID no. 12712685
  misc_feature (1)..(331): Homolog of NCBI NO: 18413950 NR Description: putative protein; protein id: At5g02540.1, by cDNA: 26538., supported by cDNA: gi_20260301 [Arabidopsis
  misc_feature (1)..(331): Homolog of NCBI NO: 20260302 NR Description: putative protein [Arabidopsis thaliana]
  misc_feature (1)..(331): Homolog of NCBI NO: 21554820 NR Description: putativepod-specific dehydrogenase SAC25
  misc_feature (1)..(319): Homolog of NCBI NO: 629592 NR Description: hypothetical protein - rape
  misc_feature (1)..(321): Homolog of NCBI NO: 15224306 NR Description: putative oxidoreductase; protein id: At2g37540.1, by cDNA: gi_20466184 [Arabidopsis thaliana]
  misc_feature (1)..(321): Homolog of NCBI NO: 34895876 NR Description: P0009G03.18 [Oryza sativa (japonica
  misc_feature (3)..(331): Homolog of NCBI NO: 11250521 NR Description: hypothetical protein T22P11.130 - Arabidopsis >gi|7413643|emb|CAB85991.1| putative protein [Arabidopsis
  misc_feature (9)..(318): Homolog of NCBI NO: 23297050 NR Description: unknown protein [Arabidopsis thaliana]
  misc_feature (9)..(320): Homolog of NCBI NO: 30686197 NR Description: short-chain dehydrogenase/reductase family
  misc_feature (9)..(320): Homolog of NCBI NO: 18416145 NR Description: putative protein; protein id: At4g23430.1,
MGLYSLITGRRGPSGFGSASTAEEVTQGIDATNLTAIITGGTGGIGMETARVLSKRGAHVVIGARNMGAAENAKTEILRQNANARVTLLQLDLSSIKSIKAFVREFHALHLPLNLLINNAGVMFCPYQLSEDGIELQFATNHIGHFLLTNLLLDTMKNTAKTSGVEGRILNVSSVAHIYTYQEGIQFDSINDICSYSDKRAYGQSKLANILHANELSRQLQEEGVNITANSVHPGLILTNLFQHTALLMRFLKFFSFYLWKNIPQGAATTCYVALHPSVKGVTGKYFADCNEVTPSKLARDETLAQKLWDFSVKLINSVSKKNYLGFDDTT

SEQ ID NO: 88815 - protein, 285 aa, Arabidopsis thaliana; identical to SEQ ID NO: 36159
  peptide (1)..(285): Ceres Seq. ID no. 12712686
  misc_feature (1)..(285): Homolog of NCBI NO: 18413950 NR Description: putative protein; protein id: At5g02540.1, by cDNA: 26538., supported by cDNA: gi_20260301 [Arabidopsis
  misc_feature (1)..(285): Homolog of NCBI NO: 20260302 NR Description: putative protein [Arabidopsis thaliana]
  misc_feature (1)..(285): Homolog of NCBI NO: 21554820 NR Description: putativepod-specific dehydrogenase SAC25
  misc_feature (1)..(273): Homolog of NCBI NO: 629592 NR Description: hypothetical protein - rape
  misc_feature (1)..(275): Homolog of NCBI NO: 15224306 NR Description: putative oxidoreductase; protein id: At2g37540.1, by cDNA: gi_20466184 [Arabidopsis thaliana]
  misc_feature (1)..(275): Homolog of NCBI NO: 34895876 NR Description: P0009G03.18 [Oryza sativa (japonica
  misc_feature (1)..(285): Homolog of NCBI NO: 11250521 NR Description: hypothetical protein T22P11.130 - Arabidopsis >gi|7413643|emb|CAB85991.1| putative protein [Arabidopsis
  misc_feature (1)..(272): Homolog of NCBI NO: 23297050 NR Description: unknown protein [Arabidopsis thaliana]
  misc_feature (1)..(274): Homolog of NCBI NO: 30686197 NR Description: short-chain dehydrogenase/reductase family
  misc_feature (1)..(274): Homolog of NCBI NO: 18416145 NR Description: putative protein; protein id: At4g23430.1,

SEQ ID NO: 88816 - DNA, 1659 bp, Arabidopsis thaliana
  misc_feature (1)..(1659): Ceres Seq. ID no. 12712705
  misc_feature: MA Experiment ID: 20000169 Result: Up-regulated in Transcription
  misc_feature: MA Experiment 20000169 PARAMETER Experiment Name: At_100uM_ABA_P Parameter: Age (day) Value: 14
  misc_feature: MA Experiment 20000169 PARAMETER Experiment Name: At_100uM_ABA_P Parameter: Organism Value: A. thaliana
  misc_feature: MA Experiment 20000169 PARAMETER Experiment Name: At_100uM_ABA_P Parameter: Plant Line Value: WS
  misc_feature: MA Experiment 20000169 PARAMETER Experiment Name: At_100uM_ABA_P Parameter: Timepoint (hr) Value: 6
  misc_feature: MA Experiment 20000169 PARAMETER Experiment Name: At_100uM_ABA_P Parameter: Tissue Value: Aerial
  misc_feature: MA Experiment 20000169 PARAMETER Experiment Name: At_100uM_ABA_P Parameter: Treatment Value: 100uM ABA vs. No Treatment
  misc_feature: MA Experiment ID: 20000179 Result: Up-regulated in Transcription
  misc_feature: MA Experiment 20000179 PARAMETER Experiment Name: At_Germinating_Seeds_P Parameter: Age (hr) Value: 6 vs. 0
  misc_feature: MA Experiment 20000179 PARAMETER Experiment Name: At_Germinating_Seeds_P Parameter: Tissue Value: Germinating Seeds
  misc_feature: MA Experiment ID: 20000184 Result: Down-regulated in Transcription
  misc_feature: MA Experiment 20000184 PARAMETER Experiment Name: At_Shoots__P Parameter: Age (day) Value: 7
  misc_feature: MA Experiment 20000184 PARAMETER Experiment Name: At_Shoots__P Parameter: Tissue Value: Shoots vs. Whole Plant
  misc_feature: MA Experiment ID: 20000185 Result: Down-regulated in Transcription
  misc_feature: MA Experiment 20000185 PARAMETER Experiment Name: At_Roots__P Parameter: Age (day) Value: 7 vs. 21
  misc_feature: MA Experiment 20000185 PARAMETER Experiment Name: At_Roots__P Parameter: Organism Value: A. thaliana
  misc_feature: MA Experiment 20000185 PARAMETER Experiment Name: At_Roots__P Parameter: Tissue Value: Roots vs. Whole Plant
  misc_feature: MA Experiment ID: 20000227 Result: Up-regulated in Transcription
  misc_feature: MA Experiment 20000227 PARAMETER Experiment Name: At_Root-Tips-vs-Tops_P Parameter: Tissue Value: Root Tips vs. Root Tops
  misc_feature: MA Experiment ID: 20000267 Result: Up-regulated in Transcription
  misc_feature: MA Experiment 20000267 PARAMETER Experiment Name: At_Drought_P Parameter: Age (day) Value: 7
  misc_feature: MA Experiment 20000267 PARAMETER Experiment Name: At_Drought_P Parameter: Organism Value: A. thaliana
  misc_feature: MA Experiment 20000267 PARAMETER Experiment Name: At_Drought_P Parameter: Plant Line Value: WS
  misc_feature: MA Experiment 20000267 PARAMETER Experiment Name: At_Drought_P Parameter: Timepoint (hr) Value: 6
  misc_feature: MA Experiment 20000267 PARAMETER Experiment Name: At_Drought_P Parameter: Tissue Value: Whole Plant
  misc_feature: MA Experiment 20000267 PARAMETER Experiment Name: At_Drought_P Parameter: Treatment Value: Drought vs. No Drought
  misc_feature: MA Experiment ID: 20000436 Result: Up-regulated in Transcription
  misc_feature: MA Experiment 20000436 PARAMETER Experiment Name: At_Drought_P Parameter: Age (day) Value: 7
  misc_feature: MA Experiment 20000436 PARAMETER Experiment Name: At_Drought_P Parameter: Organism Value: A. thaliana
  misc_feature: MA Experiment 20000436 PARAMETER Experiment Name: At_Drought_P Parameter: Plant Line Value: WS
  misc_feature: MA Experiment 20000436 PARAMETER Experiment Name: At_Drought_P Parameter: Timepoint (hr) Value: 12
  misc_feature: MA Experiment 20000436 PARAMETER Experiment Name: At_Drought_P Parameter: Tissue Value: Whole Plant
  misc_feature: MA Experiment 20000436 PARAMETER Experiment Name: At_Drought_P Parameter: Treatment Value: Drought vs. No Drought
  misc_feature: MA Experiment ID: 20000437 Result: Up-regulated in Transcription
  misc_feature: MA Experiment 20000437 PARAMETER Experiment Name: At_Drought_P Parameter: Age (day) Value: 8
  misc_feature: MA Experiment 20000437 PARAMETER Experiment Name: At_Drought_P Parameter: Organism Value: A. thaliana
  misc_feature: MA Experiment 20000437 PARAMETER Experiment Name: At_Drought_P Parameter: Plant Line Value: WS
  misc_feature: MA Experiment 20000437 PARAMETER Experiment Name: At_Drought_P Parameter: Timepoint (hr) Value: 24
  misc_feature: MA Experiment 20000437 PARAMETER Experiment Name: At_Drought_P Parameter: Tissue Value: Whole Plant
  misc_feature: MA Experiment 20000437 PARAMETER Experiment Name: At_Drought_P Parameter: Treatment Value: Drought vs. No Drought
  misc_feature: MA Experiment ID: 20000438 Result: Down-regulated in Transcription
  misc_feature: MA Experiment 20000438 PARAMETER Experiment Name: At_Shoots__P Parameter: Age (day) Value: 14
  misc_feature: MA Experiment 20000438 PARAMETER Experiment Name: At_Shoots__P Parameter: Tissue Value: Shoots vs. Whole Plant
  misc_feature: MA Experiment ID: 20000439 Result: Down-regulated in Transcription
  misc_feature: MA Experiment 20000439 PARAMETER Experiment Name: At_Roots__P Parameter: Age (day) Value: 14 vs. 21
  misc_feature: MA Experiment 20000439 PARAMETER Experiment Name: At_Roots__P Parameter: Organism Value: A. thaliana
  misc_feature: MA Experiment 20000439 PARAMETER Experiment Name: At_Roots__P Parameter: Tissue Value: Roots vs. Whole Plant
  misc_feature: MA Experiment ID: 20000453 Result: Up-regulated in Transcription
  misc_feature: MA Experiment 20000453 PARAMETER Experiment Name: At_100uM_ABA_P Parameter: Age (day) Value: 15
  misc_feature: MA Experiment 20000453 PARAMETER Experiment Name: At_100uM_ABA_P Parameter: Organism Value: A. thaliana
  misc_feature: MA Experiment 20000453 PARAMETER Experiment Name: At_100uM_ABA_P Parameter: Plant Line Value: WS
  misc_feature: MA Experiment 20000453 PARAMETER Experiment Name: At_100uM_ABA_P Parameter: Timepoint (hr) Value: 24
  misc_feature: MA Experiment 20000453 PARAMETER Experiment Name: At_100uM_ABA_P Parameter: Tissue Value: Aerial
  misc_feature: MA Experiment 20000453 PARAMETER Experiment Name: At_100uM_ABA_P Parameter: Treatment Value: 100uM ABA vs. No Treatment
  misc_feature: MA Experiment ID: 20000495 Result: Up-regulated in Transcription
  misc_feature: MA Experiment 20000495 PARAMETER Experiment Name: At_Guard_Cells_P Parameter: Harvest Date Value: 8/2/2002
  misc_feature: MA Experiment 20000495 PARAMETER Experiment Name: At_Guard_Cells_P Parameter: Organism Value: A. thaliana
  misc_feature: MA Experiment 20000495 PARAMETER Experiment Name: At_Guard_Cells_P Parameter: Tissue Value: Guard Cells vs. Leaves
  misc_feature: MA Experiment ID: 20001451 Result: Up-regulated in Transcription
  misc_feature: MA Experiment 20001451 PARAMETER Experiment Name: At_Far-red-induction_P Parameter: Age (day) Value: 7
  misc_feature: MA Experiment 20001451 PARAMETER Experiment Name: At_Far-red-induction_P Parameter: Light Value: Far-red vs. White
  misc_feature: MA Experiment 20001451 PARAMETER Experiment Name: At_Far-red-induction_P Parameter: Organism Value: A. thaliana
  misc_feature: MA Experiment 20001451 PARAMETER Experiment Name: At_Far-red-induction_P Parameter: Plant Line Value: Columbia
  misc_feature: MA Experiment 20001451 PARAMETER Experiment Name: At_Far-red-induction_P Parameter: Timepoint (hr) Value: 24
  misc_feature: MA Experiment 20001451 PARAMETER Experiment Name: At_Far-red-induction_P Parameter: Tissue Value: Whole Plant
  misc_feature: MA Experiment ID: 20001554 Result: Up-regulated in Transcription
  misc_feature: MA Experiment 20001554 PARAMETER Experiment Name: At_Drought_Soil_Dry_P Parameter: Age (day) Value: 21
  misc_feature: MA Experiment 20001554 PARAMETER Experiment Name: At_Drought_Soil_Dry_P Parameter: Organism Value: A. thaliana
  misc_feature: MA Experiment 20001554 PARAMETER Experiment Name: At_Drought_Soil_Dry_P Parameter: Plant Line Value: WS
  misc_feature: MA Experiment 20001554 PARAMETER Experiment Name: At_Drought_Soil_Dry_P Parameter: Post Timepoint (hr) Value: None
  misc_feature: MA Experiment 20001554 PARAMETER Experiment Name: At_Drought_Soil_Dry_P Parameter: Post-Treatment Value: None
  misc_feature: MA Experiment 20001554 PARAMETER Experiment Name: At_Drought_Soil_Dry_P Parameter: Timepoint (day) Value: 7
  misc_feature: MA Experiment 20001554 PARAMETER Experiment Name: At_Drought_Soil_Dry_P Parameter: Treatment Value: Drought vs. No Drought
  misc_feature: MA Experiment ID: 20001555 Result: Up-regulated in Transcription
  misc_feature: MA Experiment 20001555 PARAMETER Experiment Name: At_Drought_Soil_Dry_P Parameter: Age (day) Value: 24
  misc_feature: MA Experiment 20001555 PARAMETER Experiment Name: At_Drought_Soil_Dry_P Parameter: Organism Value: A. thaliana
  misc_feature: MA Experiment 20001555 PARAMETER Experiment Name: At_Drought_Soil_Dry_P Parameter: Plant Line Value: WS
  misc_feature: MA Experiment 20001555 PARAMETER Experiment Name: At_Drought_Soil_Dry_P Parameter: Post Timepoint (hr) Value: None
  misc_feature: MA Experiment 20001555 PARAMETER Experiment Name: At_Drought_Soil_Dry_P Parameter: Post-Treatment Value: None
  misc_feature: MA Experiment 20001555 PARAMETER Experiment Name: At_Drought_Soil_Dry_P Parameter: Timepoint (day) Value: 10
  misc_feature: MA Experiment 20001555 PARAMETER Experiment Name: At_Drought_Soil_Dry_P Parameter: Treatment Value: Drought vs. No Drought
  misc_feature: MA Experiment ID: 20001556 Result: Up-regulated in Transcription
  misc_feature: MA Experiment 20001556 PARAMETER Experiment Name: At_Drought_Soil_Dry_P Parameter: Age (day) Value: 26
  misc_feature: MA Experiment 20001556 PARAMETER Experiment Name: At_Drought_Soil_Dry_P Parameter: Organism Value: A. thaliana
  misc_feature: MA Experiment 20001556 PARAMETER Experiment Name: At_Drought_Soil_Dry_P Parameter: Plant Line Value: WS
  misc_feature: MA Experiment 20001556 PARAMETER Experiment Name: At_Drought_Soil_Dry_P Parameter: Post Timepoint (hr) Value: None
  misc_feature: MA Experiment 20001556 PARAMETER Experiment Name: At_Drought_Soil_Dry_P Parameter: Post-Treatment Value: None
  misc_feature: MA Experiment 20001556 PARAMETER Experiment Name: At_Drought_Soil_Dry_P Parameter: Timepoint (day) Value: 12
  misc_feature: MA Experiment 20001556 PARAMETER Experiment Name: At_Drought_Soil_Dry_P Parameter: Treatment Value: Drought vs. No Drought
  misc_feature: MA Experiment ID: 20001557 Result: Up-regulated in Transcription
  misc_feature: MA Experiment 20001557 PARAMETER Experiment Name: At_Drought_Soil_Dry_P Parameter: Age (day) Value: 27
  misc_feature: MA Experiment 20001557 PARAMETER Experiment Name: At_Drought_Soil_Dry_P Parameter: Organism Value: A. thaliana
  misc_feature: MA Experiment 20001557 PARAMETER Experiment Name: At_Drought_Soil_Dry_P Parameter: Plant Line Value: WS
  misc_feature: MA Experiment 20001557 PARAMETER Experiment Name: At_Drought_Soil_Dry_P Parameter: Post Timepoint (hr) Value: 3
  misc_feature: MA Experiment 20001557 PARAMETER Experiment Name: At_Drought_Soil_Dry_P Parameter: Post-Treatment Value: Re-Water vs. No Drought
  misc_feature: MA Experiment 20001557 PARAMETER Experiment Name: At_Drought_Soil_Dry_P Parameter: Timepoint (day) Value: 13
  misc_feature: MA Experiment 20001557 PARAMETER Experiment Name: At_Drought_Soil_Dry_P Parameter: Treatment Value: Drought vs. No Drought
  misc_feature: MA Experiment ID: 20001558 Result: Up-regulated in Transcription
  misc_feature: MA Experiment 20001558 PARAMETER Experiment Name: At_Drought_Soil_Dry_P Parameter: Age (day) Value: 27
  misc_feature: MA Experiment 20001558 PARAMETER Experiment Name: At_Drought_Soil_Dry_P Parameter: Organism Value: A. thaliana
  misc_feature: MA Experiment 20001558 PARAMETER Experiment Name: At_Drought_Soil_Dry_P Parameter: Plant Line Value: WS
  misc_feature: MA Experiment 20001558 PARAMETER Experiment Name: At_Drought_Soil_Dry_P Parameter: Post Timepoint (hr) Value: 6
  misc_feature: MA Experiment 20001558 PARAMETER Experiment Name: At_Drought_Soil_Dry_P Parameter: Post-Treatment Value: Re-Water vs. No Drought
  misc_feature: MA Experiment 20001558 PARAMETER Experiment Name: At_Drought_Soil_Dry_P Parameter: Timepoint (day) Value: 13
  misc_feature: MA Experiment 20001558 PARAMETER Experiment Name: At_Drought_Soil_Dry_P Parameter: Treatment Value: Drought vs. No Drought
  misc_feature: MA Experiment ID: 20001559 Result: Up-regulated in Transcription
  misc_feature: MA Experiment 20001559 PARAMETER Experiment Name: At_Drought_Soil_Dry_P Parameter: Age (day) Value: 28
  misc_feature: MA Experiment 20001559 PARAMETER Experiment Name: At_Drought_Soil_Dry_P Parameter: Organism Value: A. thaliana
  misc_feature: MA Experiment 20001559 PARAMETER Experiment Name: At_Drought_Soil_Dry_P Parameter: Plant Line Value: WS
  misc_feature: MA Experiment 20001559 PARAMETER Experiment Name: At_Drought_Soil_Dry_P Parameter: Post Timepoint (hr) Value: 29
  misc_feature: MA Experiment 20001559 PARAMETER Experiment Name: At_Drought_Soil_Dry_P Parameter: Post-Treatment Value: Re-Water vs. No Drought
  misc_feature: MA Experiment 20001559 PARAMETER Experiment Name: At_Drought_Soil_Dry_P Parameter: Timepoint (day) Value: 14
  misc_feature: MA Experiment 20001559 PARAMETER Experiment Name: At_Drought_Soil_Dry_P Parameter: Treatment Value: Drought vs. No Drought
  misc_feature: MA Experiment ID: 20001560 Result: Up-regulated in Transcription
  misc_feature: MA Experiment 20001560 PARAMETER Experiment Name: At_Drought_Soil_Dry_P Parameter: Age (day) Value: 28
  misc_feature: MA Experiment 20001560 PARAMETER Experiment Name: At_Drought_Soil_Dry_P Parameter: Organism Value: A. thaliana
  misc_feature: MA Experiment 20001560 PARAMETER Experiment Name: At_Drought_Soil_Dry_P Parameter: Plant Line Value: WS
  misc_feature: MA Experiment 20001560 PARAMETER Experiment Name: At_Drought_Soil_Dry_P Parameter: Post Timepoint (hr) Value: None
  misc_feature: MA Experiment 20001560 PARAMETER Experiment Name: At_Drought_Soil_Dry_P Parameter: Post-Treatment Value: None
  misc_feature: MA Experiment 20001560 PARAMETER Experiment Name: At_Drought_Soil_Dry_P Parameter: Timepoint (day) Value: 14
  misc_feature: MA Experiment 20001560 PARAMETER Experiment Name: At_Drought_Soil_Dry_P Parameter: Treatment Value: Drought vs. No Drought
  misc_feature: MA Experiment ID: 20001904 Result: Up-regulated in Transcription
  misc_feature: MA Experiment 20001904 PARAMETER Experiment Name: At_Drought_Reproduction_P Parameter: Age (day) Value: 37
  misc_feature: MA Experiment 20001904 PARAMETER Experiment Name: At_Drought_Reproduction_P Parameter: Organism Value: A. thaliana
  misc_feature: MA Experiment 20001904 PARAMETER Experiment Name: At_Drought_Reproduction_P Parameter: Plant Line Value: WS
  misc_feature: MA Experiment 20001904 PARAMETER Experiment Name: At_Drought_Reproduction_P Parameter: Timepoint (day) Value: 7
  misc_feature: MA Experiment 20001904 PARAMETER Experiment Name: At_Drought_Reproduction_P Parameter: Tissue Value: Rosettes
  misc_feature: MA Experiment 20001904 PARAMETER Experiment Name: At_Drought_Reproduction_P Parameter: Treatment Value: Drought vs. No Drought
  misc_feature: MA Experiment ID: 20001905 Result: Up-regulated in Transcription
  misc_feature: MA Experiment 20001905 PARAMETER Experiment Name: At_Drought_Reproduction_P Parameter: Age (day) Value: 40
  misc_feature: MA Experiment 20001905 PARAMETER Experiment Name: At_Drought_Reproduction_P Parameter: Organism Value: A. thaliana
  misc_feature: MA Experiment 20001905 PARAMETER Experiment Name: At_Drought_Reproduction_P Parameter: Plant Line Value: WS
  misc_feature: MA Experiment 20001905 PARAMETER Experiment Name: At_Drought_Reproduction_P Parameter: Timepoint (day) Value: 10
  misc_feature: MA Experiment 20001905 PARAMETER Experiment Name: At_Drought_Reproduction_P Parameter: Tissue Value: Rosettes
  misc_feature: MA Experiment 20001905 PARAMETER Experiment Name: At_Drought_Reproduction_P Parameter: Treatment Value: Drought vs. No Drought
  misc_feature: MA Experiment ID: 20001906 Result: Up-regulated in Transcription
  misc_feature: MA Experiment 20001906 PARAMETER Experiment Name: At_Drought_Reproduction_P Parameter: Age (day) Value: 35
  misc_feature: MA Experiment 20001906 PARAMETER Experiment Name: At_Drought_Reproduction_P Parameter: Organism Value: A. thaliana
  misc_feature: MA Experiment 20001906 PARAMETER Experiment Name: At_Drought_Reproduction_P Parameter: Plant Line Value: WS
  misc_feature: MA Experiment 20001906 PARAMETER Experiment Name: At_Drought_Reproduction_P Parameter: Timepoint (day) Value: 5
  misc_feature: MA Experiment 20001906 PARAMETER Experiment Name: At_Drought_Reproduction_P Parameter: Tissue Value: Siliques
  misc_feature: MA Experiment 20001906 PARAMETER Experiment Name: At_Drought_Reproduction_P Parameter: Treatment Value: Drought vs. No Drought
  misc_feature: MA Experiment ID: 20001908 Result: Up-regulated in Transcription
  misc_feature: MA Experiment 20001908 PARAMETER Experiment Name: At_Drought_Reproduction_P Parameter: Age (day) Value: 40
  misc_feature: MA Experiment 20001908 PARAMETER Experiment Name: At_Drought_Reproduction_P Parameter: Organism Value: A. thaliana
  misc_feature: MA Experiment 20001908 PARAMETER Experiment Name: At_Drought_Reproduction_P Parameter: Plant Line Value: WS
  misc_feature: MA Experiment 20001908 PARAMETER Experiment Name: At_Drought_Reproduction_P Parameter: Timepoint (day) Value: 10
  misc_feature: MA Experiment 20001908 PARAMETER Experiment Name: At_Drought_Reproduction_P Parameter: Tissue Value: Siliques
  misc_feature: MA Experiment 20001908 PARAMETER Experiment Name: At_Drought_Reproduction_P Parameter: Treatment Value: Drought vs. No Drought
  misc_feature: MA Experiment ID: 20001910 Result: Up-regulated in Transcription
  misc_feature: MA Experiment 20001910 PARAMETER Experiment Name: At_Drought_Reproduction_P Parameter: Age (day) Value: 37
  misc_feature: MA Experiment 20001910 PARAMETER Experiment Name: At_Drought_Reproduction_P Parameter: Organism Value: A. thaliana
  misc_feature: MA Experiment 20001910 PARAMETER Experiment Name: At_Drought_Reproduction_P Parameter: Plant Line Value: WS
  misc_feature: MA Experiment 20001910 PARAMETER Experiment Name: At_Drought_Reproduction_P Parameter: Timepoint (day) Value: 7
  misc_feature: MA Experiment 20001910 PARAMETER Experiment Name: At_Drought_Reproduction_P Parameter: Tissue Value: Flowers
  misc_feature: MA Experiment 20001910 PARAMETER Experiment Name: At_Drought_Reproduction_P Parameter: Treatment Value: Drought vs. No Drought
  misc_feature: MA Experiment ID: 20001911 Result: Up-regulated in Transcription
  misc_feature: MA Experiment 20001911 PARAMETER Experiment Name: At_Drought_Reproduction_P Parameter: Age (day) Value: 40
  misc_feature: MA Experiment 20001911 PARAMETER Experiment Name: At_Drought_Reproduction_P Parameter: Organism Value: A. thaliana
  misc_feature: MA Experiment 20001911 PARAMETER Experiment Name: At_Drought_Reproduction_P Parameter: Plant Line Value: WS
  misc_feature: MA Experiment 20001911 PARAMETER Experiment Name: At_Drought_Reproduction_P Parameter: Timepoint (day) Value: 10
  misc_feature: MA Experiment 20001911 PARAMETER Experiment Name: At_Drought_Reproduction_P Parameter: Tissue Value: Flowers
  misc_feature: MA Experiment 20001911 PARAMETER Experiment Name: At_Drought_Reproduction_P Parameter: Treatment Value: Drought vs. No Drought
aaatcctcgcacaagtagaaaaaaacacaaacatcctgaaactagaagagagagacaaaatgttatacttcatccttctccctcttctatttcttgtaataagttacaaatttctctactccaaaacgcaacgtttcaaccttcctccaggaccaccgtcacgacccttcgtcggccatctccacctcatgaaaccgccgatccaccgtctcctccaacgctactccaaccaatacggcccaatcttttccctccgtttcggctcccgacgcgtcgtggtcataacatccccttctctcgcccaagaatccttcaccggccaaaacgacatcgttctctccagccggccgctccaactcaccgccaaatacgtcgcatacaaccacacaaccgttggtacagctccttacggcgaccactggcgtaacctccgccgcatttgctcccaagagattctctcctctcaccgtctcatcaacttccaacacatccgcaaagacgagatcttacggatgctcacacgcctctcacgttacacacaaacctccaacgaaagcaacgatttcactcacatcgagctagaaccgctcttatctgatctaacattcaacaacatagtaagaatggttacagggaagagatattacggcgacgacgtcaacaacaaagaagaagcagagctattcaagaagctagtctacgatatcgccatgtatagcggcgctaatcattccgctgattacttaccaatactaaaactattcggaaacaaattcgagaaagaagttaaagctataggcaaatcaatggatgatattttgcagcgtttgttagatgaatgtagaagagataaagaaggtaacacaatggtcaatcatttgatctctctacaacaacaacaacctgagtattacactgacgttatcatcaaaggccttatgatgtcgatgatgctcgccggaactgagacctccgctgtgacattagagtgggcgatggcgaatctactgagaaatccagaagtactggagaaggcgagatcggagatcgatgagaagatcggaaaagatcgactaatcgacgaatcagacatcgcagtgcttccttacctccaaaacgtcgtctccgaaacattccggctatttccggtggcgccgtttctaatccctcgatcaccgacggacgacatgaaaatcggaggttacgacgtcccgcgagatacgatagtgatggttaacgcttgggctatacatagagatccagagatttgggaggagccagagaagtttaatccagatcgatataatgacggatgcggaagcgattactatgtttacaagctgatgccgtttgggaatggccggagaacttgtcccggcgccggattaggtcagaggattgtgacattggcgcttggatcgttgattcaatgctttgaatgggagaatgtgaaaggggaagagatggatatgtctgagagtactgggttgggtatgcgtaagatggatcctttacgggccatgtgtaggcctaggcccattatgtcaaagcttttactctaataagatgagtagaggttaaaaaagaaaaaataacttattggatgtaactggtaattatctttaagataaagatgaataaaatgaatctttgcctcat

SEQ ID NO: 88817 - protein, 519 aa, Arabidopsis thaliana; identical to SEQ ID NO: 22364
  peptide (1)..(519): Ceres Seq. ID no. 12712706
  misc_feature (20)..(519): Homolog of NCBI NO: 15235559 NR Description: cytochrome p450 family; protein id: At4g37430.1, by cDNA: 33365., supported by cDNA: gi_14532439, supported by gi_3164143 [Arabidopsis thaliana]
  misc_feature (20)..(519): Homolog of NCBI NO: 21618274 NR Description: cytochrome P450 monooxygenase CYP91A2
  misc_feature (20)..(519): Homolog of NCBI NO: 25282605 NR Description: cytochrome P450 monooxygenase [imported] - thaliana >gi|3164144|dbj|BAA28539.1| cytochrome P450
  misc_feature (20)..(519): Homolog of NCBI NO: 18491105 NR Description: AT4g37430/F6G17_80 [Arabidopsis thaliana]
  misc_feature (20)..(503): Homolog of NCBI NO: 23397303 NR Description: putative cytochrome P450 monooxygenase (CYP91A2)
  misc_feature (22)..(517): Homolog of NCBI NO: 18420031 NR Description: cytochrome p450 family; protein id: At4g37400.1,
  misc_feature (22)..(517): Homolog of NCBI NO: 21618287 NR Description: cytochrome P450 monooxygenase-like protein
  misc_feature (24)..(518): Homolog of NCBI NO: 15242068 NR Description: cytochrome p450 family; protein id: At5g57220.1, by cDNA: gi_17528949, supported by cDNA: gi_20465950 [Arabidopsis >gi|8777355|dbj|BAA96945.1| cytochrome P450 [Arabidopsis
  misc_feature (22)..(517): Homolog of NCBI NO: 15235541 NR Description: cytochrome p450, putative; protein id: supported by cDNA: 102007. [Arabidopsis thaliana]
  misc_feature (22)..(479): Homolog of NCBI NO: 18252165 NR Description: cytochrome P450 monooxygenase - like protein

SEQ ID NO: 88818 - protein, 500 aa, Arabidopsis thaliana; identical to SEQ ID NO: 22365
  peptide (1)..(500): Ceres Seq. ID no. 12712707
  misc_feature (1)..(500): Homolog of NCBI NO: 15235559 NR Description: cytochrome p450 family; protein id: At4g37430.1, by cDNA: 33365., supported by cDNA: gi_14532439, supported by gi_3164143 [Arabidopsis thaliana]
  misc_feature (1)..(500): Homolog of NCBI NO: 21618274 NR Description: cytochrome P450 monooxygenase CYP91A2
  misc_feature (1)..(500): Homolog of NCBI NO: 25282605 NR Description: cytochrome P450 monooxygenase [imported] - thaliana >gi|3164144|dbj|BAA28539.1| cytochrome P450
  misc_feature (1)..(500): Homolog of NCBI NO: 18491105 NR Description: AT4g37430/F6G17_80 [Arabidopsis thaliana]
  misc_feature (1)..(484): Homolog of NCBI NO: 23397303 NR Description: putative cytochrome P450 monooxygenase (CYP91A2)
  misc_feature (3)..(498): Homolog of NCBI NO: 18420031 NR Description: cytochrome p450 family; protein id: At4g37400.1,
  misc_feature (3)..(498): Homolog of NCBI NO: 21618287 NR Description: cytochrome P450 monooxygenase-like protein
  misc_feature (5)..(499): Homolog of NCBI NO: 15242068 NR Description: cytochrome p450 family; protein id: At5g57220.1, by cDNA: gi_17528949, supported by cDNA: gi_20465950 [Arabidopsis >gi|8777355|dbj|BAA96945.1| cytochrome P450 [Arabidopsis
  misc_feature (3)..(498): Homolog of NCBI NO: 15235541 NR Description: cytochrome p450, putative; protein id: supported by cDNA: 102007. [Arabidopsis thaliana]
  misc_feature (3)..(460): Homolog of NCBI NO: 18252165 NR Description: cytochrome P450 monooxygenase - like protein

SEQ ID NO: 88819 - protein, 457 aa, Arabidopsis thaliana; identical to SEQ ID NO: 22366
  peptide (1)..(457): Ceres Seq. ID no. 12712708
  misc_feature (1)..(457): Homolog of NCBI NO: 15235559 NR Description: cytochrome p450 family; protein id: At4g37430.1, by cDNA: 33365., supported by cDNA: gi_14532439, supported by gi_3164143 [Arabidopsis thaliana]
  misc_feature (1)..(457): Homolog of NCBI NO: 21618274 NR Description: cytochrome P450 monooxygenase CYP91A2
  misc_feature (1)..(457): Homolog of NCBI NO: 25282605 NR Description: cytochrome P450 monooxygenase [imported] - thaliana >gi|3164144|dbj|BAA28539.1| cytochrome P450
  misc_feature (1)..(457): Homolog of NCBI NO: 18491105 NR Description: AT4g37430/F6G17_80 [Arabidopsis thaliana]
  misc_feature (1)..(441): Homolog of NCBI NO: 23397303 NR Description: putative cytochrome P450 monooxygenase (CYP91A2)
  misc_feature (1)..(455): Homolog of NCBI NO: 18420031 NR Description: cytochrome p450 family; protein id: At4g37400.1,
  misc_feature (1)..(455): Homolog of NCBI NO: 21618287 NR Description: cytochrome P450 monooxygenase-like protein
  misc_feature (1)..(456): Homolog of NCBI NO: 15242068 NR Description: cytochrome p450 family; protein id: At5g57220.1, by cDNA: gi_17528949, supported by cDNA: gi_20465950 [Arabidopsis >gi|8777355|dbj|BAA96945.1| cytochrome P450 [Arabidopsis
  misc_feature (1)..(455): Homolog of NCBI NO: 15235541 NR Description: cytochrome p450, putative; protein id: supported by cDNA: 102007. [Arabidopsis thaliana]
  misc_feature (1)..(417): Homolog of NCBI NO: 18252165 NR Description: cytochrome P450 monooxygenase - like protein

SEQ ID NO: 88820 - DNA, 1065 bp, Arabidopsis thaliana
  misc_feature (1)..(1065): Ceres Seq. ID no. 12712778
  misc_feature: MA Experiment ID: 20000166 Result: Up-regulated in Transcription
  misc_feature: MA Experiment 20000166 PARAMETER Experiment Name: At_100uM_ABA_P Parameter: Age (day) Value: 14
  misc_feature: MA Experiment 20000166 PARAMETER Experiment Name: At_100uM_ABA_P Parameter: Organism Value: A. thaliana
  misc_feature: MA Experiment 20000166 PARAMETER Experiment Name: At_100uM_ABA_P Parameter: Plant Line Value: WS
  misc_feature: MA Experiment 20000166 PARAMETER Experiment Name: At_100uM_ABA_P Parameter: Timepoint (hr) Value: 1
  misc_feature: MA Experiment 20000166 PARAMETER Experiment Name: At_100uM_ABA_P Parameter: Tissue Value: Aerial
  misc_feature: MA Experiment 20000166 PARAMETER Experiment Name: At_100uM_ABA_P Parameter: Treatment Value: 100uM ABA vs. No Treatment
  misc_feature: MA Experiment ID: 20000173 Result: Down-regulated in Transcription
  misc_feature: MA Experiment 20000173 PARAMETER Experiment Name: At_42deg_Heat_P Parameter: Age (day) Value: 14
  misc_feature: MA Experiment 20000173 PARAMETER Experiment Name: At_42deg_Heat_P Parameter: Organism Value: A. thaliana
  misc_feature: MA Experiment 20000173 PARAMETER Experiment Name: At_42deg_Heat_P Parameter: Plant Line Value: WS
  misc_feature: MA Experiment 20000173 PARAMETER Experiment Name: At_42deg_Heat_P Parameter: Temperature (deg C) Value: 42 vs. 22
  misc_feature: MA Experiment 20000173 PARAMETER Experiment Name: At_42deg_Heat_P Parameter: Timepoint (hr) Value: 6
  misc_feature: MA Experiment 20000173 PARAMETER Experiment Name: At_42deg_Heat_P Parameter: Tissue Value: Aerial
  misc_feature: MA Experiment ID: 20000182 Result: Up-regulated in Transcription
  misc_feature: MA Experiment 20000182 PARAMETER Experiment Name: At_2mM_SA_P Parameter: Age (day) Value: 14
  misc_feature: MA Experiment 20000182 PARAMETER Experiment Name: At_2mM_SA_P Parameter: Organism Value: A. thaliana
  misc_feature: MA Experiment 20000182 PARAMETER Experiment Name: At_2mM_SA_P Parameter: Plant Line Value: WS
  misc_feature: MA Experiment 20000182 PARAMETER Experiment Name: At_2mM_SA_P Parameter: Timepoint (hr) Value: 6
  misc_feature: MA Experiment 20000182 PARAMETER Experiment Name: At_2mM_SA_P Parameter: Tissue Value: Aerial
  misc_feature: MA Experiment 20000182 PARAMETER Experiment Name: At_2mM_SA_P Parameter: Treatment Value: 2mM SA vs. No Treatment
  misc_feature: MA Experiment ID: 20000184 Result: Down-regulated in Transcription
  misc_feature: MA Experiment 20000184 PARAMETER Experiment Name: At_Shoots__P Parameter: Age (day) Value: 7
  misc_feature: MA Experiment 20000184 PARAMETER Experiment Name: At_Shoots__P Parameter: Tissue Value: Shoots vs. Whole Plant
  misc_feature: MA Experiment ID: 20000185 Result: Down-regulated in Transcription
  misc_feature: MA Experiment 20000185 PARAMETER Experiment Name: At_Roots__P Parameter: Age (day) Value: 7 vs. 21
  misc_feature: MA Experiment 20000185 PARAMETER Experiment Name: At_Roots__P Parameter: Organism Value: A. thaliana
  misc_feature: MA Experiment 20000185 PARAMETER Experiment Name: At_Roots__P Parameter: Tissue Value: Roots vs. Whole Plant
  misc_feature: MA Experiment ID: 20000234 Result: Down-regulated in Transcription
  misc_feature: MA Experiment 20000234 PARAMETER Experiment Name: At_Siliques_P Parameter: Age (day) Value: 21
  misc_feature: MA Experiment 20000234 PARAMETER Experiment Name: At_Siliques_P Parameter: Organism Value: A. thaliana
  misc_feature: MA Experiment 20000234 PARAMETER Experiment Name: At_Siliques_P Parameter: Plant Line Value: WS
  misc_feature: MA Experiment 20000234 PARAMETER Experiment Name: At_Siliques_P Parameter: Tissue Value: Less Than 5mm Siliques vs. Whole Plant
  misc_feature: MA Experiment ID: 20000235 Result: Down-regulated in Transcription
  misc_feature: MA Experiment 20000235 PARAMETER Experiment Name: At_Siliques_P Parameter: Age (day) Value: 21
  misc_feature: MA Experiment 20000235 PARAMETER Experiment Name: At_Siliques_P Parameter: Organism Value: A. thaliana
  misc_feature: MA Experiment 20000235 PARAMETER Experiment Name: At_Siliques_P Parameter: Plant Line Value: WS
  misc_feature: MA Experiment 20000235 PARAMETER Experiment Name: At_Siliques_P Parameter: Tissue Value: 5-10mm Siliques vs. Whole Plant
  misc_feature: MA Experiment ID: 20000264 Result: Down-regulated in Transcription
  misc_feature: MA Experiment 20000264 PARAMETER Experiment Name: At_Open_Flower_P Parameter: Age (day) Value: 21
  misc_feature: MA Experiment 20000264 PARAMETER Experiment Name: At_Open_Flower_P Parameter: Plant Line Value: WS
  misc_feature: MA Experiment 20000264 PARAMETER Experiment Name: At_Open_Flower_P Parameter: Tissue Value: Open Flower vs. Whole Plant
  misc_feature: MA Experiment ID: 20000265 Result: Down-regulated in Transcription
  misc_feature: MA Experiment 20000265 PARAMETER Experiment Name: At_Open_Flower_P Parameter: Age (day) Value: 21
  misc_feature: MA Experiment 20000265 PARAMETER Experiment Name: At_Open_Flower_P Parameter: Plant Line Value: WS
  misc_feature: MA Experiment 20000265 PARAMETER Experiment Name: At_Open_Flower_P Parameter: Tissue Value: Closed Flower vs. Whole Plant
  misc_feature: MA Experiment ID: 20000267 Result: Up-regulated in Transcription
  misc_feature: MA Experiment 20000267 PARAMETER Experiment Name: At_Drought_P Parameter: Age (day) Value: 7
  misc_feature: MA Experiment 20000267 PARAMETER Experiment Name: At_Drought_P Parameter: Organism Value: A. thaliana
  misc_feature: MA Experiment 20000267 PARAMETER Experiment Name: At_Drought_P Parameter: Plant Line Value: WS
  misc_feature: MA Experiment 20000267 PARAMETER Experiment Name: At_Drought_P Parameter: Timepoint (hr) Value: 6
  misc_feature: MA Experiment 20000267 PARAMETER Experiment Name: At_Drought_P Parameter: Tissue Value: Whole Plant
  misc_feature: MA Experiment 20000267 PARAMETER Experiment Name: At_Drought_P Parameter: Treatment Value: Drought vs. No Drought
  misc_feature: MA Experiment ID: 20000286 Result: Down-regulated in Transcription
  misc_feature: MA Experiment 20000286 PARAMETER Experiment Name: At_Open_Flower_P Parameter: Age (day) Value: 21
  misc_feature: MA Experiment 20000286 PARAMETER Experiment Name: At_Open_Flower_P Parameter: Plant Line Value: WS
  misc_feature: MA Experiment 20000286 PARAMETER Experiment Name: At_Open_Flower_P Parameter: Tissue Value: Half Open vs. Whole Plant
  misc_feature: MA Experiment ID: 20000436 Result: Up-regulated in Transcription
  misc_feature: MA Experiment 20000436 PARAMETER Experiment Name: At_Drought_P Parameter: Age (day) Value: 7
  misc_feature: MA Experiment 20000436 PARAMETER Experiment Name: At_Drought_P Parameter: Organism Value: A. thaliana
  misc_feature: MA Experiment 20000436 PARAMETER Experiment Name: At_Drought_P Parameter: Plant Line Value: WS
  misc_feature: MA Experiment 20000436 PARAMETER Experiment Name: At_Drought_P Parameter: Timepoint (hr) Value: 12
  misc_feature: MA Experiment 20000436 PARAMETER Experiment Name: At_Drought_P Parameter: Tissue Value: Whole Plant
  misc_feature: MA Experiment 20000436 PARAMETER Experiment Name: At_Drought_P Parameter: Treatment Value: Drought vs. No Drought
  misc_feature: MA Experiment ID: 20000437 Result: Up-regulated in Transcription
  misc_feature: MA Experiment 20000437 PARAMETER Experiment Name: At_Drought_P Parameter: Age (day) Value: 8
  misc_feature: MA Experiment 20000437 PARAMETER Experiment Name: At_Drought_P Parameter: Organism Value: A. thaliana
  misc_feature: MA Experiment 20000437 PARAMETER Experiment Name: At_Drought_P Parameter: Plant Line Value: WS
  misc_feature: MA Experiment 20000437 PARAMETER Experiment Name: At_Drought_P Parameter: Timepoint (hr) Value: 24
  misc_feature: MA Experiment 20000437 PARAMETER Experiment Name: At_Drought_P Parameter: Tissue Value: Whole Plant
  misc_feature: MA Experiment 20000437 PARAMETER Experiment Name: At_Drought_P Parameter: Treatment Value: Drought vs. No Drought
  misc_feature: MA Experiment ID: 20000438 Result: Down-regulated in Transcription
  misc_feature: MA Experiment 20000438 PARAMETER Experiment Name: At_Shoots__P Parameter: Age (day) Value: 14
  misc_feature: MA Experiment 20000438 PARAMETER Experiment Name: At_Shoots__P Parameter: Tissue Value: Shoots vs. Whole Plant
  misc_feature: MA Experiment ID: 20000439 Result: Down-regulated in Transcription
  misc_feature: MA Experiment 20000439 PARAMETER Experiment Name: At_Roots__P Parameter: Age (day) Value: 14 vs. 21
  misc_feature: MA Experiment 20000439 PARAMETER Experiment Name: At_Roots__P Parameter: Organism Value: A. thaliana
  misc_feature: MA Experiment 20000439 PARAMETER Experiment Name: At_Roots__P Parameter: Tissue Value: Roots vs. Whole Plant
  misc_feature: MA Experiment ID: 20000453 Result: Up-regulated in Transcription
  misc_feature: MA Experiment 20000453 PARAMETER Experiment Name: At_100uM_ABA_P Parameter: Age (day) Value: 15
  misc_feature: MA Experiment 20000453 PARAMETER Experiment Name: At_100uM_ABA_P Parameter: Organism Value: A. thaliana
  misc_feature: MA Experiment 20000453 PARAMETER Experiment Name: At_100uM_ABA_P Parameter: Plant Line Value: WS
  misc_feature: MA Experiment 20000453 PARAMETER Experiment Name: At_100uM_ABA_P Parameter: Timepoint (hr) Value: 24
  misc_feature: MA Experiment 20000453 PARAMETER Experiment Name: At_100uM_ABA_P Parameter: Tissue Value: Aerial
  misc_feature: MA Experiment 20000453 PARAMETER Experiment Name: At_100uM_ABA_P Parameter: Treatment Value: 100uM ABA vs. No Treatment
  misc_feature: MA Experiment ID: 20000456 Result: Up-regulated in Transcription
  misc_feature: MA Experiment 20000456 PARAMETER Experiment Name: At_100uM_BA_P Parameter: Age (day) Value: 14
  misc_feature: MA Experiment 20000456 PARAMETER Experiment Name: At_100uM_BA_P Parameter: Organism Value: A. thaliana
  misc_feature: MA Experiment 20000456 PARAMETER Experiment Name: At_100uM_BA_P Parameter: Plant Line Value: WS
  misc_feature: MA Experiment 20000456 PARAMETER Experiment Name: At_100uM_BA_P Parameter: Timepoint (hr) Value: 6
  misc_feature: MA Experiment 20000456 PARAMETER Experiment Name: At_100uM_BA_P Parameter: Tissue Value: Aerial
  misc_feature: MA Experiment 20000456 PARAMETER Experiment Name: At_100uM_BA_P Parameter: Treatment Value: 100uM BA vs. No Treatment
  misc_feature: MA Experiment ID: 20000495 Result: Down-regulated in Transcription
  misc_feature: MA Experiment 20000495 PARAMETER Experiment Name: At_Guard_Cells_P Parameter: Harvest Date Value: 8/2/2002
  misc_feature: MA Experiment 20000495 PARAMETER Experiment Name: At_Guard_Cells_P Parameter: Organism Value: A. thaliana
  misc_feature: MA Experiment 20000495 PARAMETER Experiment Name: At_Guard_Cells_P Parameter: Tissue Value: Guard Cells vs. Leaves
  misc_feature: MA Experiment ID: 20000506 Result: Up-regulated in Transcription
  misc_feature: MA Experiment 20000506 PARAMETER Experiment Name: At_Wounding_P Parameter: Organism Value: A. thaliana
  misc_feature: MA Experiment 20000506 PARAMETER Experiment Name: At_Wounding_P Parameter: Plant Line Value: WS
  misc_feature: MA Experiment 20000506 PARAMETER Experiment Name: At_Wounding_P Parameter: Timepoint (hr) Value: 6
  misc_feature: MA Experiment 20000506 PARAMETER Experiment Name: At_Wounding_P Parameter: Tissue Value: Aerial
  misc_feature: MA Experiment 20000506 PARAMETER Experiment Name: At_Wounding_P Parameter: Treatment Value: Wounding vs. No Wounding
  misc_feature: MA Experiment ID: 20000794 Result: Down-regulated in Transcription
  misc_feature: MA Experiment 20000794 PARAMETER Experiment Name: At_Petals_P Parameter: Age (day) Value: 23-25 days
  misc_feature: MA Experiment 20000794 PARAMETER Experiment Name: At_Petals_P Parameter: Plant Line Value: WS
  misc_feature: MA Experiment 20000794 PARAMETER Experiment Name: At_Petals_P Parameter: Tissue Value: Petals vs. Whole plant
  misc_feature: MA Experiment ID: 20001450 Result: Up-regulated in Transcription
  misc_feature: MA Experiment 20001450 PARAMETER Experiment Name: At_Far-red-induction_P Parameter: Age (day) Value: 7
  misc_feature: MA Experiment 20001450 PARAMETER Experiment Name: At_Far-red-induction_P Parameter: Light Value: Far-red vs. White
  misc_feature: MA Experiment 20001450 PARAMETER Experiment Name: At_Far-red-induction_P Parameter: Organism Value: A. thaliana
  misc_feature: MA Experiment 20001450 PARAMETER Experiment Name: At_Far-red-induction_P Parameter: Plant Line Value: Columbia
  misc_feature: MA Experiment 20001450 PARAMETER Experiment Name: At_Far-red-induction_P Parameter: Timepoint (hr) Value: 8
  misc_feature: MA Experiment 20001450 PARAMETER Experiment Name: At_Far-red-induction_P Parameter: Tissue Value: Whole Plant
  misc_feature: MA Experiment ID: 20001554 Result: Down-regulated in Transcription
  misc_feature: MA Experiment 20001554 PARAMETER Experiment Name: At_Drought_Soil_Dry_P Parameter: Age (day) Value: 21
  misc_feature: MA Experiment 20001554 PARAMETER Experiment Name: At_Drought_Soil_Dry_P Parameter: Organism Value: A. thaliana
  misc_feature: MA Experiment 20001554 PARAMETER Experiment Name: At_Drought_Soil_Dry_P Parameter: Plant Line Value: WS
  misc_feature: MA Experiment 20001554 PARAMETER Experiment Name: At_Drought_Soil_Dry_P Parameter: Post Timepoint (hr) Value: None
  misc_feature: MA Experiment 20001554 PARAMETER Experiment Name: At_Drought_Soil_Dry_P Parameter: Post-Treatment Value: None
  misc_feature: MA Experiment 20001554 PARAMETER Experiment Name: At_Drought_Soil_Dry_P Parameter: Timepoint (day) Value: 7
  misc_feature: MA Experiment 20001554 PARAMETER Experiment Name: At_Drought_Soil_Dry_P Parameter: Treatment Value: Drought vs. No Drought
atggccgttacttcgcttctcgataccgttttccgacgtagaaagaagaagtctactgagtttataagctatacagcagttttcgaattcgacttggacaccattaaagctgcaacaaatgatttctcagaactggttggtcgtggcggatttggttttgtttacaagggtaggcttcaaaatggacaagaaatagcagtcaagattttgtctacaagttcaattagaactgagagacagtttcataacgaacttattattttgtctaagcttaaacacaagaatctgatcaatcttcttggtttctgcactaaacgagaccaacatggtcttgtttacgagttcatgcctaactcaagcctcgattgttttatactcgacccacacagagctgctcagctaaattgggagatgtgccgaaacattattgatggcatagctcgagggctacgttaccttcatgaagaatccgggttatgggtcgttcaccgcgacattaaacctggaaacattctattggattcagatttgaaaccgaaaatagtgggatttgaattggcgaggacgatgcaacaaggtgaaaacgcagctgaaacaactgaaattgtcggtaccgtagggtatttagatccggagtacatacgaagcggacgtgtttccgtcaaatctgacgtttatgcctttggagttacaatcttgacgatcattagcagaaggaaggcttggagtgtggacggagactctctaatcaaatatgttaggagatgctggaacagaggagaagccatagatgtgatccatgaagtgatgagggaagaagaaagagaatattcgataagcgaaatcttgagatacattcacattgctttgctatgtgtggatgagaatgctgagagaaggccgaatattgataaagttctgcattggtttagttgtttctctactcctttacctgatccaacatttggtaatagatttcttgtagaggaagaaacaaattggccctggtcgccatctttatctcctggtcacagctctgtcacgtcacccatatcttcacgttaa

SEQ ID NO: 88821 - protein, 354 aa, Arabidopsis thaliana
  peptide (1)..(354): Ceres Seq. ID no. 12712779
  misc_feature (1)..(354): Homolog of NCBI NO: 15234344 NR Description: protein kinase - like protein; protein id: [Arabidopsis thaliana] >gi|7488275|pir||T09348 protein kinase
  misc_feature (1)..(354): Homolog of NCBI NO: 30681932 NR Description: protein kinase family [Arabidopsis thaliana] putative protein kinase [Arabidopsis thaliana]
  misc_feature (10)..(353): Homolog of NCBI NO: 4008012 NR Description: receptor-like protein kinase [Arabidopsis
  misc_feature (10)..(353): Homolog of NCBI NO: 15236444 NR Description: protein kinase - like protein; protein id:
  misc_feature (1)..(346): Homolog of NCBI NO: 4530126 NR Description: receptor-like protein kinase homolog RK20-1
  misc_feature (12)..(353): Homolog of NCBI NO: 22655168 NR Description: protein kinase-like protein [Arabidopsis thaliana]
  misc_feature (6)..(320): Homolog of NCBI NO: 19699091 NR Description: AT4g23250/F21P8_140 [Arabidopsis thaliana]
  misc_feature (6)..(320): Homolog of NCBI NO: 22328880 NR Description: putative protein; protein id: At4g23260.1,
  misc_feature (30)..(321): Homolog of NCBI NO: 15233525 NR Description: putative receptor-like protein kinase; protein id:
  misc_feature (10)..(321): Homolog of NCBI NO: 18076585 NR Description: putative receptor-like serine-threonine protein
MAVTSLLDTVFRRRKKKSTEFISYTAVFEFDLDTIKAATNDFSELVGRGGFGFVYKGRLQNGQEIAVKILSTSSIRTERQFHNELIILSKLKHKNLINLLGFCTKRDQHGLVYEFMPNSSLDCFILDPHRAAQLNWEMCRNIIDGIARGLRYLHEESGLWVVHRDIKPGNILLDSDLKPKIVGFELARTMQQGENAAETTEIVGTVGYLDPEYIRSGRVSVKSDVYAFGVTILTIISRRKAWSVDGDSLIKYVRRCWNRGEAIDVIHEVMREEEREYSISEILRYIHIALLCVDENAERRPNIDKVLHWFSCFSTPLPDPTFGNRFLVEEETNWPWSPSLSPGHSSVTSPISSR

SEQ ID NO: 88822 - protein, 239 aa, Arabidopsis thaliana; identical to SEQ ID NO: 69755
  peptide (1)..(239): Ceres Seq. ID no. 12712780
  misc_feature (1)..(239): Homolog of NCBI NO: 15234344 NR Description: protein kinase - like protein; protein id: [Arabidopsis thaliana] >gi|7488275|pir||T09348 protein kinase
  misc_feature (1)..(239): Homolog of NCBI NO: 30681932 NR Description: protein kinase family [Arabidopsis thaliana] putative protein kinase [Arabidopsis thaliana]
  misc_feature (1)..(238): Homolog of NCBI NO: 4008012 NR Description: receptor-like protein kinase [Arabidopsis
  misc_feature (1)..(238): Homolog of NCBI NO: 15236444 NR Description: protein kinase - like protein; protein id:
  misc_feature (1)..(231): Homolog of NCBI NO: 4530126 NR Description: receptor-like protein kinase homolog RK20-1
  misc_feature (1)..(238): Homolog of NCBI NO: 22655168 NR Description: protein kinase-like protein [Arabidopsis thaliana]
  misc_feature (1)..(205): Homolog of NCBI NO: 19699091 NR Description: AT4g23250/F21P8_140 [Arabidopsis thaliana]
  misc_feature (1)..(205): Homolog of NCBI NO: 22328880 NR Description: putative protein; protein id: At4g23260.1,
  misc_feature (1)..(206): Homolog of NCBI NO: 15233525 NR Description: putative receptor-like protein kinase; protein id:
  misc_feature (1)..(206): Homolog of NCBI NO: 18076585 NR Description: putative receptor-like serine-threonine protein

SEQ ID NO: 88823 - protein, 217 aa, Arabidopsis thaliana; identical to SEQ ID NO: 69756
  peptide (1)..(217): Ceres Seq. ID no. 12712781
  misc_feature (1)..(217): Homolog of NCBI NO: 15234344 NR Description: protein kinase - like protein; protein id: [Arabidopsis thaliana] >gi|7488275|pir||T09348 protein kinase
  misc_feature (1)..(217): Homolog of NCBI NO: 30681932 NR Description: protein kinase family [Arabidopsis thaliana] putative protein kinase [Arabidopsis thaliana]
  misc_feature (1)..(216): Homolog of NCBI NO: 4008012 NR Description: receptor-like protein kinase [Arabidopsis
  misc_feature (1)..(216): Homolog of NCBI NO: 15236444 NR Description: protein kinase - like protein; protein id:
  misc_feature (1)..(209): Homolog of NCBI NO: 4530126 NR Description: receptor-like protein kinase homolog RK20-1
  misc_feature (1)..(216): Homolog of NCBI NO: 22655168 NR Description: protein kinase-like protein [Arabidopsis thaliana]
  misc_feature (1)..(183): Homolog of NCBI NO: 19699091 NR Description: AT4g23250/F21P8_140 [Arabidopsis thaliana]
  misc_feature (1)..(183): Homolog of NCBI NO: 22328880 NR Description: putative protein; protein id: At4g23260.1,
  misc_feature (1)..(184): Homolog of NCBI NO: 15233525 NR Description: putative receptor-like protein kinase; protein id:
  misc_feature (1)..(184): Homolog of NCBI NO: 18076585 NR Description: putative receptor-like serine-threonine protein

SEQ ID NO: 88824 - DNA, 5487 bp, Arabidopsis thaliana
  misc_feature (1)..(5487): Ceres Seq. ID no. 12712790
  misc_feature: MA Experiment ID: 20000184 Result: Down-regulated in Transcription
  misc_feature: MA Experiment 20000184 PARAMETER Experiment Name: At_Shoots__P Parameter: Age (day) Value: 7
  misc_feature: MA Experiment 20000184 PARAMETER Experiment Name: At_Shoots__P Parameter: Tissue Value: Shoots vs. Whole Plant
  misc_feature: MA Experiment ID: 20000185 Result: Up-regulated in Transcription
  misc_feature: MA Experiment 20000185 PARAMETER Experiment Name: At_Roots__P Parameter: Age (day) Value: 7 vs. 21
  misc_feature: MA Experiment 20000185 PARAMETER Experiment Name: At_Roots__P Parameter: Organism Value: A. thaliana
  misc_feature: MA Experiment 20000185 PARAMETER Experiment Name: At_Roots__P Parameter: Tissue Value: Roots vs. Whole Plant
  misc_feature: MA Experiment ID: 20000437 Result: Up-regulated in Transcription
  misc_feature: MA Experiment 20000437 PARAMETER Experiment Name: At_Drought_P Parameter: Age (day) Value: 8
  misc_feature: MA Experiment 20000437 PARAMETER Experiment Name: At_Drought_P Parameter: Organism Value: A. thaliana
  misc_feature: MA Experiment 20000437 PARAMETER Experiment Name: At_Drought_P Parameter: Plant Line Value: WS
  misc_feature: MA Experiment 20000437 PARAMETER Experiment Name: At_Drought_P Parameter: Timepoint (hr) Value: 24
  misc_feature: MA Experiment 20000437 PARAMETER Experiment Name: At_Drought_P Parameter: Tissue Value: Whole Plant
  misc_feature: MA Experiment 20000437 PARAMETER Experiment Name: At_Drought_P Parameter: Treatment Value: Drought vs. No Drought
  misc_feature: MA Experiment ID: 20000439 Result: Up-regulated in Transcription
  misc_feature: MA Experiment 20000439 PARAMETER Experiment Name: At_Roots__P Parameter: Age (day) Value: 14 vs. 21
  misc_feature: MA Experiment 20000439 PARAMETER Experiment Name: At_Roots__P Parameter: Organism Value: A. thaliana
  misc_feature: MA Experiment 20000439 PARAMETER Experiment Name: At_Roots__P Parameter: Tissue Value: Roots vs. Whole Plant
atggcagcaacaccaccaataagctcaggttccggtttatctcagcagcttaataattcttctagttccaagttatgtcaagtggaaggatgtcaaaaaggagcaagagatgcatctggtcgttgcatttcccatggcggtggacgtagatgccagaaacctgattgccagaagggagctgaaggtaaaacagtgtactgtaaagcccacggaggtggtcgcagatgtgaatatcttggatgcaccaaaggcgcagaaggcagtactgatttttgtatagctcatggaggtggtcgaagatgcaaccatgaagattgcacacgatctgcttggggaagaacagaattctgtgtcaagcacggtggaggagcgagatgcaaaacatacggctgcggaaaaagcgctagtggtcctttgccattctgccgagcccatggtggtggtaaaaaatgcagccatgaagattgcacaggatttgctaggggaagatcaggactctgtctcatgcacggtgggggaaagagatgccaaagagagaactgcactaaaagcgctgaaggtctttcgggactctgcatatcccatggtggtggtcggcgatgtcaatctattggatgcacaaaaggagcgaaagggagcaaaatgttctgcaaagcatgcataactaaaaggcctctaacgattgatggaggaggaaatatgggaggggtaacaacaggtgatgccttgaactatctcaaagctgtgaaggacaagtttgaagacagtgagaaatatgacactttccttgaagtcttgaatgactgtaaacatcagggagttgacactagtggcgtcatagccagattaaaagatttgttcaagggccatgacgacttacttttgggttttaatacctacttgtcaaaggagtaccaaataaccattctgcccgaggatgatttccctatcgattttcttgacaaggttgagggaccttatgaaatgacatatcagcaagctcaaacagttcaagccaatgccaatatgcaacctcaaactgagtacccttcttcctctgcggttcaatcattttcatcgggtcaacctcagatccccacctcagctccggattcttcactactagctaaaagtaatacctcaggtataactatcatcgagcacatgtcacaacagcctctaaatgttgacaaacaagttaatgatggctataactggcaaaagtatgggcaaaagaaagttaaaggcagcaagtttcctctaagctattacaagtgcacatatctaggatgtccttccaagaggaaggttgagagatctcttgatggacaagtagcagaaatcgtctacaaagatcgacacaatcacgaacctcctaaccaaggaaaagatggtagcaccacatatctaagtgggagttcgacacacatcaattgcatgagctctgaattgacagcatcacagtttagctccaacaagactaagatagagcaacaggaagcagcaagtctagctacgacaatagagtacatgtctgaggcaagtgacaatgaagaagacagtaatggagaaactagtgagggagagaaagatgaagacgagcctgaaccaaagagaagaattacagaagttcaggtttcggaactagctgatgcttcagatagaaccgtgagagagcctagggttattttccaaacaacgagtgaagttgataatttagatgatggatataggtggcggaaatatggacagaaagttgttaaagggaatccttatccaaggttttcctcctctaaagattatgatgtcgtaatcagatacggaagagcagatataagcaatgaggatttcattagccatcttcgtgcttccctctgccggagagggatttctgtctatgaaaaatttaatgaagtggatgcacttccaaaatgtagggttttgattatagtattaacaagcacatatgtcccttcgaacctcttaaacattcttgaacaccaacatacagaggatcgagtggtttatccaattttctacagactatcaccatatgattttgtctgtaacagcaagaattatgagagattttatctccaagatgagccaaaaaaatggcaagctgctttgaaggaaataactcagatgcctggctacacattgacagataagtctgaatctgaacttatagatgagattgtaagagatgctttaaaggtgctatgttctgctgataaggtgaacatgattgggatggatatgcaagtagaggagattttgtcactgctatgcattgagtcccttgatgttcgcagcattggtatatggggtacagttggtataggaaaaacaaccattgctgaagagatctttcgcaaaatctctgtccaatatgagacctgtgtcgtccttaaggacctccacaaagaagttgaggtaaaaggtcacgatgctgtgagagagaattttctgtctgaagttttagaggtagaacctcatgttatccggatatctgacattaaaacaagcttcttgagaagtcggcttcagcgtaaaaggatccttgttattcttgacgatgtgaatgattacagagatgttgacacctttttggggacgcttaactattttggtccaggaagcagaataatcatgacctctagaaatagacgtgttttcgtactatgtaaaatcgatcatgtctatgaggttaagccattagatattcctaagtctctactacttcttgatcgtgggacatgtcaaattgttttgtcacctgaggtttacaagacattgtcacttgagctggtcaaattttcaaatggaaatccccaggttcttcagttcttgagcagtattgacagagaatggaataagttatcacaagaagttaagacaacatctcccatttacatcccaggtatatttgaaaagagctgttgtgggcttgatgacaacgagaggggtatatttttggacattgcatgtttctttaataggattgataaagacaatgtcgcaatgttgctggatggttgtggtttctctgcacatgtcggatttagaggccttgttgacaaatcactgttgacaatatcacaacacaacttggtggacatgctcagttttatccaggcaactggtcgagaaattgttcgccaagaatcagctgacagaccaggagaccgcagcaggttgtggaatgccgactatatcagacacgtattcataaatgacactggcacatcagctattgagggcattttcctagacatgttgaatcttaaatttgatgcaaatcccaacgtgttcgagaaaatgtgtaaccttagactgttgaaattgtattgctccaaagcggaagagaagcatggagtatcttttccacaaggtcttgaatatttgccgagcaagctaaggcttctccattgggaatattatcctctaagttctttgccgaaaagttttaatccagagaaccttgtcgagcttaacttgccaagtagctgtgcaaagaaactttggaaaggaaaaaaggcaaggttttgtacaaccaattcaagtctggaaaagcttaaaaagatgagacttagctactccgaccagttaactaaaatcccaagactttcaagcgcaacaaatcttgagcatattgatcttgaaggttgcaacagtttgttgagccttagccagtccatttcttatcttaagaagcttgtttttctgaatttaaagggctgctcgaagctggagaatattccatctatggttgatttagaatcgcttgaggttctaaatctttcgggttgttcaaagctagggaacttcccggagatctcaccaaatgtgaaagaactgtacatgggtgggactatgatacaagaaatcccgtcatcgattaagaacttggtattgcttgagaaactggacctggaaaacagtagacatctcaagaatcttccaacaagcatctacaagttgaagcatcttgaaactctaaatctttcaggctgcataagcctggagcgatttccagactcgtcgagaaggatgaaatgcttaaggtttttggatttaagcaggacagacattaaagagctgccctcttccatatcgtatctgactgctcttgacgaactattattcgtagactccaggagaaactcgccagttgtaaccaatcccaatgccaattcaactgagttgatgccttctgagtcaagtaagcttgagatcttaggtactccggcagataacgaagtagttgttggtggtacggtagagaaaacccgtggtattgaacgaacgccgactattttggtgaagtcgagagagtatctaattcccgatgatgttgtggcggttggtggtgatattaaggggctaagaccaccagtacttcagctccaaccagcaatgaaactatctcatattcctcgaggatcaacttgggatttcgttacgcatttcgctccacctgaaacagttgcgccgccgagttcctcttcagaagccagggaagaggaagtggaaacggaagagacgggagctatgtttatcccattgggggataaggagacatgctcattcactgtaaacaagggtgactcctcaaggacaatatctaatacgtcgccgatttatgcctccgaaggatctttcatcacgtgttggcagaagggtcaacttctgggacgaggatcattagggtccgtatatgaaggcatttcagcagacggggacttctttgctttcaaggaagtttcactacttgatcagggaagtcaggcacatgaatggatacaacaagtcgagggggggattgcgctacttagtcagcttcagcatcagaatatcgtgcgatatcgtggcacaactaaggacgagtcgaatttgtacatttttcttgaacttgtaacccaagggtcccttcgaaaactctaccaaagaaaccagcttggggactctgtagtctccttatacacaagacagattcttgatggattgaaatatctccacgataaaggttttatacacaggaacattaaatgtgcaaatgtattggtggacgctaatggaacagttaaacttgcagattttggattggctaaggtaatgtccctctggcgaactccgtattggaattggatggctccagaggttattcttaacccgaaggattatgatggttatggaactccagctgatatatggagccttgggtgtactgtgctagaaatgttgactggtcagattccctactccgatctggaaatcggtacagccttgtataacattggaacgggtaagcttccgaaaatacctgatattctatcgctagacgcccgggatttcatacttacgtgtctcaaagtgaacccggaagagcggccaactgcagctgagctgcttaaccatccatttgtgaatatgccattaccatcctcgggctcaggttcagtatcttcgctcctccgtggatga

SEQ ID NO: 88825 - protein, 1828 aa, Arabidopsis thaliana
  peptide (1)..(1828): Ceres Seq. ID no. 12712791
  misc_feature (1559)..(1810): Pfam Name: Protein kinase domain Pfam Description: Protein kinase domain
  misc_feature (1406)..(1827): Homolog of NCBI NO: 1255448 NR Description: mitogen-activated protein kinase [Arabidopsis
  misc_feature (1406)..(1827): Homolog of NCBI NO: 15236515 NR Description: MEKK1/MAP kinase kinase kinase; protein id: supported by cDNA: gi_1255447, supported by cDNA: gi_17064765
  misc_feature (1406)..(1827): Homolog of NCBI NO: 17064766 NR Description: Unknown protein [Arabidopsis thaliana]
  misc_feature (1460)..(1827): Homolog of NCBI NO: 15236511 NR Description: putative mitogen-activated protein kinase;
  misc_feature (1406)..(1475): Homolog of NCBI NO: 15236511 NR Description: putative mitogen-activated protein kinase;
  misc_feature (1413)..(1475): Homolog of NCBI NO: 15236511 NR Description: putative mitogen-activated protein kinase;
  misc_feature (1397)..(1820): Homolog of NCBI NO: 3688209 NR Description: MAP3K beta 1 protein kinase [Brassica napus]
  misc_feature (1556)..(1810): Homolog of NCBI NO: 15236509 NR Description: putative mitogen-activated protein kinase;
  misc_feature (1556)..(1810): Homolog of NCBI NO: 28393793 NR Description: putative mitogen-activated protein kinase
  misc_feature (1440)..(1578): Homolog of NCBI NO: 15236509 NR Description: putative mitogen-activated protein kinase;
MAATPPISSGSGLSQQLNNSSSSKLCQVEGCQKGARDASGRCISHGGGRRCQKPDCQKGAEGKTVYCKAHGGGRRCEYLGCTKGAEGSTDFCIAHGGGRRCNHEDCTRSAWGRTEFCVKHGGGARCKTYGCGKSASGPLPFCRAHGGGKKCSHEDCTGFARGRSGLCLMHGGGKRCQRENCTKSAEGLSGLCISHGGGRRCQSIGCTKGAKGSKMFCKACITKRPLTIDGGGNMGGVTTGDALNYLKAVKDKFEDSEKYDTFLEVLNDCKHQGVDTSGVIARLKDLFKGHDDLLLGFNTYLSKEYQITILPEDDFPIDFLDKVEGPYEMTYQQAQTVQANANMQPQTEYPSSSAVQSFSSGQPQIPTSAPDSSLLAKSNTSGITIIEHMSQQPLNVDKQVNDGYNWQKYGQKKVKGSKFPLSYYKCTYLGCPSKRKVERSLDGQVAEIVYKDRHNHEPPNQGKDGSTTYLSGSSTHINCMSSELTASQFSSNKTKIEQQEAASLATTIEYMSEASDNEEDSNGETSEGEKDEDEPEPKRRITEVQVSELADASDRTVREPRVIFQTTSEVDNLDDGYRWRKYGQKVVKGNPYPRFSSSKDYDVVIRYGRADISNEDFISHLRASLCRRGISVYEKFNEVDALPKCRVLIIVLTSTYVPSNLLNILEHQHTEDRVVYPIFYRLSPYDFVCNSKNYERFYLQDEPKKWQAALKEITQMPGYTLTDKSESELIDEIVRDALKVLCSADKVNMIGMDMQVEEILSLLCIESLDVRSIGIWGTVGIGKTTIAEEIFRKISVQYETCVVLKDLHKEVEVKGHDAVRENFLSEVLEVEPHVIRISDIKTSFLRSRLQRKRILVILDDVNDYRDVDTFLGTLNYFGPGSRIIMTSRNRRVFVLCKIDHVYEVKPLDIPKSLLLLDRGTCQIVLSPEVYKTLSLELVKFSNGNPQVLQFLSSIDREWNKLSQEVKTTSPIYIPGIFEKSCCGLDDNERGIFLDIACFFNRIDKDNVAMLLDGCGFSAHVGFRGLVDKSLLTISQHNLVDMLSFIQATGREIVRQESADRPGDRSRLWNADYIRHVFINDTGTSAIEGIFLDMLNLKFDANPNVFEKMCNLRLLKLYCSKAEEKHGVSFPQGLEYLPSKLRLLHWEYYPLSSLPKSFNPENLVELNLPSSCAKKLWKGKKARFCTTNSSLEKLKKMRLSYSDQLTKIPRLSSATNLEHIDLEGCNSLLSLSQSISYLKKLVFLNLKGCSKLENIPSMVDLESLEVLNLSGCSKLGNFPEISPNVKELYMGGTMIQEIPSSIKNLVLLEKLDLENSRHLKNLPTSIYKLKHLETLNLSGCISLERFPDSSRRMKCLRFLDLSRTDIKELPSSISYLTALDELLFVDSRRNSPVVTNPNANSTELMPSESSKLEILGTPADNEVVVGGTVEKTRGIERTPTILVKSREYLIPDDVVAVGGDIKGLRPPVLQLQPAMKLSHIPRGSTWDFVTHFAPPETVAPPSSSSEAREEEVETEETGAMFIPLGDKETCSFTVNKGDSSRTISNTSPIYASEGSFITCWQKGQLLGRGSLGSVYEGISADGDFFAFKEVSLLDQGSQAHEWIQQVEGGIALLSQLQHQNIVRYRGTTKDESNLYIFLELVTQGSLRKLYQRNQLGDSVVSLYTRQILDGLKYLHDKGFIHRNIKCANVLVDANGTVKLADFGLAKVMSLWRTPYWNWMAPEVILNPKDYDGYGTPADIWSLGCTVLEMLTGQIPYSDLEIGTALYNIGTGKLPKIPDILSLDARDFILTCLKVNPEERPTAAELLNHPFVNMPLPSSGSGSVSSLLRG

SEQ ID NO: 88826 - protein, 1660 aa, Arabidopsis thaliana
  peptide (1)..(1660): Ceres Seq. ID no. 12712792
  misc_feature (1391)..(1642): Pfam Name: Protein kinase domain Pfam Description: Protein kinase domain
  misc_feature (1238)..(1659): Homolog of NCBI NO: 1255448 NR Description: mitogen-activated protein kinase [Arabidopsis
  misc_feature (1238)..(1659): Homolog of NCBI NO: 15236515 NR Description: MEKK1/MAP kinase kinase kinase; protein id: supported by cDNA: gi_1255447, supported by cDNA: gi_17064765
  misc_feature (1238)..(1659): Homolog of NCBI NO: 17064766 NR Description: Unknown protein [Arabidopsis thaliana]
  misc_feature (1292)..(1659): Homolog of NCBI NO: 15236511 NR Description: putative mitogen-activated protein kinase;
  misc_feature (1238)..(1307): Homolog of NCBI NO: 15236511 NR Description: putative mitogen-activated protein kinase;
  misc_feature (1245)..(1307): Homolog of NCBI NO: 15236511 NR Description: putative mitogen-activated protein kinase;
  misc_feature (1229)..(1652): Homolog of NCBI NO: 3688209 NR Description: MAP3K beta 1 protein kinase [Brassica napus]
  misc_feature (1388)..(1642): Homolog of NCBI NO: 15236509 NR Description: putative mitogen-activated protein kinase;
  misc_feature (1388)..(1642): Homolog of NCBI NO: 28393793 NR Description: putative mitogen-activated protein kinase
  misc_feature (1272)..(1410): Homolog of NCBI NO: 15236509 NR Description: putative mitogen-activated protein kinase;
MHGGGKRCQRENCTKSAEGLSGLCISHGGGRRCQSIGCTKGAKGSKMFCKACITKRPLTIDGGGNMGGVTTGDALNYLKAVKDKFEDSEKYDTFLEVLNDCKHQGVDTSGVIARLKDLFKGHDDLLLGFNTYLSKEYQITILPEDDFPIDFLDKVEGPYEMTYQQAQTVQANANMQPQTEYPSSSAVQSFSSGQPQIPTSAPDSSLLAKSNTSGITIIEHMSQQPLNVDKQVNDGYNWQKYGQKKVKGSKFPLSYYKCTYLGCPSKRKVERSLDGQVAEIVYKDRHNHEPPNQGKDGSTTYLSGSSTHINCMSSELTASQFSSNKTKIEQQEAASLATTIEYMSEASDNEEDSNGETSEGEKDEDEPEPKRRITEVQVSELADASDRTVREPRVIFQTTSEVDNLDDGYRWRKYGQKVVKGNPYPRFSSSKDYDVVIRYGRADISNEDFISHLRASLCRRGISVYEKFNEVDALPKCRVLIIVLTSTYVPSNLLNILEHQHTEDRVVYPIFYRLSPYDFVCNSKNYERFYLQDEPKKWQAALKEITQMPGYTLTDKSESELIDEIVRDALKVLCSADKVNMIGMDMQVEEILSLLCIESLDVRSIGIWGTVGIGKTTIAEEIFRKISVQYETCVVLKDLHKEVEVKGHDAVRENFLSEVLEVEPHVIRISDIKTSFLRSRLQRKRILVILDDVNDYRDVDTFLGTLNYFGPGSRIIMTSRNRRVFVLCKIDHVYEVKPLDIPKSLLLLDRGTCQIVLSPEVYKTLSLELVKFSNGNPQVLQFLSSIDREWNKLSQEVKTTSPIYIPGIFEKSCCGLDDNERGIFLDIACFFNRIDKDNVAMLLDGCGFSAHVGFRGLVDKSLLTISQHNLVDMLSFIQATGREIVRQESADRPGDRSRLWNADYIRHVFINDTGTSAIEGIFLDMLNLKFDANPNVFEKMCNLRLLKLYCSKAEEKHGVSFPQGLEYLPSKLRLLHWEYYPLSSLPKSFNPENLVELNLPSSCAKKLWKGKKARFCTTNSSLEKLKKMRLSYSDQLTKIPRLSSATNLEHIDLEGCNSLLSLSQSISYLKKLVFLNLKGCSKLENIPSMVDLESLEVLNLSGCSKLGNFPEISPNVKELYMGGTMIQEIPSSIKNLVLLEKLDLENSRHLKNLPTSIYKLKHLETLNLSGCISLERFPDSSRRMKCLRFLDLSRTDIKELPSSISYLTALDELLFVDSRRNSPVVTNPNANSTELMPSESSKLEILGTPADNEVVVGGTVEKTRGIERTPTILVKSREYLIPDDVVAVGGDIKGLRPPVLQLQPAMKLSHIPRGSTWDFVTHFAPPETVAPPSSSSEAREEEVETEETGAMFIPLGDKETCSFTVNKGDSSRTISNTSPIYASEGSFITCWQKGQLLGRGSLGSVYEGISADGDFFAFKEVSLLDQGSQAHEWIQQVEGGIALLSQLQHQNIVRYRGTTKDESNLYIFLELVTQGSLRKLYQRNQLGDSVVSLYTRQILDGLKYLHDKGFIHRNIKCANVLVDANGTVKLADFGLAKVMSLWRTPYWNWMAPEVILNPKDYDGYGTPADIWSLGCTVLEMLTGQIPYSDLEIGTALYNIGTGKLPKIPDILSLDARDFILTCLKVNPEERPTAAELLNHPFVNMPLPSSGSGSVSSLLRG

SEQ ID NO: 88827 - protein, 1614 aa, Arabidopsis thaliana
  peptide (1)..(1614): Ceres Seq. ID no. 12712793
  misc_feature (1345)..(1596): Pfam Name: Protein kinase domain Pfam Description: Protein kinase domain
  misc_feature (1192)..(1613): Homolog of NCBI NO: 1255448 NR Description: mitogen-activated protein kinase [Arabidopsis
  misc_feature (1192)..(1613): Homolog of NCBI NO: 15236515 NR Description: MEKK1/MAP kinase kinase kinase; protein id: supported by cDNA: gi_1255447, supported by cDNA: gi_17064765
  misc_feature (1192)..(1613): Homolog of NCBI NO: 17064766 NR Description: Unknown protein [Arabidopsis thaliana]
  misc_feature (1246)..(1613): Homolog of NCBI NO: 15236511 NR Description: putative mitogen-activated protein kinase;
  misc_feature (1192)..(1261): Homolog of NCBI NO: 15236511 NR Description: putative mitogen-activated protein kinase;
  misc_feature (1199)..(1261): Homolog of NCBI NO: 15236511 NR Description: putative mitogen-activated protein kinase;
  misc_feature (1183)..(1606): Homolog of NCBI NO: 3688209 NR Description: MAP3K beta 1 protein kinase [Brassica napus]
  misc_feature (1342)..(1596): Homolog of NCBI NO: 15236509 NR Description: putative mitogen-activated protein kinase;
  misc_feature (1342)..(1596): Homolog of NCBI NO: 28393793 NR Description: putative mitogen-activated protein kinase
  misc_feature (1226)..(1364): Homolog of NCBI NO: 15236509 NR Description: putative mitogen-activated protein kinase;
MFCKACITKRPLTIDGGGNMGGVTTGDALNYLKAVKDKFEDSEKYDTFLEVLNDCKHQGVDTSGVIARLKDLFKGHDDLLLGFNTYLSKEYQITILPEDDFPIDFLDKVEGPYEMTYQQAQTVQANANMQPQTEYPSSSAVQSFSSGQPQIPTSAPDSSLLAKSNTSGITIIEHMSQQPLNVDKQVNDGYNWQKYGQKKVKGSKFPLSYYKCTYLGCPSKRKVERSLDGQVAEIVYKDRHNHEPPNQGKDGSTTYLSGSSTHINCMSSELTASQFSSNKTKIEQQEAASLATTIEYMSEASDNEEDSNGETSEGEKDEDEPEPKRRITEVQVSELADASDRTVREPRVIFQTTSEVDNLDDGYRWRKYGQKVVKGNPYPRFSSSKDYDVVIRYGRADISNEDFISHLRASLCRRGISVYEKFNEVDALPKCRVLIIVLTSTYVPSNLLNILEHQHTEDRVVYPIFYRLSPYDFVCNSKNYERFYLQDEPKKWQAALKEITQMPGYTLTDKSESELIDEIVRDALKVLCSADKVNMIGMDMQVEEILSLLCIESLDVRSIGIWGTVGIGKTTIAEEIFRKISVQYETCVVLKDLHKEVEVKGHDAVRENFLSEVLEVEPHVIRISDIKTSFLRSRLQRKRILVILDDVNDYRDVDTFLGTLNYFGPGSRIIMTSRNRRVFVLCKIDHVYEVKPLDIPKSLLLLDRGTCQIVLSPEVYKTLSLELVKFSNGNPQVLQFLSSIDREWNKLSQEVKTTSPIYIPGIFEKSCCGLDDNERGIFLDIACFFNRIDKDNVAMLLDGCGFSAHVGFRGLVDKSLLTISQHNLVDMLSFIQATGREIVRQESADRPGDRSRLWNADYIRHVFINDTGTSAIEGIFLDMLNLKFDANPNVFEKMCNLRLLKLYCSKAEEKHGVSFPQGLEYLPSKLRLLHWEYYPLSSLPKSFNPENLVELNLPSSCAKKLWKGKKARFCTTNSSLEKLKKMRLSYSDQLTKIPRLSSATNLEHIDLEGCNSLLSLSQSISYLKKLVFLNLKGCSKLENIPSMVDLESLEVLNLSGCSKLGNFPEISPNVKELYMGGTMIQEIPSSIKNLVLLEKLDLENSRHLKNLPTSIYKLKHLETLNLSGCISLERFPDSSRRMKCLRFLDLSRTDIKELPSSISYLTALDELLFVDSRRNSPVVTNPNANSTELMPSESSKLEILGTPADNEVVVGGTVEKTRGIERTPTILVKSREYLIPDDVVAVGGDIKGLRPPVLQLQPAMKLSHIPRGSTWDFVTHFAPPETVAPPSSSSEAREEEVETEETGAMFIPLGDKETCSFTVNKGDSSRTISNTSPIYASEGSFITCWQKGQLLGRGSLGSVYEGISADGDFFAFKEVSLLDQGSQAHEWIQQVEGGIALLSQLQHQNIVRYRGTTKDESNLYIFLELVTQGSLRKLYQRNQLGDSVVSLYTRQILDGLKYLHDKGFIHRNIKCANVLVDANGTVKLADFGLAKVMSLWRTPYWNWMAPEVILNPKDYDGYGTPADIWSLGCTVLEMLTGQIPYSDLEIGTALYNIGTGKLPKIPDILSLDARDFILTCLKVNPEERPTAAELLNHPFVNMPLPSSGSGSVSSLLRG

SEQ ID NO: 88828 - DNA, 390 bp, Arabidopsis thaliana
  misc_feature (1)..(390): Ceres Seq. ID no. 12712862
  misc_feature: MA Experiment ID: 20000314 Result: Up-regulated in Transcription
  misc_feature: MA Experiment 20000314 PARAMETER Experiment Name: At_14day_Shoots-Roots_Sub_P Parameter: Age (day) Value: 14
  misc_feature: MA Experiment 20000314 PARAMETER Experiment Name: At_14day_Shoots-Roots_Sub_P Parameter: Organism Value: A. thaliana
  misc_feature: MA Experiment 20000314 PARAMETER Experiment Name: At_14day_Shoots-Roots_Sub_P Parameter: Plant Line Value: WS
  misc_feature: MA Experiment 20000314 PARAMETER Experiment Name: At_14day_Shoots-Roots_Sub_P Parameter: Tissue Value: Roots vs. Whole Plant
atggcttcaaaaatttcagcctctcttgtcattttcctcacattcaacattctttttttcactttaaccaccgcatgtggcggtggctgcagttccacccctaaacccaaacctaagcccaagtccaccggaagctgccctaaagacactctcaagctcggcgtttgcgccaatgttctcaaggatcttctcaaaattcagttgggaacaccaccagtgaagccttgttgttcgctcctcaatggtttagttgatcttgaggctgccgcttgtctctgcaccgccctaaaggctaaagttttaggcattaatcttaatgttcccgtctctctcagccttcttctcaatgtttgtggcaagaaggttccttccggcttcgtatgtgcttga

SEQ ID NO: 88829 - protein, 129 aa, Arabidopsis thaliana; identical to SEQ ID NO: 83969
  peptide (1)..(129): Ceres Seq. ID no. 12712863
  misc_feature (46)..(128): Pfam Name: Protease inhibitor/seed storage/LTP family Pfam Description: Protease inhibitor/seed storage/LTP family
  misc_feature (1)..(129): Homolog of NCBI NO: 18413820 NR Description: pEARLI 1-like protein; protein id: At4g12510.1
  misc_feature (1)..(129): Homolog of NCBI NO: 7484770 NR Description: extensin like protein - black poplar extensin like protein [Populus nigra] >gi|1199774|dbj|BAA11855.1|
  misc_feature (1)..(128): Homolog of NCBI NO: 10798758 NR Description: P-rich protein Nt-SubC29 [Nicotiana tabacum]
  misc_feature (1)..(123): Homolog of NCBI NO: 21360370 NR Description: extensin-like protein [Citrus junos]
  misc_feature (6)..(128): Homolog of NCBI NO: 15221201 NR Description: pEARLI 1-like protein; protein id: At1g12090.1, by cDNA: 5712., supported by cDNA: gi_16648817, supported by
  misc_feature (1)..(129): Homolog of NCBI NO: 4454097 NR Description: hybrid proline-rich protein [Catharanthus roseus]
  misc_feature (1)..(129): Homolog of NCBI NO: 481236 NR Description: hypothetical protein - Madagascar periwinkle

SEQ ID NO: 88830 - DNA, 1728 bp, Arabidopsis thaliana
  misc_feature (1)..(1728): Ceres Seq. ID no. 12712883
  misc_feature: MA Experiment ID: 20000265 Result: Up-regulated in Transcription
  misc_feature: MA Experiment 20000265 PARAMETER Experiment Name: At_Open_Flower_P Parameter: Age (day) Value: 21
  misc_feature: MA Experiment 20000265 PARAMETER Experiment Name: At_Open_Flower_P Parameter: Plant Line Value: WS
  misc_feature: MA Experiment 20000265 PARAMETER Experiment Name: At_Open_Flower_P Parameter: Tissue Value: Closed Flower vs. Whole Plant
  misc_feature: MA Experiment ID: 20000437 Result: Up-regulated in Transcription
  misc_feature: MA Experiment 20000437 PARAMETER Experiment Name: At_Drought_P Parameter: Age (day) Value: 8
  misc_feature: MA Experiment 20000437 PARAMETER Experiment Name: At_Drought_P Parameter: Organism Value: A. thaliana
  misc_feature: MA Experiment 20000437 PARAMETER Experiment Name: At_Drought_P Parameter: Plant Line Value: WS
  misc_feature: MA Experiment 20000437 PARAMETER Experiment Name: At_Drought_P Parameter: Timepoint (hr) Value: 24
  misc_feature: MA Experiment 20000437 PARAMETER Experiment Name: At_Drought_P Parameter: Tissue Value: Whole Plant
  misc_feature: MA Experiment 20000437 PARAMETER Experiment Name: At_Drought_P Parameter: Treatment Value: Drought vs. No Drought
  misc_feature: MA Experiment ID: 20000794 Result: Up-regulated in Transcription
  misc_feature: MA Experiment 20000794 PARAMETER Experiment Name: At_Petals_P Parameter: Age (day) Value: 23-25 days
  misc_feature: MA Experiment 20000794 PARAMETER Experiment Name: At_Petals_P Parameter: Plant Line Value: WS
  misc_feature: MA Experiment 20000794 PARAMETER Experiment Name: At_Petals_P Parameter: Tissue Value: Petals vs. Whole plant
  misc_feature: MA Experiment ID: 20001911 Result: Up-regulated in Transcription
  misc_feature: MA Experiment 20001911 PARAMETER Experiment Name: At_Drought_Reproduction_P Parameter: Age (day) Value: 40
  misc_feature: MA Experiment 20001911 PARAMETER Experiment Name: At_Drought_Reproduction_P Parameter: Organism Value: A. thaliana
  misc_feature: MA Experiment 20001911 PARAMETER Experiment Name: At_Drought_Reproduction_P Parameter: Plant Line Value: WS
  misc_feature: MA Experiment 20001911 PARAMETER Experiment Name: At_Drought_Reproduction_P Parameter: Timepoint (day) Value: 10
  misc_feature: MA Experiment 20001911 PARAMETER Experiment Name: At_Drought_Reproduction_P Parameter: Tissue Value: Flowers
  misc_feature: MA Experiment 20001911 PARAMETER Experiment Name: At_Drought_Reproduction_P Parameter: Treatment Value: Drought vs. No Drought
atggaagttcccaaaggattctttgagaaactgtggagttttgtctcttttcttccttacttcttcctcttgctgctccttggcgtcaccaaggccctgattattggtccaatatcatctgctataattttggttggcaattcatgtgtcatcattggcctttggccagcacatttcatttggacctactactgtttggcaagaaccaagagaatagggctggttttgaagaccttggcattggtattatttccactgcctttgctcctctggccagttgctggtatagtaggaagtctcttcggtggaatcgcctacgggtttttcacgcctcttatggctacattcgaggctgtaggagagtctgttactagcaaatgctaccattgctttgttgatggttcgttctccactattaaagggagttgtactgtggttacagacttcacagatttctgcttccattcttacttctcctacatggatgagttaagagaaatggtttcggccgatgttgaacccttagagataaagttgtctcggctacctagttgtctccttgctagtctcataggtgtgatggtagatgttcttctaataacagctgtcgctgtttacaaaagcccatacatgttactcaaaggatggaagaggctattggaagaccttgttggtagagagggcccattcctagagagtgtctgtgttccatttgcaggtcttgccatattgctatggccactggctgtcgcgggagctgtaatagcttcagttttatccagcttctttcttggactgtacagtggagtcatcgttcatcaggaggactctttcagaatgggacttaactatataattgctgcggtctcactgtttgacgaatatgtaaatgatttactctatttgagagaaggaactagcctgccgaggccttgctataggacgaaaacagagactgttcatgggaaaagaatattaggagagagtaagaacgttgatctcaagagcaaaagaagcagctccctgggttcaaagcttgtttcagaacagtcgaggacactgaaaaaagcaattacactatataaaccagttcaggtatgggaatggttgtttaagtcgtgtgaggtgaatgggaggatacttcttcgcgatggcttgatagatgtgaaggatgtagaggagtgtcttgtcaagggtaattctaagaagctctatatcaaactacccgcgtggacggtgttacagtgtctccttgcatcggctaaatcgaactcatctgggttggtgatcactgatggcgtggagcttacagaactaaacagcccaagagataaagtatttgtgtggctagttggacccttactgataatgaaggagcagataaaaaacctgaagcttactgaggatgaagagttttgtctgaggaaattggtaatggtatgcaaaaatgaaagaaccgaggactgggacaacaccgggttcccgtcaagtgatacagtaagaaaagcacaattgcaagccataatcagaaggctgcaaggaatggtagcatcaatgtctagaataccaacgtttcgacgcagattcatgaacttggttaaagtgttgtacatagaagctcttgaaatgggtgcatcaggtaatcgagctggtgggatactcaaacccaacagcgaccaaacaggaaatctggatcggactgaaacaccggacatggatgttgtctaa

SEQ ID NO: 88831 - protein, 575 aa, Arabidopsis thaliana
  peptide (1)..(575): Ceres Seq. ID no. 12712884
  misc_feature (1)..(575): Homolog of NCBI NO: 15235450 NR Description: putative protein; protein id: At4g12680.1
  misc_feature (1)..(550): Homolog of NCBI NO: 38345330 NR Description: OSJNBa0081L15.3 [Oryza sativa (japonica
  misc_feature (1)..(536): Homolog of NCBI NO: 9758091 NR Description: dbj|BAA95714.1~gene_id:MNF13.19~strong similarity
  misc_feature (1)..(536): Homolog of NCBI NO: 30693640 NR Description: expressed protein [Arabidopsis thaliana] unknown protein [Arabidopsis thaliana]
  misc_feature (1)..(536): Homolog of NCBI NO: 27311557 NR Description: Unknown protein [Arabidopsis thaliana]
  misc_feature (1)..(536): Homolog of NCBI NO: 30688768 NR Description: expressed protein [Arabidopsis thaliana]
  misc_feature (15)..(546): Homolog of NCBI NO: 38344840 NR Description: OSJNBa0064H22.21 [Oryza sativa (japonica
  misc_feature (15)..(511): Homolog of NCBI NO: 15234594 NR Description: hypothetical protein; protein id: At4g37030.1
  misc_feature (99)..(404): Homolog of NCBI NO: 7939511 NR Description: emb|CAB40985.1~gene_id:K1G2.10~similar to unknown
  misc_feature (364)..(536): Homolog of NCBI NO: 7939511 NR Description: emb|CAB40985.1~gene_id:K1G2.10~similar to unknown
MEVPKGFFEKLWSFVSFLPYFFLLLLLGVTKALIIGPISSAIILVGNSCVIIGLWPAHFIWTYYCLARTKRIGLVLKTLALVLFPLPLLLWPVAGIVGSLFGGIAYGFFTPLMATFEAVGESVTSKCYHCFVDGSFSTIKGSCTVVTDFTDFCFHSYFSYMDELREMVSADVEPLEIKLSRLPSCLLASLIGVMVDVLLITAVAVYKSPYMLLKGWKRLLEDLVGREGPFLESVCVPFAGLAILLWPLAVAGAVIASVLSSFFLGLYSGVIVHQEDSFRMGLNYIIAAVSLFDEYVNDLLYLREGTSLPRPCYRTKTETVHGKRILGESKNVDLKSKRSSSLGSKLVSEQSRTLKKAITLYKPVQVWEWLFKSCEVNGRILLRDGLIDVKDVEECLVKGNSKKLYIKLPAWTVLQCLLASAKSNSSGLVITDGVELTELNSPRDKVFVWLVGPLLIMKEQIKNLKLTEDEEFCLRKLVMVCKNERTEDWDNTGFPSSDTVRKAQLQAIIRRLQGMVASMSRIPTFRRRFMNLVKVLYIEALEMGASGNRAGGILKPNSDQTGNLDRTETPDMDVV

SEQ ID NO: 88832 - protein, 463 aa, Arabidopsis thaliana
  peptide (1)..(463): Ceres Seq. ID no. 12712885
  misc_feature (1)..(463): Homolog of NCBI NO: 15235450 NR Description: putative protein; protein id: At4g12680.1
  misc_feature (1)..(438): Homolog of NCBI NO: 38345330 NR Description: OSJNBa0081L15.3 [Oryza sativa (japonica
  misc_feature (1)..(424): Homolog of NCBI NO: 9758091 NR Description: dbj|BAA95714.1~gene_id:MNF13.19~strong similarity
  misc_feature (1)..(424): Homolog of NCBI NO: 30693640 NR Description: expressed protein [Arabidopsis thaliana] unknown protein [Arabidopsis thaliana]
  misc_feature (1)..(424): Homolog of NCBI NO: 27311557 NR Description: Unknown protein [Arabidopsis thaliana]
  misc_feature (1)..(424): Homolog of NCBI NO: 30688768 NR Description: expressed protein [Arabidopsis thaliana]
  misc_feature (1)..(434): Homolog of NCBI NO: 38344840 NR Description: OSJNBa0064H22.21 [Oryza sativa (japonica
  misc_feature (1)..(399): Homolog of NCBI NO: 15234594 NR Description: hypothetical protein; protein id: At4g37030.1
  misc_feature (1)..(292): Homolog of NCBI NO: 7939511 NR Description: emb|CAB40985.1~gene_id:K1G2.10~similar to unknown
  misc_feature (252)..(424): Homolog of NCBI NO: 7939511 NR Description: emb|CAB40985.1~gene_id:K1G2.10~similar to unknown
MATFEAVGESVTSKCYHCFVDGSFSTIKGSCTVVTDFTDFCFHSYFSYMDELREMVSADVEPLEIKLSRLPSCLLASLIGVMVDVLLITAVAVYKSPYMLLKGWKRLLEDLVGREGPFLESVCVPFAGLAILLWPLAVAGAVIASVLSSFFLGLYSGVIVHQEDSFRMGLNYIIAAVSLFDEYVNDLLYLREGTSLPRPCYRTKTETVHGKRILGESKNVDLKSKRSSSLGSKLVSEQSRTLKKAITLYKPVQVWEWLFKSCEVNGRILLRDGLIDVKDVEECLVKGNSKKLYIKLPAWTVLQCLLASAKSNSSGLVITDGVELTELNSPRDKVFVWLVGPLLIMKEQIKNLKLTEDEEFCLRKLVMVCKNERTEDWDNTGFPSSDTVRKAQLQAIIRRLQGMVASMSRIPTFRRRFMNLVKVLYIEALEMGASGNRAGGILKPNSDQTGNLDRTETPDMDVV

SEQ ID NO: 88833 - protein, 415 aa, Arabidopsis thaliana; identical to SEQ ID NO: 84462
  peptide (1)..(415): Ceres Seq. ID no. 12712886
  misc_feature (1)..(415): Homolog of NCBI NO: 15235450 NR Description: putative protein; protein id: At4g12680.1
  misc_feature (1)..(390): Homolog of NCBI NO: 38345330 NR Description: OSJNBa0081L15.3 [Oryza sativa (japonica
  misc_feature (1)..(376): Homolog of NCBI NO: 9758091 NR Description: dbj|BAA95714.1~gene_id:MNF13.19~strong similarity
  misc_feature (1)..(376): Homolog of NCBI NO: 30693640 NR Description: expressed protein [Arabidopsis thaliana] unknown protein [Arabidopsis thaliana]
  misc_feature (1)..(376): Homolog of NCBI NO: 27311557 NR Description: Unknown protein [Arabidopsis thaliana]
  misc_feature (1)..(376): Homolog of NCBI NO: 30688768 NR Description: expressed protein [Arabidopsis thaliana]
  misc_feature (1)..(386): Homolog of NCBI NO: 38344840 NR Description: OSJNBa0064H22.21 [Oryza sativa (japonica
  misc_feature (1)..(351): Homolog of NCBI NO: 15234594 NR Description: hypothetical protein; protein id: At4g37030.1
  misc_feature (1)..(244): Homolog of NCBI NO: 7939511 NR Description: emb|CAB40985.1~gene_id:K1G2.10~similar to unknown
  misc_feature (204)..(376): Homolog of NCBI NO: 7939511 NR Description: emb|CAB40985.1~gene_id:K1G2.10~similar to unknown

SEQ ID NO: 88834 - DNA, 1133 bp, Arabidopsis thaliana
  misc_feature (1)..(1133): Ceres Seq. ID no. 12712887
  misc_feature: MA Experiment ID: 20000182 Result: Down-regulated in Transcription
  misc_feature: MA Experiment 20000182 PARAMETER Experiment Name: At_2mM_SA_P Parameter: Age (day) Value: 14
  misc_feature: MA Experiment 20000182 PARAMETER Experiment Name: At_2mM_SA_P Parameter: Organism Value: A. thaliana
  misc_feature: MA Experiment 20000182 PARAMETER Experiment Name: At_2mM_SA_P Parameter: Plant Line Value: WS
  misc_feature: MA Experiment 20000182 PARAMETER Experiment Name: At_2mM_SA_P Parameter: Timepoint (hr) Value: 6
  misc_feature: MA Experiment 20000182 PARAMETER Experiment Name: At_2mM_SA_P Parameter: Tissue Value: Aerial
  misc_feature: MA Experiment 20000182 PARAMETER Experiment Name: At_2mM_SA_P Parameter: Treatment Value: 2mM SA vs. No Treatment
  misc_feature: MA Experiment ID: 20000184 Result: Up-regulated in Transcription
  misc_feature: MA Experiment 20000184 PARAMETER Experiment Name: At_Shoots__P Parameter: Age (day) Value: 7
  misc_feature: MA Experiment 20000184 PARAMETER Experiment Name: At_Shoots__P Parameter: Tissue Value: Shoots vs. Whole Plant
  misc_feature: MA Experiment ID: 20000234 Result: Down-regulated in Transcription
  misc_feature: MA Experiment 20000234 PARAMETER Experiment Name: At_Siliques_P Parameter: Age (day) Value: 21
  misc_feature: MA Experiment 20000234 PARAMETER Experiment Name: At_Siliques_P Parameter: Organism Value: A. thaliana
  misc_feature: MA Experiment 20000234 PARAMETER Experiment Name: At_Siliques_P Parameter: Plant Line Value: WS
  misc_feature: MA Experiment 20000234 PARAMETER Experiment Name: At_Siliques_P Parameter: Tissue Value: Less Than 5mm Siliques vs. Whole Plant
  misc_feature: MA Experiment ID: 20000235 Result: Down-regulated in Transcription
  misc_feature: MA Experiment 20000235 PARAMETER Experiment Name: At_Siliques_P Parameter: Age (day) Value: 21
  misc_feature: MA Experiment 20000235 PARAMETER Experiment Name: At_Siliques_P Parameter: Organism Value: A. thaliana
  misc_feature: MA Experiment 20000235 PARAMETER Experiment Name: At_Siliques_P Parameter: Plant Line Value: WS
  misc_feature: MA Experiment 20000235 PARAMETER Experiment Name: At_Siliques_P Parameter: Tissue Value: 5-10mm Siliques vs. Whole Plant
  misc_feature: MA Experiment ID: 20000264 Result: Down-regulated in Transcription
  misc_feature: MA Experiment 20000264 PARAMETER Experiment Name: At_Open_Flower_P Parameter: Age (day) Value: 21
  misc_feature: MA Experiment 20000264 PARAMETER Experiment Name: At_Open_Flower_P Parameter: Plant Line Value: WS
  misc_feature: MA Experiment 20000264 PARAMETER Experiment Name: At_Open_Flower_P Parameter: Tissue Value: Open Flower vs. Whole Plant
  misc_feature: MA Experiment ID: 20000265 Result: Down-regulated in Transcription
  misc_feature: MA Experiment 20000265 PARAMETER Experiment Name: At_Open_Flower_P Parameter: Age (day) Value: 21
  misc_feature: MA Experiment 20000265 PARAMETER Experiment Name: At_Open_Flower_P Parameter: Plant Line Value: WS
  misc_feature: MA Experiment 20000265 PARAMETER Experiment Name: At_Open_Flower_P Parameter: Tissue Value: Closed Flower vs. Whole Plant
  misc_feature: MA Experiment ID: 20000308 Result: Down-regulated in Transcription
  misc_feature: MA Experiment 20000308 PARAMETER Experiment Name: At_100mM_NaCl__P Parameter: Age (day) Value: 17
  misc_feature: MA Experiment 20000308 PARAMETER Experiment Name: At_100mM_NaCl__P Parameter: Organism Value: A. thaliana
  misc_feature: MA Experiment 20000308 PARAMETER Experiment Name: At_100mM_NaCl__P Parameter: Plant Line Value: WS
  misc_feature: MA Experiment 20000308 PARAMETER Experiment Name: At_100mM_NaCl__P Parameter: Timepoint (hr) Value: 72
  misc_feature: MA Experiment 20000308 PARAMETER Experiment Name: At_100mM_NaCl__P Parameter: Tissue Value: Whole Plant
  misc_feature: MA Experiment 20000308 PARAMETER Experiment Name: At_100mM_NaCl__P Parameter: Treatment Value: 100mM NaCl vs. No Treatment
  misc_feature: MA Experiment ID: 20001247 Result: Up-regulated in Transcription
  misc_feature: MA Experiment 20001247 PARAMETER Experiment Name: At_Far-red-induction_P Parameter: Age (day) Value: 7
  misc_feature: MA Experiment 20001247 PARAMETER Experiment Name: At_Far-red-induction_P Parameter: Light Value: Far-red vs. White
  misc_feature: MA Experiment 20001247 PARAMETER Experiment Name: At_Far-red-induction_P Parameter: Organism Value: A. thaliana
  misc_feature: MA Experiment 20001247 PARAMETER Experiment Name: At_Far-red-induction_P Parameter: Plant Line Value: Columbia
  misc_feature: MA Experiment 20001247 PARAMETER Experiment Name: At_Far-red-induction_P Parameter: Timepoint (hr) Value: 1
  misc_feature: MA Experiment 20001247 PARAMETER Experiment Name: At_Far-red-induction_P Parameter: Tissue Value: Whole Plant
  misc_feature: MA Experiment ID: 20001450 Result: Up-regulated in Transcription
  misc_feature: MA Experiment 20001450 PARAMETER Experiment Name: At_Far-red-induction_P Parameter: Age (day) Value: 7
  misc_feature: MA Experiment 20001450 PARAMETER Experiment Name: At_Far-red-induction_P Parameter: Light Value: Far-red vs. White
  misc_feature: MA Experiment 20001450 PARAMETER Experiment Name: At_Far-red-induction_P Parameter: Organism Value: A. thaliana
  misc_feature: MA Experiment 20001450 PARAMETER Experiment Name: At_Far-red-induction_P Parameter: Plant Line Value: Columbia
  misc_feature: MA Experiment 20001450 PARAMETER Experiment Name: At_Far-red-induction_P Parameter: Timepoint (hr) Value: 8
  misc_feature: MA Experiment 20001450 PARAMETER Experiment Name: At_Far-red-induction_P Parameter: Tissue Value: Whole Plant
  misc_feature: MA Experiment ID: 20001451 Result: Up-regulated in Transcription
  misc_feature: MA Experiment 20001451 PARAMETER Experiment Name: At_Far-red-induction_P Parameter: Age (day) Value: 7
  misc_feature: MA Experiment 20001451 PARAMETER Experiment Name: At_Far-red-induction_P Parameter: Light Value: Far-red vs. White
  misc_feature: MA Experiment 20001451 PARAMETER Experiment Name: At_Far-red-induction_P Parameter: Organism Value: A. thaliana
  misc_feature: MA Experiment 20001451 PARAMETER Experiment Name: At_Far-red-induction_P Parameter: Plant Line Value: Columbia
  misc_feature: MA Experiment 20001451 PARAMETER Experiment Name: At_Far-red-induction_P Parameter: Timepoint (hr) Value: 24
  misc_feature: MA Experiment 20001451 PARAMETER Experiment Name: At_Far-red-induction_P Parameter: Tissue Value: Whole Plant
  misc_feature: MA Experiment ID: 20001555 Result: Down-regulated in Transcription
  misc_feature: MA Experiment 20001555 PARAMETER Experiment Name: At_Drought_Soil_Dry_P Parameter: Age (day) Value: 24
  misc_feature: MA Experiment 20001555 PARAMETER Experiment Name: At_Drought_Soil_Dry_P Parameter: Organism Value: A. thaliana
  misc_feature: MA Experiment 20001555 PARAMETER Experiment Name: At_Drought_Soil_Dry_P Parameter: Plant Line Value: WS
  misc_feature: MA Experiment 20001555 PARAMETER Experiment Name: At_Drought_Soil_Dry_P Parameter: Post Timepoint (hr) Value: None
  misc_feature: MA Experiment 20001555 PARAMETER Experiment Name: At_Drought_Soil_Dry_P Parameter: Post-Treatment Value: None
  misc_feature: MA Experiment 20001555 PARAMETER Experiment Name: At_Drought_Soil_Dry_P Parameter: Timepoint (day) Value: 10
  misc_feature: MA Experiment 20001555 PARAMETER Experiment Name: At_Drought_Soil_Dry_P Parameter: Treatment Value: Drought vs. No Drought
  misc_feature: MA Experiment ID: 20001556 Result: Down-regulated in Transcription
  misc_feature: MA Experiment 20001556 PARAMETER Experiment Name: At_Drought_Soil_Dry_P Parameter: Age (day) Value: 26
  misc_feature: MA Experiment 20001556 PARAMETER Experiment Name: At_Drought_Soil_Dry_P Parameter: Organism Value: A. thaliana
  misc_feature: MA Experiment 20001556 PARAMETER Experiment Name: At_Drought_Soil_Dry_P Parameter: Plant Line Value: WS
  misc_feature: MA Experiment 20001556 PARAMETER Experiment Name: At_Drought_Soil_Dry_P Parameter: Post Timepoint (hr) Value: None
  misc_feature: MA Experiment 20001556 PARAMETER Experiment Name: At_Drought_Soil_Dry_P Parameter: Post-Treatment Value: None
  misc_feature: MA Experiment 20001556 PARAMETER Experiment Name: At_Drought_Soil_Dry_P Parameter: Timepoint (day) Value: 12
  misc_feature: MA Experiment 20001556 PARAMETER Experiment Name: At_Drought_Soil_Dry_P Parameter: Treatment Value: Drought vs. No Drought
  misc_feature: MA Experiment ID: 20001558 Result: Down-regulated in Transcription
  misc_feature: MA Experiment 20001558 PARAMETER Experiment Name: At_Drought_Soil_Dry_P Parameter: Age (day) Value: 27
  misc_feature: MA Experiment 20001558 PARAMETER Experiment Name: At_Drought_Soil_Dry_P Parameter: Organism Value: A. thaliana
  misc_feature: MA Experiment 20001558 PARAMETER Experiment Name: At_Drought_Soil_Dry_P Parameter: Plant Line Value: WS
  misc_feature: MA Experiment 20001558 PARAMETER Experiment Name: At_Drought_Soil_Dry_P Parameter: Post Timepoint (hr) Value: 6
  misc_feature: MA Experiment 20001558 PARAMETER Experiment Name: At_Drought_Soil_Dry_P Parameter: Post-Treatment Value: Re-Water vs. No Drought
  misc_feature: MA Experiment 20001558 PARAMETER Experiment Name: At_Drought_Soil_Dry_P Parameter: Timepoint (day) Value: 13
  misc_feature: MA Experiment 20001558 PARAMETER Experiment Name: At_Drought_Soil_Dry_P Parameter: Treatment Value: Drought vs. No Drought
  misc_feature: MA Experiment ID: 20001904 Result: Down-regulated in Transcription
  misc_feature: MA Experiment 20001904 PARAMETER Experiment Name: At_Drought_Reproduction_P Parameter: Age (day) Value: 37
  misc_feature: MA Experiment 20001904 PARAMETER Experiment Name: At_Drought_Reproduction_P Parameter: Organism Value: A. thaliana
  misc_feature: MA Experiment 20001904 PARAMETER Experiment Name: At_Drought_Reproduction_P Parameter: Plant Line Value: WS
  misc_feature: MA Experiment 20001904 PARAMETER Experiment Name: At_Drought_Reproduction_P Parameter: Timepoint (day) Value: 7
  misc_feature: MA Experiment 20001904 PARAMETER Experiment Name: At_Drought_Reproduction_P Parameter: Tissue Value: Rosettes
  misc_feature: MA Experiment 20001904 PARAMETER Experiment Name: At_Drought_Reproduction_P Parameter: Treatment Value: Drought vs. No Drought
atgtttcttctccttctatcttctccctccctctcaaattttaatctccagttttttttttttttttttgactcagagatcaacaaaacctagtttttgaatttgtttcaatttttctcaaattactctgtttttgagatctctgttttcgttaaattatgtctttgaggtcagaatcttcaacggcagagaagataacagaggatccggtgacgtataagacagcacaaagcagcgtgacgtgcatctaccaagcacatatggttggattctggagaaacgttagggttctatggtctaaaaatctcatgaaccattccttaaccgtgatggtcactagcgtacaaggcgatatgaattactgttgcaaggttgatcttaagccatggcacttttggtacaagaaaggttacaaatcgtttgaggtcgaaggaaaccaagtagatgtctattgggattttaggtctgcgaaattcaacggcgggcctgagccgagctccgatttttacgtggcgcttgtatccgaggaagaggttgttttgttgttgggtgatcacaagaagaaagcttttaagaggactaaatctagaccttccttggttgacgctgccttgttctacaagaaagagaatgtgtttgggaagaagattttttcgactagggctaagttccatgataggaagagagagcatgagatcgtagtggagagctctaccggggcgaaagaaccagagatgtggattagcgtagatgggatcgttttggttcaggtgagaaatctgcagtggaaatttagagggaaccagactgttttggttgataaagaacctgttcaagtgttttgggatgtgtatgattggttgttcagcacccccggtacggggcacggcttgttcatctttaaaccggagagcggtgaaagcgaaacgagcaacgaaaccaagaattgcagtgcttcttcttcttcttcttcgtcggagttttgtctctttctttatgcttggaaattggagtaagtctaaatgttttcaatccaaaagcttgcattgatttttttgcctgactgtaaattcacattcaaaaatcaatcttagcgtgtgaccgactcttgataattttgagttgtcaaattc

SEQ ID NO: 88835 - protein, 285 aa, Arabidopsis thaliana; identical to SEQ ID NO: 29057
  peptide (1)..(285): Ceres Seq. ID no. 12712888
  misc_feature (20)..(284): Pfam Name: Plant protein of unknown function (DUF868) Pfam Description: Plant protein of unknown function (DUF868)
  misc_feature (1)..(285): Homolog of NCBI NO: 15235452 NR Description: putative protein; protein id: At4g12690.1, by cDNA: 12923. [Arabidopsis thaliana] >gi|7459232|pir||T06627
  misc_feature (4)..(259): Homolog of NCBI NO: 15228105 NR Description: hypothetical protein; protein id: At2g04220.1 thaliana] >gi|20198211|gb|AAD27916.2| hypothetical protein thaliana] >gi|20198251|gb|AAM15482.1| hypothetical protein
  misc_feature (1)..(250): Homolog of NCBI NO: 15238927 NR Description: putative protein; protein id: At5g48270.1 thaliana] >gi|8777417|dbj|BAA97007.1|
  misc_feature (251)..(285): Homolog of NCBI NO: 15238927 NR Description: putative protein; protein id: At5g48270.1 thaliana] >gi|8777417|dbj|BAA97007.1|
  misc_feature (58)..(259): Homolog of NCBI NO: 25334990 NR Description: hypothetical protein At2g04220 [imported] -
  misc_feature (70)..(285): Homolog of NCBI NO: 20804936 NR Description: P0456E05.14 [Oryza sativa (japonica
  misc_feature (1)..(65): Homolog of NCBI NO: 20804936 NR Description: P0456E05.14 [Oryza sativa (japonica
  misc_feature (25)..(283): Homolog of NCBI NO: 22331055 NR Description: hypothetical protein; protein id: At3g13229.1 thaliana] >gi|9294527|dbj|BAB02790.1|
  misc_feature (21)..(285): Homolog of NCBI NO: 15241702 NR Description: putative protein; protein id: At5g28150.1, by cDNA: gi_19699076 [Arabidopsis thaliana] AT5g28150/T24G3_80 [Arabidopsis thaliana]
  misc_feature (21)..(285): Homolog of NCBI NO: 18397034 NR Description: expressed protein; protein id: At3g04860.1, by cDNA: 5170., supported by cDNA: gi_16612260 [Arabidopsis

SEQ ID NO: 88836 - protein, 251 aa, Arabidopsis thaliana; identical to SEQ ID NO: 29058
  peptide (1)..(251): Ceres Seq. ID no. 12712889
  misc_feature (1)..(250): Pfam Name: Plant protein of unknown function (DUF868) Pfam Description: Plant protein of unknown function (DUF868)
  misc_feature (1)..(251): Homolog of NCBI NO: 15235452 NR Description: putative protein; protein id: At4g12690.1, by cDNA: 12923. [Arabidopsis thaliana] >gi|7459232|pir||T06627
  misc_feature (1)..(225): Homolog of NCBI NO: 15228105 NR Description: hypothetical protein; protein id: At2g04220.1 thaliana] >gi|20198211|gb|AAD27916.2| hypothetical protein thaliana] >gi|20198251|gb|AAM15482.1| hypothetical protein
  misc_feature (1)..(216): Homolog of NCBI NO: 15238927 NR Description: putative protein; protein id: At5g48270.1 thaliana] >gi|8777417|dbj|BAA97007.1|
  misc_feature (217)..(251): Homolog of NCBI NO: 15238927 NR Description: putative protein; protein id: At5g48270.1 thaliana] >gi|8777417|dbj|BAA97007.1|
  misc_feature (24)..(225): Homolog of NCBI NO: 25334990 NR Description: hypothetical protein At2g04220 [imported] -
  misc_feature (36)..(251): Homolog of NCBI NO: 20804936 NR Description: P0456E05.14 [Oryza sativa (japonica
  misc_feature (1)..(31): Homolog of NCBI NO: 20804936 NR Description: P0456E05.14 [Oryza sativa (japonica
  misc_feature (1)..(249): Homolog of NCBI NO: 22331055 NR Description: hypothetical protein; protein id: At3g13229.1 thaliana] >gi|9294527|dbj|BAB02790.1|
  misc_feature (1)..(251): Homolog of NCBI NO: 15241702 NR Description: putative protein; protein id: At5g28150.1, by cDNA: gi_19699076 [Arabidopsis thaliana] AT5g28150/T24G3_80 [Arabidopsis thaliana]
  misc_feature (1)..(251): Homolog of NCBI NO: 18397034 NR Description: expressed protein; protein id: At3g04860.1, by cDNA: 5170., supported by cDNA: gi_16612260 [Arabidopsis

SEQ ID NO: 88837 - protein, 235 aa, Arabidopsis thaliana; identical to SEQ ID NO: 29059
  peptide (1)..(235): Ceres Seq. ID no. 12712890
  misc_feature (1)..(234): Pfam Name: Plant protein of unknown function (DUF868) Pfam Description: Plant protein of unknown function (DUF868)
  misc_feature (1)..(235): Homolog of NCBI NO: 15235452 NR Description: putative protein; protein id: At4g12690.1, by cDNA: 12923. [Arabidopsis thaliana] >gi|7459232|pir||T06627
  misc_feature (1)..(209): Homolog of NCBI NO: 15228105 NR Description: hypothetical protein; protein id: At2g04220.1 thaliana] >gi|20198211|gb|AAD27916.2| hypothetical protein thaliana] >gi|20198251|gb|AAM15482.1| hypothetical protein
  misc_feature (1)..(200): Homolog of NCBI NO: 15238927 NR Description: putative protein; protein id: At5g48270.1 thaliana] >gi|8777417|dbj|BAA97007.1|
  misc_feature (201)..(235): Homolog of NCBI NO: 15238927 NR Description: putative protein; protein id: At5g48270.1 thaliana] >gi|8777417|dbj|BAA97007.1|
  misc_feature (8)..(209): Homolog of NCBI NO: 25334990 NR Description: hypothetical protein At2g04220 [imported] -
  misc_feature (20)..(235): Homolog of NCBI NO: 20804936 NR Description: P0456E05.14 [Oryza sativa (japonica
  misc_feature (1)..(15): Homolog of NCBI NO: 20804936 NR Description: P0456E05.14 [Oryza sativa (japonica
  misc_feature (1)..(233): Homolog of NCBI NO: 22331055 NR Description: hypothetical protein; protein id: At3g13229.1 thaliana] >gi|9294527|dbj|BAB02790.1|
  misc_feature (1)..(235): Homolog of NCBI NO: 15241702 NR Description: putative protein; protein id: At5g28150.1, by cDNA: gi_19699076 [Arabidopsis thaliana] AT5g28150/T24G3_80 [Arabidopsis thaliana]
  misc_feature (1)..(235): Homolog of NCBI NO: 18397034 NR Description: expressed protein; protein id: At3g04860.1, by cDNA: 5170., supported by cDNA: gi_16612260 [Arabidopsis

SEQ ID NO: 88838 - DNA, 1041 bp, Arabidopsis thaliana
  misc_feature (1)..(1041): Ceres Seq. ID no. 12712903
  misc_feature: MA Experiment ID: 108434 Result: Down-regulated in Transcription
  misc_feature: MA Experiment 108434 PARAMETER Experiment Name: At_Root_Tips_cDNA_P Parameter: Tissue Value: Root Tips
  misc_feature: MA Experiment ID: 108461 Result: Up-regulated in Transcription
  misc_feature: MA Experiment 108461 PARAMETER Experiment Name: At_Germinating_Seeds_cDNA_P Parameter: Age (day) Value: 1 vs. 0
  misc_feature: MA Experiment 108461 PARAMETER Experiment Name: At_Germinating_Seeds_cDNA_P Parameter: Tissue Value: Germinating Seeds
  misc_feature: MA Experiment ID: 108464 Result: Up-regulated in Transcription
  misc_feature: MA Experiment 108464 PARAMETER Experiment Name: At_Germinating_Seeds_cDNA_P Parameter: Age (day) Value: 4 vs. 0
  misc_feature: MA Experiment 108464 PARAMETER Experiment Name: At_Germinating_Seeds_cDNA_P Parameter: Tissue Value: Germinating Seeds
  misc_feature: MA Experiment ID: 108585 Result: Up-regulated in Transcription
  misc_feature: MA Experiment 108585 PARAMETER Experiment Name: At_5mM_NaNP_cDNA_P Parameter: Timepoint (hr) Value: 6
  misc_feature: MA Experiment 108585 PARAMETER Experiment Name: At_5mM_NaNP_cDNA_P Parameter: Tissue Value: Aerial
  misc_feature: MA Experiment 108585 PARAMETER Experiment Name: At_5mM_NaNP_cDNA_P Parameter: Treatment Value: null
  misc_feature: MA Experiment ID: 108607 Result: Down-regulated in Transcription
  misc_feature: MA Experiment 108607 PARAMETER Experiment Name: At_100uM_ABA_cDNA_P Parameter: Timepoint (hr) Value: 4
  misc_feature: MA Experiment 108607 PARAMETER Experiment Name: At_100uM_ABA_cDNA_P Parameter: Tissue Value: Aerial
  misc_feature: MA Experiment 108607 PARAMETER Experiment Name: At_100uM_ABA_cDNA_P Parameter: Treatment Value: 100uM ABA vs. No Treatment
  misc_feature: MA Experiment ID: 108609 Result: Down-regulated in Transcription
  misc_feature: MA Experiment 108609 PARAMETER Experiment Name: At_100uM_ABA_cDNA_P Parameter: Timepoint (hr) Value: 24
  misc_feature: MA Experiment 108609 PARAMETER Experiment Name: At_100uM_ABA_cDNA_P Parameter: Tissue Value: Aerial
  misc_feature: MA Experiment 108609 PARAMETER Experiment Name: At_100uM_ABA_cDNA_P Parameter: Treatment Value: 100uM ABA vs. No Treatment
  misc_feature: MA Experiment ID: 108668 Result: Up-regulated in Transcription
  misc_feature: MA Experiment 108668 PARAMETER Experiment Name: At_2mM_SA_cDNA_P Parameter: Plant Line Value: WS
  misc_feature: MA Experiment 108668 PARAMETER Experiment Name: At_2mM_SA_cDNA_P Parameter: Timepoint (hr) Value: 6
  misc_feature: MA Experiment 108668 PARAMETER Experiment Name: At_2mM_SA_cDNA_P Parameter: Treatment Value: 2mM SA vs. No Treatment
  misc_feature: MA Experiment ID: 20000030 Result: Down-regulated in Transcription
  misc_feature: MA Experiment 20000030 PARAMETER Experiment Name: At_CS6630_Roots_cDNA_P Parameter: Plant Line Value: CS6630 vs. WS
  misc_feature: MA Experiment 20000030 PARAMETER Experiment Name: At_CS6630_Roots_cDNA_P Parameter: Tissue Value: Roots
  misc_feature: MA Experiment ID: 20000111 Result: Down-regulated in Transcription
  misc_feature: MA Experiment 20000111 PARAMETER Experiment Name: At_42deg_Heat_cDNA_P Parameter: Temperature (deg C) Value: 42 vs. 22
  misc_feature: MA Experiment 20000111 PARAMETER Experiment Name: At_42deg_Heat_cDNA_P Parameter: Timepoint (hr) Value: 6
  misc_feature: MA Experiment 20000111 PARAMETER Experiment Name: At_42deg_Heat_cDNA_P Parameter: Tissue Value: Aerial
  misc_feature: MA Experiment ID: 20000144 Result: Down-regulated in Transcription
  misc_feature: MA Experiment 20000144 PARAMETER Experiment Name: At_42deg_Heat_cDNA_P Parameter: Temperature (deg C) Value: 42 vs. 22
  misc_feature: MA Experiment 20000144 PARAMETER Experiment Name: At_42deg_Heat_cDNA_P Parameter: Timepoint (hr) Value: 1
  misc_feature: MA Experiment 20000144 PARAMETER Experiment Name: At_42deg_Heat_cDNA_P Parameter: Tissue Value: Aerial
  misc_feature: MA Experiment ID: 20000166 Result: Down-regulated in Transcription
  misc_feature: MA Experiment 20000166 PARAMETER Experiment Name: At_100uM_ABA_P Parameter: Age (day) Value: 14
  misc_feature: MA Experiment 20000166 PARAMETER Experiment Name: At_100uM_ABA_P Parameter: Organism Value: A. thaliana
  misc_feature: MA Experiment 20000166 PARAMETER Experiment Name: At_100uM_ABA_P Parameter: Plant Line Value: WS
  misc_feature: MA Experiment 20000166 PARAMETER Experiment Name: At_100uM_ABA_P Parameter: Timepoint (hr) Value: 1
  misc_feature: MA Experiment 20000166 PARAMETER Experiment Name: At_100uM_ABA_P Parameter: Tissue Value: Aerial
  misc_feature: MA Experiment 20000166 PARAMETER Experiment Name: At_100uM_ABA_P Parameter: Treatment Value: 100uM ABA vs. No Treatment
  misc_feature: MA Experiment ID: 20000169 Result: Down-regulated in Transcription
  misc_feature: MA Experiment 20000169 PARAMETER Experiment Name: At_100uM_ABA_P Parameter: Age (day) Value: 14
  misc_feature: MA Experiment 20000169 PARAMETER Experiment Name: At_100uM_ABA_P Parameter: Organism Value: A. thaliana
  misc_feature: MA Experiment 20000169 PARAMETER Experiment Name: At_100uM_ABA_P Parameter: Plant Line Value: WS
  misc_feature: MA Experiment 20000169 PARAMETER Experiment Name: At_100uM_ABA_P Parameter: Timepoint (hr) Value: 6
  misc_feature: MA Experiment 20000169 PARAMETER Experiment Name: At_100uM_ABA_P Parameter: Tissue Value: Aerial
  misc_feature: MA Experiment 20000169 PARAMETER Experiment Name: At_100uM_ABA_P Parameter: Treatment Value: 100uM ABA vs. No Treatment
  misc_feature: MA Experiment ID: 20000180 Result: Up-regulated in Transcription
  misc_feature: MA Experiment 20000180 PARAMETER Experiment Name: At_Germinating_Seeds_P Parameter: Age (hr) Value: 24 vs. 0
  misc_feature: MA Experiment 20000180 PARAMETER Experiment Name: At_Germinating_Seeds_P Parameter: Tissue Value: Germinating Seeds
  misc_feature: MA Experiment ID: 20000185 Result: Up-regulated in Transcription
  misc_feature: MA Experiment 20000185 PARAMETER Experiment Name: At_Roots__P Parameter: Age (day) Value: 7 vs. 21
  misc_feature: MA Experiment 20000185 PARAMETER Experiment Name: At_Roots__P Parameter: Organism Value: A. thaliana
  misc_feature: MA Experiment 20000185 PARAMETER Experiment Name: At_Roots__P Parameter: Tissue Value: Roots vs. Whole Plant
  misc_feature: MA Experiment ID: 20000265 Result: Down-regulated in Transcription
  misc_feature: MA Experiment 20000265 PARAMETER Experiment Name: At_Open_Flower_P Parameter: Age (day) Value: 21
  misc_feature: MA Experiment 20000265 PARAMETER Experiment Name: At_Open_Flower_P Parameter: Plant Line Value: WS
  misc_feature: MA Experiment 20000265 PARAMETER Experiment Name: At_Open_Flower_P Parameter: Tissue Value: Closed Flower vs. Whole Plant
  misc_feature: MA Experiment ID: 20000308 Result: Up-regulated in Transcription
  misc_feature: MA Experiment 20000308 PARAMETER Experiment Name: At_100mM_NaCl__P Parameter: Age (day) Value: 17
  misc_feature: MA Experiment 20000308 PARAMETER Experiment Name: At_100mM_NaCl__P Parameter: Organism Value: A. thaliana
  misc_feature: MA Experiment 20000308 PARAMETER Experiment Name: At_100mM_NaCl__P Parameter: Plant Line Value: WS
  misc_feature: MA Experiment 20000308 PARAMETER Experiment Name: At_100mM_NaCl__P Parameter: Timepoint (hr) Value: 72
  misc_feature: MA Experiment 20000308 PARAMETER Experiment Name: At_100mM_NaCl__P Parameter: Tissue Value: Whole Plant
  misc_feature: MA Experiment 20000308 PARAMETER Experiment Name: At_100mM_NaCl__P Parameter: Treatment Value: 100mM NaCl vs. No Treatment
  misc_feature: MA Experiment ID: 20000436 Result: Down-regulated in Transcription
  misc_feature: MA Experiment 20000436 PARAMETER Experiment Name: At_Drought_P Parameter: Age (day) Value: 7
  misc_feature: MA Experiment 20000436 PARAMETER Experiment Name: At_Drought_P Parameter: Organism Value: A. thaliana
  misc_feature: MA Experiment 20000436 PARAMETER Experiment Name: At_Drought_P Parameter: Plant Line Value: WS
  misc_feature: MA Experiment 20000436 PARAMETER Experiment Name: At_Drought_P Parameter: Timepoint (hr) Value: 12
  misc_feature: MA Experiment 20000436 PARAMETER Experiment Name: At_Drought_P Parameter: Tissue Value: Whole Plant
  misc_feature: MA Experiment 20000436 PARAMETER Experiment Name: At_Drought_P Parameter: Treatment Value: Drought vs. No Drought
  misc_feature: MA Experiment ID: 20000439 Result: Up-regulated in Transcription
  misc_feature: MA Experiment 20000439 PARAMETER Experiment Name: At_Roots__P Parameter: Age (day) Value: 14 vs. 21
  misc_feature: MA Experiment 20000439 PARAMETER Experiment Name: At_Roots__P Parameter: Organism Value: A. thaliana
  misc_feature: MA Experiment 20000439 PARAMETER Experiment Name: At_Roots__P Parameter: Tissue Value: Roots vs. Whole Plant
  misc_feature: MA Experiment ID: 20000453 Result: Down-regulated in Transcription
  misc_feature: MA Experiment 20000453 PARAMETER Experiment Name: At_100uM_ABA_P Parameter: Age (day) Value: 15
  misc_feature: MA Experiment 20000453 PARAMETER Experiment Name: At_100uM_ABA_P Parameter: Organism Value: A. thaliana
  misc_feature: MA Experiment 20000453 PARAMETER Experiment Name: At_100uM_ABA_P Parameter: Plant Line Value: WS
  misc_feature: MA Experiment 20000453 PARAMETER Experiment Name: At_100uM_ABA_P Parameter: Timepoint (hr) Value: 24
  misc_feature: MA Experiment 20000453 PARAMETER Experiment Name: At_100uM_ABA_P Parameter: Tissue Value: Aerial
  misc_feature: MA Experiment 20000453 PARAMETER Experiment Name: At_100uM_ABA_P Parameter: Treatment Value: 100uM ABA vs. No Treatment
  misc_feature: MA Experiment ID: 20000460 Result: Down-regulated in Transcription
  misc_feature: MA Experiment 20000460 PARAMETER Experiment Name: At_10percent_PEG_P Parameter: Age (day) Value: 12
  misc_feature: MA Experiment 20000460 PARAMETER Experiment Name: At_10percent_PEG_P Parameter: Organism Value: A. thaliana
  misc_feature: MA Experiment 20000460 PARAMETER Experiment Name: At_10percent_PEG_P Parameter: Plant Line Value: WS
  misc_feature: MA Experiment 20000460 PARAMETER Experiment Name: At_10percent_PEG_P Parameter: Timepoint (day) Value: 12
  misc_feature: MA Experiment 20000460 PARAMETER Experiment Name: At_10percent_PEG_P Parameter: Tissue Value: Whole Plant
  misc_feature: MA Experiment 20000460 PARAMETER Experiment Name: At_10percent_PEG_P Parameter: Treatment Value: 10percent PEG vs. No Treatment
  misc_feature: MA Experiment ID: 20000496 Result: Up-regulated in Transcription
  misc_feature: MA Experiment 20000496 PARAMETER Experiment Name: At_Guard_Cells_P Parameter: Harvest Date Value: 7/19/2002
  misc_feature: MA Experiment 20000496 PARAMETER Experiment Name: At_Guard_Cells_P Parameter: Organism Value: Canola
  misc_feature: MA Experiment 20000496 PARAMETER Experiment Name: At_Guard_Cells_P Parameter: Tissue Value: Guard Cells vs. Leaves
  misc_feature: MA Experiment ID: 20000527 Result: Down-regulated in Transcription
  misc_feature: MA Experiment 20000527 PARAMETER Experiment Name: At_10percent_PEG_P Parameter: Age (day) Value: 20
  misc_feature: MA Experiment 20000527 PARAMETER Experiment Name: At_10percent_PEG_P Parameter: Organism Value: A. thaliana
  misc_feature: MA Experiment 20000527 PARAMETER Experiment Name: At_10percent_PEG_P Parameter: Plant Line Value: WS
  misc_feature: MA Experiment 20000527 PARAMETER Experiment Name: At_10percent_PEG_P Parameter: Timepoint (day) Value: 20
  misc_feature: MA Experiment 20000527 PARAMETER Experiment Name: At_10percent_PEG_P Parameter: Tissue Value: Whole Plant
  misc_feature: MA Experiment 20000527 PARAMETER Experiment Name: At_10percent_PEG_P Parameter: Treatment Value: 10percent PEG vs. No Treatment
  misc_feature: MA Experiment ID: 20000575 Result: Down-regulated in Transcription
  misc_feature: MA Experiment 20000575 PARAMETER Experiment Name: At_100uM_ABA_Mutants__P Parameter: Organism Value: A. thaliana
  misc_feature: MA Experiment 20000575 PARAMETER Experiment Name: At_100uM_ABA_Mutants__P Parameter: Plant Line Value: CS22
  misc_feature: MA Experiment 20000575 PARAMETER Experiment Name: At_100uM_ABA_Mutants__P Parameter: Timepoint (hr) Value: 6
  misc_feature: MA Experiment 20000575 PARAMETER Experiment Name: At_100uM_ABA_Mutants__P Parameter: Tissue Value: Whole Plant
  misc_feature: MA Experiment 20000575 PARAMETER Experiment Name: At_100uM_ABA_Mutants__P Parameter: Treatment Value: 1uM ABA vs. No Treatment
  misc_feature: MA Experiment ID: 20000576 Result: Down-regulated in Transcription
  misc_feature: MA Experiment 20000576 PARAMETER Experiment Name: At_100uM_ABA_Mutants__P Parameter: Organism Value: A. thaliana
  misc_feature: MA Experiment 20000576 PARAMETER Experiment Name: At_100uM_ABA_Mutants__P Parameter: Plant Line Value: CS23
  misc_feature: MA Experiment 20000576 PARAMETER Experiment Name: At_100uM_ABA_Mutants__P Parameter: Timepoint (hr) Value: 6
  misc_feature: MA Experiment 20000576 PARAMETER Experiment Name: At_100uM_ABA_Mutants__P Parameter: Tissue Value: Whole Plant
  misc_feature: MA Experiment 20000576 PARAMETER Experiment Name: At_100uM_ABA_Mutants__P Parameter: Treatment Value: 1uM ABA vs. No Treatment
  misc_feature: MA Experiment ID: 20001247 Result: Down-regulated in Transcription
  misc_feature: MA Experiment 20001247 PARAMETER Experiment Name: At_Far-red-induction_P Parameter: Age (day) Value: 7
  misc_feature: MA Experiment 20001247 PARAMETER Experiment Name: At_Far-red-induction_P Parameter: Light Value: Far-red vs. White
  misc_feature: MA Experiment 20001247 PARAMETER Experiment Name: At_Far-red-induction_P Parameter: Organism Value: A. thaliana
  misc_feature: MA Experiment 20001247 PARAMETER Experiment Name: At_Far-red-induction_P Parameter: Plant Line Value: Columbia
  misc_feature: MA Experiment 20001247 PARAMETER Experiment Name: At_Far-red-induction_P Parameter: Timepoint (hr) Value: 1
  misc_feature: MA Experiment 20001247 PARAMETER Experiment Name: At_Far-red-induction_P Parameter: Tissue Value: Whole Plant
  misc_feature: MA Experiment ID: 20001450 Result: Down-regulated in Transcription
  misc_feature: MA Experiment 20001450 PARAMETER Experiment Name: At_Far-red-induction_P Parameter: Age (day) Value: 7
  misc_feature: MA Experiment 20001450 PARAMETER Experiment Name: At_Far-red-induction_P Parameter: Light Value: Far-red vs. White
  misc_feature: MA Experiment 20001450 PARAMETER Experiment Name: At_Far-red-induction_P Parameter: Organism Value: A. thaliana
  misc_feature: MA Experiment 20001450 PARAMETER Experiment Name: At_Far-red-induction_P Parameter: Plant Line Value: Columbia
  misc_feature: MA Experiment 20001450 PARAMETER Experiment Name: At_Far-red-induction_P Parameter: Timepoint (hr) Value: 8
  misc_feature: MA Experiment 20001450 PARAMETER Experiment Name: At_Far-red-induction_P Parameter: Tissue Value: Whole Plant
  misc_feature: MA Experiment ID: 20001556 Result: Down-regulated in Transcription
  misc_feature: MA Experiment 20001556 PARAMETER Experiment Name: At_Drought_Soil_Dry_P Parameter: Age (day) Value: 26
  misc_feature: MA Experiment 20001556 PARAMETER Experiment Name: At_Drought_Soil_Dry_P Parameter: Organism Value: A. thaliana
  misc_feature: MA Experiment 20001556 PARAMETER Experiment Name: At_Drought_Soil_Dry_P Parameter: Plant Line Value: WS
  misc_feature: MA Experiment 20001556 PARAMETER Experiment Name: At_Drought_Soil_Dry_P Parameter: Post Timepoint (hr) Value: None
  misc_feature: MA Experiment 20001556 PARAMETER Experiment Name: At_Drought_Soil_Dry_P Parameter: Post-Treatment Value: None
  misc_feature: MA Experiment 20001556 PARAMETER Experiment Name: At_Drought_Soil_Dry_P Parameter: Timepoint (day) Value: 12
  misc_feature: MA Experiment 20001556 PARAMETER Experiment Name: At_Drought_Soil_Dry_P Parameter: Treatment Value: Drought vs. No Drought
  misc_feature: MA Experiment ID: 20001755 Result: Up-regulated in Transcription
  misc_feature: MA Experiment 20001755 PARAMETER Experiment Name: At_50mM_NH4NO3_L-to-H_P Parameter: Timepoint (hr) Value: 2
  misc_feature: MA Experiment 20001755 PARAMETER Experiment Name: At_50mM_NH4NO3_L-to-H_P Parameter: Tissue Value: Leaf
  misc_feature: MA Experiment 20001755 PARAMETER Experiment Name: At_50mM_NH4NO3_L-to-H_P Parameter: Treatment Value: 50mM NH4NO3 vs 100mM Mannitol
  misc_feature: MA Experiment ID: 20001757 Result: Up-regulated in Transcription
  misc_feature: MA Experiment 20001757 PARAMETER Experiment Name: At_50mM_NH4NO3_L-to-H_P Parameter: Timepoint (hr) Value: 6
  misc_feature: MA Experiment 20001757 PARAMETER Experiment Name: At_50mM_NH4NO3_L-to-H_P Parameter: Tissue Value: Leaf
  misc_feature: MA Experiment 20001757 PARAMETER Experiment Name: At_50mM_NH4NO3_L-to-H_P Parameter: Treatment Value: 50mM NH4NO3 vs 100mM Mannitol
atgcattcctctttgataaaattgggatttcttcttctccttcttcaggtctcattgtctcatgctcaactaagcccttccttttacgataaaacatgtccgcaagtctttgatattgtaaccaataccattgtcaatgcgctgagatcagaccctcgcatcgctgcaagcatccttcgtcttcatttccacgactgctttgttaatggatgtgatgcatcgatattgttagacaacacaacatcgtttaggacggagaaagatgcgtttgggaacgctaattcagctcgaggtttcgatgtaatcgacaaaatgaaggctgccatcgagaaagcatgtcctagaaccgtttcatgtgctgatatgctcgccatcgcagctaaagaatctatcgttttggcgggaggtccttcatggatggttccaaatggaagaagagacagcttaagaggttttatggatcttgctaatgataaccttccaggtccatcttctacacttaaacaacttaaggatagattcaaaaatgtcggactcgaccgttcttctgatctagttgctctttccggtggtcacacttttggcaaaagccaatgtcagttcataatggatcgtctttacaacttcggtgaaaccggtttacccgacccaacccttgataaatcttacctagccacactaagaaaacaatgtccacgtaatggaaaccagagtgtcttggtagattttgatttacgtacaccaacactctttgacaacaaatactatgtgaatctcaaggagaacaaaggacttatccaaagtgaccaagagttgttctctagccctgatgctgcagacactctccctttagttcgagcatacgctgatggtcaagggacatttttcgatgcgttcgtgaaagcaataataaggatgagtagtctttcacctttaacagggaaacaaggagaaataagattgaactgtagagtggtgaattcgaaatctaaaatcatggatgtggtagatgatgctcttgaatttgccagctttatgtga

SEQ ID NO: 88839 - protein, 346 aa, Arabidopsis thaliana
  peptide (1)..(346): Ceres Seq. ID no. 12712904
  misc_feature (40)..(291): Pfam Name: Peroxidase Pfam Description: Peroxidase
  misc_feature (1)..(346): Homolog of NCBI NO: 15236608 NR Description: peroxidase, putative; protein id: At4g08780.1 thaliana] >gi|26397838|sp|Q9LDA4|PE38_ARATH Peroxidase 38
  misc_feature (1)..(346): Homolog of NCBI NO: 15236606 NR Description: peroxidase, putative; protein id: At4g08770.1, by cDNA: gi_17530567 [Arabidopsis thaliana] Peroxidase 37 precursor (Atperox P37) (ATP38)
  misc_feature (1)..(346): Homolog of NCBI NO: 22531052 NR Description: peroxidase C2 precursor-like protein [Arabidopsis
  misc_feature (1)..(344): Homolog of NCBI NO: 129809 NR Description: Peroxidase C2 precursor >gi|81665|pir||JH0149
  misc_feature (5)..(346): Homolog of NCBI NO: 15229095 NR Description: peroxidase, putative; protein id: At3g49120.1, by cDNA: 39678., supported by cDNA: gi_11908065, supported by gi_12642879, supported by cDNA: gi_13265526, supported by cDNA:
  misc_feature (5)..(346): Homolog of NCBI NO: 15229084 NR Description: peroxidase; protein id: At3g49110.1, supported by gi_15146325, supported by cDNA: gi_15450610 [Arabidopsis >gi|129815|sp|P24101|PE33_ARATH Peroxidase 33 precursor (Atperox
  misc_feature (5)..(346): Homolog of NCBI NO: 480907 NR Description: peroxidase (EC 1.11.1.7) Cb - Arabidopsis
  misc_feature (14)..(346): Homolog of NCBI NO: 129816 NR Description: Peroxidase C1C precursor >gi|81668|pir||S00627
  misc_feature (4)..(346): Homolog of NCBI NO: 129813 NR Description: PEROXIDASE C1A PRECURSOR >gi|2144377|pir||OPRHC
  misc_feature (3)..(346): Homolog of NCBI NO: 25453209 NR Description: Peroxidase 32 precursor (Atperox P32) (PRXR3) >gi|1402908|emb|CAA66959.1| peroxidase [Arabidopsis thaliana] peroxidase ATP16a [Arabidopsis thaliana]
MHSSLIKLGFLLLLLQVSLSHAQLSPSFYDKTCPQVFDIVTNTIVNALRSDPRIAASILRLHFHDCFVNGCDASILLDNTTSFRTEKDAFGNANSARGFDVIDKMKAAIEKACPRTVSCADMLAIAAKESIVLAGGPSWMVPNGRRDSLRGFMDLANDNLPGPSSTLKQLKDRFKNVGLDRSSDLVALSGGHTFGKSQCQFIMDRLYNFGETGLPDPTLDKSYLATLRKQCPRNGNQSVLVDFDLRTPTLFDNKYYVNLKENKGLIQSDQELFSSPDAADTLPLVRAYADGQGTFFDAFVKAIIRMSSLSPLTGKQGEIRLNCRVVNSKSKIMDVVDDALEFASFM

SEQ ID NO: 88840 - protein, 242 aa, Arabidopsis thaliana
  peptide (1)..(242): Ceres Seq. ID no. 12712905
  misc_feature (1)..(187): Pfam Name: Peroxidase Pfam Description: Peroxidase
  misc_feature (1)..(242): Homolog of NCBI NO: 15236608 NR Description: peroxidase, putative; protein id: At4g08780.1 thaliana] >gi|26397838|sp|Q9LDA4|PE38_ARATH Peroxidase 38
  misc_feature (1)..(242): Homolog of NCBI NO: 15236606 NR Description: peroxidase, putative; protein id: At4g08770.1, by cDNA: gi_17530567 [Arabidopsis thaliana] Peroxidase 37 precursor (Atperox P37) (ATP38)
  misc_feature (1)..(242): Homolog of NCBI NO: 22531052 NR Description: peroxidase C2 precursor-like protein [Arabidopsis
  misc_feature (1)..(240): Homolog of NCBI NO: 129809 NR Description: Peroxidase C2 precursor >gi|81665|pir||JH0149
  misc_feature (1)..(242): Homolog of NCBI NO: 15229095 NR Description: peroxidase, putative; protein id: At3g49120.1, by cDNA: 39678., supported by cDNA: gi_11908065, supported by gi_12642879, supported by cDNA: gi_13265526, supported by cDNA:
  misc_feature (1)..(242): Homolog of NCBI NO: 15229084 NR Description: peroxidase; protein id: At3g49110.1, supported by gi_15146325, supported by cDNA: gi_15450610 [Arabidopsis >gi|129815|sp|P24101|PE33_ARATH Peroxidase 33 precursor (Atperox
  misc_feature (1)..(242): Homolog of NCBI NO: 480907 NR Description: peroxidase (EC 1.11.1.7) Cb - Arabidopsis
  misc_feature (1)..(242): Homolog of NCBI NO: 129816 NR Description: Peroxidase C1C precursor >gi|81668|pir||S00627
  misc_feature (1)..(242): Homolog of NCBI NO: 129813 NR Description: PEROXIDASE C1A PRECURSOR >gi|2144377|pir||OPRHC
  misc_feature (1)..(242): Homolog of NCBI NO: 25453209 NR Description: Peroxidase 32 precursor (Atperox P32) (PRXR3) >gi|1402908|emb|CAA66959.1| peroxidase [Arabidopsis thaliana] peroxidase ATP16a [Arabidopsis thaliana]
MKAAIEKACPRTVSCADMLAIAAKESIVLAGGPSWMVPNGRRDSLRGFMDLANDNLPGPSSTLKQLKDRFKNVGLDRSSDLVALSGGHTFGKSQCQFIMDRLYNFGETGLPDPTLDKSYLATLRKQCPRNGNQSVLVDFDLRTPTLFDNKYYVNLKENKGLIQSDQELFSSPDAADTLPLVRAYADGQGTFFDAFVKAIIRMSSLSPLTGKQGEIRLNCRVVNSKSKIMDVVDDALEFASFM

SEQ ID NO: 88841 - protein, 225 aa, Arabidopsis thaliana
  peptide (1)..(225): Ceres Seq. ID no. 12712906
  misc_feature (1)..(170): Pfam Name: Peroxidase Pfam Description: Peroxidase
  misc_feature (1)..(225): Homolog of NCBI NO: 15236608 NR Description: peroxidase, putative; protein id: At4g08780.1 thaliana] >gi|26397838|sp|Q9LDA4|PE38_ARATH Peroxidase 38
  misc_feature (1)..(225): Homolog of NCBI NO: 15236606 NR Description: peroxidase, putative; protein id: At4g08770.1, by cDNA: gi_17530567 [Arabidopsis thaliana] Peroxidase 37 precursor (Atperox P37) (ATP38)
  misc_feature (1)..(225): Homolog of NCBI NO: 22531052 NR Description: peroxidase C2 precursor-like protein [Arabidopsis
  misc_feature (1)..(223): Homolog of NCBI NO: 129809 NR Description: Peroxidase C2 precursor >gi|81665|pir||JH0149
  misc_feature (1)..(225): Homolog of NCBI NO: 15229095 NR Description: peroxidase, putative; protein id: At3g49120.1, by cDNA: 39678., supported by cDNA: gi_11908065, supported by gi_12642879, supported by cDNA: gi_13265526, supported by cDNA:
  misc_feature (1)..(225): Homolog of NCBI NO: 15229084 NR Description: peroxidase; protein id: At3g49110.1, supported by gi_15146325, supported by cDNA: gi_15450610 [Arabidopsis >gi|129815|sp|P24101|PE33_ARATH Peroxidase 33 precursor (Atperox
  misc_feature (1)..(225): Homolog of NCBI NO: 480907 NR Description: peroxidase (EC 1.11.1.7) Cb - Arabidopsis
  misc_feature (1)..(225): Homolog of NCBI NO: 129816 NR Description: Peroxidase C1C precursor >gi|81668|pir||S00627
  misc_feature (1)..(225): Homolog of NCBI NO: 129813 NR Description: PEROXIDASE C1A PRECURSOR >gi|2144377|pir||OPRHC
  misc_feature (1)..(225): Homolog of NCBI NO: 25453209 NR Description: Peroxidase 32 precursor (Atperox P32) (PRXR3) >gi|1402908|emb|CAA66959.1| peroxidase [Arabidopsis thaliana] peroxidase ATP16a [Arabidopsis thaliana]
MLAIAAKESIVLAGGPSWMVPNGRRDSLRGFMDLANDNLPGPSSTLKQLKDRFKNVGLDRSSDLVALSGGHTFGKSQCQFIMDRLYNFGETGLPDPTLDKSYLATLRKQCPRNGNQSVLVDFDLRTPTLFDNKYYVNLKENKGLIQSDQELFSSPDAADTLPLVRAYADGQGTFFDAFVKAIIRMSSLSPLTGKQGEIRLNCRVVNSKSKIMDVVDDALEFASFM

SEQ ID NO: 88842 - DNA, 3249 bp, Arabidopsis thaliana
  misc_feature (1)..(3249): Ceres Seq. ID no. 12713004
  misc_feature: MA Experiment ID: 20000171 Result: Up-regulated in Transcription
  misc_feature: MA Experiment 20000171 PARAMETER Experiment Name: At_42deg_Heat_P Parameter: Age (day) Value: 14
  misc_feature: MA Experiment 20000171 PARAMETER Experiment Name: At_42deg_Heat_P Parameter: Organism Value: A. thaliana
  misc_feature: MA Experiment 20000171 PARAMETER Experiment Name: At_42deg_Heat_P Parameter: Plant Line Value: WS
  misc_feature: MA Experiment 20000171 PARAMETER Experiment Name: At_42deg_Heat_P Parameter: Temperature (deg C) Value: 42 vs. 22
  misc_feature: MA Experiment 20000171 PARAMETER Experiment Name: At_42deg_Heat_P Parameter: Timepoint (hr) Value: 1
  misc_feature: MA Experiment 20000171 PARAMETER Experiment Name: At_42deg_Heat_P Parameter: Tissue Value: Aerial
  misc_feature: MA Experiment ID: 20000173 Result: Up-regulated in Transcription
  misc_feature: MA Experiment 20000173 PARAMETER Experiment Name: At_42deg_Heat_P Parameter: Age (day) Value: 14
  misc_feature: MA Experiment 20000173 PARAMETER Experiment Name: At_42deg_Heat_P Parameter: Organism Value: A. thaliana
  misc_feature: MA Experiment 20000173 PARAMETER Experiment Name: At_42deg_Heat_P Parameter: Plant Line Value: WS
  misc_feature: MA Experiment 20000173 PARAMETER Experiment Name: At_42deg_Heat_P Parameter: Temperature (deg C) Value: 42 vs. 22
  misc_feature: MA Experiment 20000173 PARAMETER Experiment Name: At_42deg_Heat_P Parameter: Timepoint (hr) Value: 6
  misc_feature: MA Experiment 20000173 PARAMETER Experiment Name: At_42deg_Heat_P Parameter: Tissue Value: Aerial
  misc_feature: MA Experiment ID: 20001247 Result: Up-regulated in Transcription
  misc_feature: MA Experiment 20001247 PARAMETER Experiment Name: At_Far-red-induction_P Parameter: Age (day) Value: 7
  misc_feature: MA Experiment 20001247 PARAMETER Experiment Name: At_Far-red-induction_P Parameter: Light Value: Far-red vs. White
  misc_feature: MA Experiment 20001247 PARAMETER Experiment Name: At_Far-red-induction_P Parameter: Organism Value: A. thaliana
  misc_feature: MA Experiment 20001247 PARAMETER Experiment Name: At_Far-red-induction_P Parameter: Plant Line Value: Columbia
  misc_feature: MA Experiment 20001247 PARAMETER Experiment Name: At_Far-red-induction_P Parameter: Timepoint (hr) Value: 1
  misc_feature: MA Experiment 20001247 PARAMETER Experiment Name: At_Far-red-induction_P Parameter: Tissue Value: Whole Plant
atgacggaaccagaaagattaggaggaatctccctgagttttccggtgaatgaagaagatacggtaacgacaacatcaccaaagactcttccacggaggctccgtcgtcgtcttctcgaaccgaagagtcctgtctccgccgcagagatcgattccaaactcagagaagctgatctccgtcgtcagcaatattatgaatcactatcgagtaaggcacgacctaagatgagaagtccgagatcaggaagtatagaggagcttagtcagagacttgaatcaaagcttaatgctgctgaacaaaagaggttaagtattttggagaaggagctggctcgtttggctaagatggatgaagctagacaagctgcgaagaatggacttgagcaacgagttgagaaagagcgtgatgagttagagagtaaggttgaagaaagggttttgaaggctgagaagaataggatgcttttgtttaaagctatggctcaacgaagagcggcgaagaggcagcgtgctgcgcagagtttgatgaagaaagctattcaggagacgaggtataaggagagtgtgcgtgctgcgatttatcagaagagagcagctgcagagagtaagcggatggggattttggaagcggaaaggagaagagcgaatgcgagattgactcgggtgtttggtgctgctagttctgtgcggagtcaaaaggaagctgagagaaggaaaatgaaggaccgtttagaagagcggcttcaaagggcaaagaagctgaaagcgcaatatatgaggcgaaggagaggtatggatagttgttcatcttcaagatcagaaacaatgcgaaagaaccaagtgcatcttgttaggatgttagtaagatgctggaggagatttgctaaatacaagaaatctacttttgtcttggctagagcatatcatgagttggggatcaatgaaaaatccattgagtcagtaccatttgagcagtttgccattcaaatgaactcagtttctgtaattcaaacggtcaaagcattgcttgatcgcttggagatccgactcactctatctaaggcatccaatgtggagaacattaatcatcttcttaagcacatctttccgcctgttcgaagagggaaatcacccagtcccatgagtaaaggcgagcaaaattcacccaattccaagatgggatatcaaaaacttaaaaagattgcgagatatccagctagaatttttctttgtgcctacatgatcaagcaacatcccggtgcaatttttagaggaagaggtgaacatgagattgcgcttgtggaatctgcaacttgtcttattcgggagtttgaactgctggtgaaagttatattggaaggaccagaatctaccctcccgggcaatgtatctttcgtagctcaacgtccaaaaaaattcagatctcagctagaagcatttgataaagcttggtgctcttaccttgagggttttgtagtctggaaaattaatgatgctaagcttctagaaaaagatttagccagaactcaagagtctgagctgtctgaggtatcaaaacatacttcctctcccaaaataatagacagtggcttgaatcagaagacggtaaaggcatcttctccaactaatcgggctttattctctgaaactgatggagcacgagaatcaaaagcacctgcagattcgcatcttccatcttcatcttcaccttcaccgggctcatcgaatttgtcaccctctttgaactctgggagcgaggccatttctactccaaacgtggtagctaatagctttgatgcagcgttggctagtgagaacgaagtaattgtaaatgaaattgtccatgacaatagcagtagttttgtgagggttaaggagacaatggaaaaggctttctgggatggtgtcatggaatccatgaaacagtcgcagccagacttcagctgggttattaaactcatgaaagaagtcagggatgaactctgtgagatatctcccaaagactggagacaagagattgttcaaactatcgatacggatgtgctgtcacagttactggcttctggtaatgtcgacatgggttatcttggaaatattcttgagttttcccttggcattttgctgaaactctctgctccagctaatgaagaggaaatcagggttactcaccataaactaatgacagaacttggagagatagttccaactgatggccattcgaattcgtcatatgcagtcttaatggttaaggggctacgctttgttttgcagcagattcagattctaaagaaggaaatcagcaaatctcgtttgaaactcttggagccacttcttaagggacctgctggtctggaatatctgaagaagtcattttccagtcggcatggttccccagaccaagcgtcttcctcgctaccattgacaaaacgttggcttttaagtgttcgaggagaagcagagagggagtggaaagaacacaaagatgctctttctgctgtcataaataaccactctggatcatcaggcctcccttcgaccaccatgcgaactggtggcaatgtctcctctgtttcaaaagtcaataccccttcatctccatttccaggaatcgaactgtcagagtgcaagggagaaactgtggatcttcttgttcgcattggcctgttaaaaatggtgagcgaaatcggtggtcttactttagaaactgtccctgaaacatttcaacttaacctatctaggctgagagatgttcaatcccaaatccagaaaatcactcttgtctccatcagtgttttgatcctccagcaaacactagtaagcgaaaactcatcctcgattgacatggaggctattacacggacttgcataaaccgtctttacgagatgctagacgcaaaacctgatgcaggtctttcagaaatcatggaaacactctccgagcttcttgattctaacgatgcagagacaaagaaacaagtaatcgcaaacatgcttgtgaaaagcttacaagcaggagacgcagtgttcacacatgtatcacagaccatatacctagccattagagccgcggttttggccggaaacaacacgaagagaaagcagttggtggaaacaatgctaagaaagatcggagcagcttctctctcggacaaggtcatagaggtttcagacattcttgttcttgtggcaacagtgtcacgttctgttcatggattgtggtatgaagaattgctaaagaaaccgaattaa

SEQ ID NO: 88843 - protein, 1082 aa, Arabidopsis thaliana
  peptide (1)..(1082): Ceres Seq. ID no. 12713005
  misc_feature (612)..(1081): Pfam Name: T-complex protein 11 Pfam Description: T-complex protein 11
  misc_feature (9)..(549): Homolog of NCBI NO: 15219971 NR Description: unknown protein; protein id: At1g22930.1
  misc_feature (547)..(1078): Homolog of NCBI NO: 15219971 NR Description: unknown protein; protein id: At1g22930.1
  misc_feature (18)..(549): Homolog of NCBI NO: 39545651 NR Description: OJ000114_01.6 [Oryza sativa (japonica
  misc_feature (565)..(1077): Homolog of NCBI NO: 39545651 NR Description: OJ000114_01.6 [Oryza sativa (japonica
  misc_feature (497)..(1077): Homolog of NCBI NO: 39545653 NR Description: OJ000114_01.8 [Oryza sativa (japonica
  misc_feature (306)..(380): Homolog of NCBI NO: 39545653 NR Description: OJ000114_01.8 [Oryza sativa (japonica
  misc_feature (355)..(726): Homolog of NCBI NO: 39545653 NR Description: OJ000114_01.8 [Oryza sativa (japonica
  misc_feature (535)..(806): Homolog of NCBI NO: 38648893 NR Description: Unknown (protein for MGC:73347) [Danio rerio]
  misc_feature (550)..(786): Homolog of NCBI NO: 28893201 NR Description: RIKEN cDNA C130096D04 gene [Mus musculus]
  misc_feature (33)..(262): Homolog of NCBI NO: 30230642 NR Description: autotransporter/adhesin Aae [Actinobacillus
MTEPERLGGISLSFPVNEEDTVTTTSPKTLPRRLRRRLLEPKSPVSAAEIDSKLREADLRRQQYYESLSSKARPKMRSPRSGSIEELSQRLESKLNAAEQKRLSILEKELARLAKMDEARQAAKNGLEQRVEKERDELESKVEERVLKAEKNRMLLFKAMAQRRAAKRQRAAQSLMKKAIQETRYKESVRAAIYQKRAAAESKRMGILEAERRRANARLTRVFGAASSVRSQKEAERRKMKDRLEERLQRAKKLKAQYMRRRRGMDSCSSSRSETMRKNQVHLVRMLVRCWRRFAKYKKSTFVLARAYHELGINEKSIESVPFEQFAIQMNSVSVIQTVKALLDRLEIRLTLSKASNVENINHLLKHIFPPVRRGKSPSPMSKGEQNSPNSKMGYQKLKKIARYPARIFLCAYMIKQHPGAIFRGRGEHEIALVESATCLIREFELLVKVILEGPESTLPGNVSFVAQRPKKFRSQLEAFDKAWCSYLEGFVVWKINDAKLLEKDLARTQESELSEVSKHTSSPKIIDSGLNQKTVKASSPTNRALFSETDGARESKAPADSHLPSSSSPSPGSSNLSPSLNSGSEAISTPNVVANSFDAALASENEVIVNEIVHDNSSSFVRVKETMEKAFWDGVMESMKQSQPDFSWVIKLMKEVRDELCEISPKDWRQEIVQTIDTDVLSQLLASGNVDMGYLGNILEFSLGILLKLSAPANEEEIRVTHHKLMTELGEIVPTDGHSNSSYAVLMVKGLRFVLQQIQILKKEISKSRLKLLEPLLKGPAGLEYLKKSFSSRHGSPDQASSSLPLTKRWLLSVRGEAEREWKEHKDALSAVINNHSGSSGLPSTTMRTGGNVSSVSKVNTPSSPFPGIELSECKGETVDLLVRIGLLKMVSEIGGLTLETVPETFQLNLSRLRDVQSQIQKITLVSISVLILQQTLVSENSSSIDMEAITRTCINRLYEMLDAKPDAGLSEIMETLSELLDSNDAETKKQVIANMLVKSLQAGDAVFTHVSQTIYLAIRAAVLAGNNTKRKQLVETMLRKIGAASLSDKVIEVSDILVLVATVSRSVHGLWYEELLKKPN

SEQ ID NO: 88844 - protein, 1007 aa, Arabidopsis thaliana
  peptide (1)..(1007): Ceres Seq. ID no. 12713006
  misc_feature (537)..(1006): Pfam Name: T-complex protein 11 Pfam Description: T-complex protein 11
  misc_feature (1)..(474): Homolog of NCBI NO: 15219971 NR Description: unknown protein; protein id: At1g22930.1
  misc_feature (472)..(1003): Homolog of NCBI NO: 15219971 NR Description: unknown protein; protein id: At1g22930.1
  misc_feature (1)..(474): Homolog of NCBI NO: 39545651 NR Description: OJ000114_01.6 [Oryza sativa (japonica
  misc_feature (490)..(1002): Homolog of NCBI NO: 39545651 NR Description: OJ000114_01.6 [Oryza sativa (japonica
  misc_feature (422)..(1002): Homolog of NCBI NO: 39545653 NR Description: OJ000114_01.8 [Oryza sativa (japonica
  misc_feature (231)..(305): Homolog of NCBI NO: 39545653 NR Description: OJ000114_01.8 [Oryza sativa (japonica
  misc_feature (280)..(651): Homolog of NCBI NO: 39545653 NR Description: OJ000114_01.8 [Oryza sativa (japonica
  misc_feature (460)..(731): Homolog of NCBI NO: 38648893 NR Description: Unknown (protein for MGC:73347) [Danio rerio]
  misc_feature (475)..(711): Homolog of NCBI NO: 28893201 NR Description: RIKEN cDNA C130096D04 gene [Mus musculus]
  misc_feature (1)..(187): Homolog of NCBI NO: 30230642 NR Description: autotransporter/adhesin Aae [Actinobacillus
MRSPRSGSIEELSQRLESKLNAAEQKRLSILEKELARLAKMDEARQAAKNGLEQRVEKERDELESKVEERVLKAEKNRMLLFKAMAQRRAAKRQRAAQSLMKKAIQETRYKESVRAAIYQKRAAAESKRMGILEAERRRANARLTRVFGAASSVRSQKEAERRKMKDRLEERLQRAKKLKAQYMRRRRGMDSCSSSRSETMRKNQVHLVRMLVRCWRRFAKYKKSTFVLARAYHELGINEKSIESVPFEQFAIQMNSVSVIQTVKALLDRLEIRLTLSKASNVENINHLLKHIFPPVRRGKSPSPMSKGEQNSPNSKMGYQKLKKIARYPARIFLCAYMIKQHPGAIFRGRGEHEIALVESATCLIREFELLVKVILEGPESTLPGNVSFVAQRPKKFRSQLEAFDKAWCSYLEGFVVWKINDAKLLEKDLARTQESELSEVSKHTSSPKIIDSGLNQKTVKASSPTNRALFSETDGARESKAPADSHLPSSSSPSPGSSNLSPSLNSGSEAISTPNVVANSFDAALASENEVIVNEIVHDNSSSFVRVKETMEKAFWDGVMESMKQSQPDFSWVIKLMKEVRDELCEISPKDWRQEIVQTIDTDVLSQLLASGNVDMGYLGNILEFSLGILLKLSAPANEEEIRVTHHKLMTELGEIVPTDGHSNSSYAVLMVKGLRFVLQQIQILKKEISKSRLKLLEPLLKGPAGLEYLKKSFSSRHGSPDQASSSLPLTKRWLLSVRGEAEREWKEHKDALSAVINNHSGSSGLPSTTMRTGGNVSSVSKVNTPSSPFPGIELSECKGETVDLLVRIGLLKMVSEIGGLTLETVPETFQLNLSRLRDVQSQIQKITLVSISVLILQQTLVSENSSSIDMEAITRTCINRLYEMLDAKPDAGLSEIMETLSELLDSNDAETKKQVIANMLVKSLQAGDAVFTHVSQTIYLAIRAAVLAGNNTKRKQLVETMLRKIGAASLSDKVIEVSDILVLVATVSRSVHGLWYEELLKKPN

SEQ ID NO: 88845 - protein, 967 aa, Arabidopsis thaliana
  peptide (1)..(967): Ceres Seq. ID no. 12713007
  misc_feature (497)..(966): Pfam Name: T-complex protein 11 Pfam Description: T-complex protein 11
  misc_feature (1)..(434): Homolog of NCBI NO: 15219971 NR Description: unknown protein; protein id: At1g22930.1
  misc_feature (432)..(963): Homolog of NCBI NO: 15219971 NR Description: unknown protein; protein id: At1g22930.1
  misc_feature (1)..(434): Homolog of NCBI NO: 39545651 NR Description: OJ000114_01.6 [Oryza sativa (japonica
  misc_feature (450)..(962): Homolog of NCBI NO: 39545651 NR Description: OJ000114_01.6 [Oryza sativa (japonica
  misc_feature (382)..(962): Homolog of NCBI NO: 39545653 NR Description: OJ000114_01.8 [Oryza sativa (japonica
  misc_feature (191)..(265): Homolog of NCBI NO: 39545653 NR Description: OJ000114_01.8 [Oryza sativa (japonica
  misc_feature (240)..(611): Homolog of NCBI NO: 39545653 NR Description: OJ000114_01.8 [Oryza sativa (japonica
  misc_feature (420)..(691): Homolog of NCBI NO: 38648893 NR Description: Unknown (protein for MGC:73347) [Danio rerio]
  misc_feature (435)..(671): Homolog of NCBI NO: 28893201 NR Description: RIKEN cDNA C130096D04 gene [Mus musculus]
  misc_feature (1)..(147): Homolog of NCBI NO: 30230642 NR Description: autotransporter/adhesin Aae [Actinobacillus
MDEARQAAKNGLEQRVEKERDELESKVEERVLKAEKNRMLLFKAMAQRRAAKRQRAAQSLMKKAIQETRYKESVRAAIYQKRAAAESKRMGILEAERRRANARLTRVFGAASSVRSQKEAERRKMKDRLEERLQRAKKLKAQYMRRRRGMDSCSSSRSETMRKNQVHLVRMLVRCWRRFAKYKKSTFVLARAYHELGINEKSIESVPFEQFAIQMNSVSVIQTVKALLDRLEIRLTLSKASNVENINHLLKHIFPPVRRGKSPSPMSKGEQNSPNSKMGYQKLKKIARYPARIFLCAYMIKQHPGAIFRGRGEHEIALVESATCLIREFELLVKVILEGPESTLPGNVSFVAQRPKKFRSQLEAFDKAWCSYLEGFVVWKINDAKLLEKDLARTQESELSEVSKHTSSPKIIDSGLNQKTVKASSPTNRALFSETDGARESKAPADSHLPSSSSPSPGSSNLSPSLNSGSEAISTPNVVANSFDAALASENEVIVNEIVHDNSSSFVRVKETMEKAFWDGVMESMKQSQPDFSWVIKLMKEVRDELCEISPKDWRQEIVQTIDTDVLSQLLASGNVDMGYLGNILEFSLGILLKLSAPANEEEIRVTHHKLMTELGEIVPTDGHSNSSYAVLMVKGLRFVLQQIQILKKEISKSRLKLLEPLLKGPAGLEYLKKSFSSRHGSPDQASSSLPLTKRWLLSVRGEAEREWKEHKDALSAVINNHSGSSGLPSTTMRTGGNVSSVSKVNTPSSPFPGIELSECKGETVDLLVRIGLLKMVSEIGGLTLETVPETFQLNLSRLRDVQSQIQKITLVSISVLILQQTLVSENSSSIDMEAITRTCINRLYEMLDAKPDAGLSEIMETLSELLDSNDAETKKQVIANMLVKSLQAGDAVFTHVSQTIYLAIRAAVLAGNNTKRKQLVETMLRKIGAASLSDKVIEVSDILVLVATVSRSVHGLWYEELLKKPN

SEQ ID NO: 88846 - DNA, 690 bp, Arabidopsis thaliana
  misc_feature (1)..(690): Ceres Seq. ID no. 12713044
  misc_feature: MA Experiment ID: 20000306 Result: Up-regulated in Transcription
  misc_feature: MA Experiment 20000306 PARAMETER Experiment Name: At_Germinating_Seeds_Sub_P Parameter: Age (hr) Value: 6 vs. 0
  misc_feature: MA Experiment 20000306 PARAMETER Experiment Name: At_Germinating_Seeds_Sub_P Parameter: Organism Value: A. thaliana
  misc_feature: MA Experiment 20000306 PARAMETER Experiment Name: At_Germinating_Seeds_Sub_P Parameter: Plant Line Value: WS
  misc_feature: MA Experiment 20000306 PARAMETER Experiment Name: At_Germinating_Seeds_Sub_P Parameter: Tissue Value: Germinating Seeds
  misc_feature: MA Experiment ID: 20000307 Result: Up-regulated in Transcription
  misc_feature: MA Experiment 20000307 PARAMETER Experiment Name: At_Germinating_Seeds_Sub_P Parameter: Age (hr) Value: 24 vs. 0
  misc_feature: MA Experiment 20000307 PARAMETER Experiment Name: At_Germinating_Seeds_Sub_P Parameter: Organism Value: A. thaliana
  misc_feature: MA Experiment 20000307 PARAMETER Experiment Name: At_Germinating_Seeds_Sub_P Parameter: Plant Line Value: WS
  misc_feature: MA Experiment 20000307 PARAMETER Experiment Name: At_Germinating_Seeds_Sub_P Parameter: Tissue Value: Germinating Seeds
  misc_feature: MA Experiment ID: 20000314 Result: Up-regulated in Transcription
  misc_feature: MA Experiment 20000314 PARAMETER Experiment Name: At_14day_Shoots-Roots_Sub_P Parameter: Age (day) Value: 14
  misc_feature: MA Experiment 20000314 PARAMETER Experiment Name: At_14day_Shoots-Roots_Sub_P Parameter: Organism Value: A. thaliana
  misc_feature: MA Experiment 20000314 PARAMETER Experiment Name: At_14day_Shoots-Roots_Sub_P Parameter: Plant Line Value: WS
  misc_feature: MA Experiment 20000314 PARAMETER Experiment Name: At_14day_Shoots-Roots_Sub_P Parameter: Tissue Value: Roots vs. Whole Plant
atgaatttgttacttcaggaaactccgaagatcgtagtaacgagtgaagattgggaatcgaagctaagtgatgtggaaattttgatagaagacatgaacagactcgtgatgaatcttcttgtggctgaaggatatagagaagctgctgagaaattcaaagaggagtctataactatgccagaggaagatcttgctagcatgaatgagcgattggaggtgataaaagctatcgaatcccgaaatctcgaggatgcaattgagaagttgaatgcactaaaccctgagattatcaaaacaagttttcacctccaccagcaaatgttgatcgagttgatccgtgagaagaagaccgaggaggctgttgcgtttgcacaggaaaaactcgcgccactagctgaggagaatgaggccttacaaagagaactggaaaaaacagtgtgtatactcgttactgaaggtctccctaactgcccgtccagggagcttttccacaactcgcagtggattaggactgctagccacgtaaacgaagcaatccatacaagccagactggagaaaaaggtcctgaattggagcgcttgttgaaggagctgatttggactcagaatcaactggatgaaaaaacagtctatgtgtatccacgcatgaatgatttttccactggccagctcatataccgaccagaatga

SEQ ID NO: 88847 - protein, 229 aa, Arabidopsis thaliana
  peptide (1)..(229): Ceres Seq. ID no. 12713045
  misc_feature (7)..(229): Homolog of NCBI NO: 30681030 NR Description: expressed protein [Arabidopsis thaliana]
  misc_feature (1)..(220): Homolog of NCBI NO: 7487558 NR Description: hypothetical protein T30A10.60 - Arabidopsis >gi|5881775|emb|CAB55693.1| putative protein [Arabidopsis >gi|7267572|emb|CAB78053.1| putative protein [Arabidopsis
  misc_feature (8)..(224): Homolog of NCBI NO: 15219873 NR Description: hypothetical protein; protein id: At1g61150.1 thaliana] >gi|27808548|gb|AAO24554.1| At1g61150 [Arabidopsis
  misc_feature (8)..(221): Homolog of NCBI NO: 25404311 NR Description: hypothetical protein F11P17.12 [imported] - thaliana >gi|2443886|gb|AAB71479.1| Unknown protein [Arabidopsis
  misc_feature (4)..(224): Homolog of NCBI NO: 26451919 NR Description: unknown protein [Arabidopsis thaliana]
  misc_feature (13)..(229): Homolog of NCBI NO: 8923557 NR Description: chromosome 20 open reading frame 11; two hybrid protein 1 [Homo sapiens] >gi|28201788|sp|Q9NWU2|CT11_HUMAN C20orf11 >gi|7020818|dbj|BAA91285.1| unnamed protein product
  misc_feature (13)..(229): Homolog of NCBI NO: 21594655 NR Description: chromosome 20 open reading frame 11 [Homo sapiens]
  misc_feature (13)..(229): Homolog of NCBI NO: 20863687 NR Description: RIKEN cDNA 2310003C23 [Mus musculus] RIKEN cDNA 2310003C23 [Mus musculus] similar to RIKEN cDNA 2310003C23 [Mus musculus] [Rattus
  misc_feature (13)..(224): Homolog of NCBI NO: 37748055 NR Description: Unknown (protein for MGC:73100) [Danio rerio]
  misc_feature (13)..(224): Homolog of NCBI NO: 24643081 NR Description: CG6617-PA [Drosophila melanogaster]
MNLLLQETPKIVVTSEDWESKLSDVEILIEDMNRLVMNLLVAEGYREAAEKFKEESITMPEEDLASMNERLEVIKAIESRNLEDAIEKLNALNPEIIKTSFHLHQQMLIELIREKKTEEAVAFAQEKLAPLAEENEALQRELEKTVCILVTEGLPNCPSRELFHNSQWIRTASHVNEAIHTSQTGEKGPELERLLKELIWTQNQLDEKTVYVYPRMNDFSTGQLIYRPE

SEQ ID NO: 88848 - protein, 198 aa, Arabidopsis thaliana
  peptide (1)..(198): Ceres Seq. ID no. 12713046
  misc_feature (1)..(198): Homolog of NCBI NO: 30681030 NR Description: expressed protein [Arabidopsis thaliana]
  misc_feature (1)..(189): Homolog of NCBI NO: 7487558 NR Description: hypothetical protein T30A10.60 - Arabidopsis >gi|5881775|emb|CAB55693.1| putative protein [Arabidopsis >gi|7267572|emb|CAB78053.1| putative protein [Arabidopsis
  misc_feature (1)..(193): Homolog of NCBI NO: 15219873 NR Description: hypothetical protein; protein id: At1g61150.1 thaliana] >gi|27808548|gb|AAO24554.1| At1g61150 [Arabidopsis
  misc_feature (1)..(190): Homolog of NCBI NO: 25404311 NR Description: hypothetical protein F11P17.12 [imported] - thaliana >gi|2443886|gb|AAB71479.1| Unknown protein [Arabidopsis
  misc_feature (1)..(193): Homolog of NCBI NO: 26451919 NR Description: unknown protein [Arabidopsis thaliana]
  misc_feature (1)..(198): Homolog of NCBI NO: 8923557 NR Description: chromosome 20 open reading frame 11; two hybrid protein 1 [Homo sapiens] >gi|28201788|sp|Q9NWU2|CT11_HUMAN C20orf11 >gi|7020818|dbj|BAA91285.1| unnamed protein product
  misc_feature (1)..(198): Homolog of NCBI NO: 21594655 NR Description: chromosome 20 open reading frame 11 [Homo sapiens]
  misc_feature (1)..(198): Homolog of NCBI NO: 20863687 NR Description: RIKEN cDNA 2310003C23 [Mus musculus] RIKEN cDNA 2310003C23 [Mus musculus] similar to RIKEN cDNA 2310003C23 [Mus musculus] [Rattus
  misc_feature (1)..(193): Homolog of NCBI NO: 37748055 NR Description: Unknown (protein for MGC:73100) [Danio rerio]
  misc_feature (1)..(193): Homolog of NCBI NO: 24643081 NR Description: CG6617-PA [Drosophila melanogaster]
MNRLVMNLLVAEGYREAAEKFKEESITMPEEDLASMNERLEVIKAIESRNLEDAIEKLNALNPEIIKTSFHLHQQMLIELIREKKTEEAVAFAQEKLAPLAEENEALQRELEKTVCILVTEGLPNCPSRELFHNSQWIRTASHVNEAIHTSQTGEKGPELERLLKELIWTQNQLDEKTVYVYPRMNDFSTGQLIYRPE

SEQ ID NO: 88849 - protein, 193 aa, Arabidopsis thaliana
  peptide (1)..(193): Ceres Seq. ID no. 12713047
  misc_feature (1)..(193): Homolog of NCBI NO: 30681030 NR Description: expressed protein [Arabidopsis thaliana]
  misc_feature (1)..(184): Homolog of NCBI NO: 7487558 NR Description: hypothetical protein T30A10.60 - Arabidopsis >gi|5881775|emb|CAB55693.1| putative protein [Arabidopsis >gi|7267572|emb|CAB78053.1| putative protein [Arabidopsis
  misc_feature (1)..(188): Homolog of NCBI NO: 15219873 NR Description: hypothetical protein; protein id: At1g61150.1 thaliana] >gi|27808548|gb|AAO24554.1| At1g61150 [Arabidopsis
  misc_feature (1)..(185): Homolog of NCBI NO: 25404311 NR Description: hypothetical protein F11P17.12 [imported] - thaliana >gi|2443886|gb|AAB71479.1| Unknown protein [Arabidopsis
  misc_feature (1)..(188): Homolog of NCBI NO: 26451919 NR Description: unknown protein [Arabidopsis thaliana]
  misc_feature (1)..(193): Homolog of NCBI NO: 8923557 NR Description: chromosome 20 open reading frame 11; two hybrid protein 1 [Homo sapiens] >gi|28201788|sp|Q9NWU2|CT11_HUMAN C20orf11 >gi|7020818|dbj|BAA91285.1| unnamed protein product
  misc_feature (1)..(193): Homolog of NCBI NO: 21594655 NR Description: chromosome 20 open reading frame 11 [Homo sapiens]
  misc_feature (1)..(193): Homolog of NCBI NO: 20863687 NR Description: RIKEN cDNA 2310003C23 [Mus musculus] RIKEN cDNA 2310003C23 [Mus musculus] similar to RIKEN cDNA 2310003C23 [Mus musculus] [Rattus
  misc_feature (1)..(188): Homolog of NCBI NO: 37748055 NR Description: Unknown (protein for MGC:73100) [Danio rerio]
  misc_feature (1)..(188): Homolog of NCBI NO: 24643081 NR Description: CG6617-PA [Drosophila melanogaster]
MNLLVAEGYREAAEKFKEESITMPEEDLASMNERLEVIKAIESRNLEDAIEKLNALNPEIIKTSFHLHQQMLIELIREKKTEEAVAFAQEKLAPLAEENEALQRELEKTVCILVTEGLPNCPSRELFHNSQWIRTASHVNEAIHTSQTGEKGPELERLLKELIWTQNQLDEKTVYVYPRMNDFSTGQLIYRPE

SEQ ID NO: 88850 - DNA, 450 bp, Arabidopsis thaliana
  misc_feature (1)..(450): Ceres Seq. ID no. 12713059
  misc_feature: MA Experiment ID: 108434 Result: Up-regulated in Transcription
  misc_feature: MA Experiment 108434 PARAMETER Experiment Name: At_Root_Tips_cDNA_P Parameter: Tissue Value: Root Tips
  misc_feature: MA Experiment ID: 108462 Result: Down-regulated in Transcription
  misc_feature: MA Experiment 108462 PARAMETER Experiment Name: At_Germinating_Seeds_cDNA_P Parameter: Age (day) Value: 2 vs. 0
  misc_feature: MA Experiment 108462 PARAMETER Experiment Name: At_Germinating_Seeds_cDNA_P Parameter: Tissue Value: Germinating Seeds
  misc_feature: MA Experiment ID: 108463 Result: Down-regulated in Transcription
  misc_feature: MA Experiment 108463 PARAMETER Experiment Name: At_Germinating_Seeds_cDNA_P Parameter: Age (day) Value: 3 vs. 0
  misc_feature: MA Experiment 108463 PARAMETER Experiment Name: At_Germinating_Seeds_cDNA_P Parameter: Tissue Value: Germinating Seeds
  misc_feature: MA Experiment ID: 108464 Result: Down-regulated in Transcription
  misc_feature: MA Experiment 108464 PARAMETER Experiment Name: At_Germinating_Seeds_cDNA_P Parameter: Age (day) Value: 4 vs. 0
  misc_feature: MA Experiment 108464 PARAMETER Experiment Name: At_Germinating_Seeds_cDNA_P Parameter: Tissue Value: Germinating Seeds
  misc_feature: MA Experiment ID: 108573 Result: Down-regulated in Transcription
  misc_feature: MA Experiment 108573 PARAMETER Experiment Name: At_Drought_cDNA_P Parameter: Timepoint (hr) Value: 6
  misc_feature: MA Experiment 108573 PARAMETER Experiment Name: At_Drought_cDNA_P Parameter: Tissue Value: Aerial
  misc_feature: MA Experiment 108573 PARAMETER Experiment Name: At_Drought_cDNA_P Parameter: Treatment Value: Drought vs. No Drought
  misc_feature: MA Experiment ID: 108579 Result: Up-regulated in Transcription
  misc_feature: MA Experiment 108579 PARAMETER Experiment Name: At_4deg_Cold_cDNA_P Parameter: Temperature (deg C) Value: 4 vs. 22
  misc_feature: MA Experiment 108579 PARAMETER Experiment Name: At_4deg_Cold_cDNA_P Parameter: Timepoint (hr) Value: 6
  misc_feature: MA Experiment 108579 PARAMETER Experiment Name: At_4deg_Cold_cDNA_P Parameter: Tissue Value: Aerial
  misc_feature: MA Experiment ID: 20000113 Result: Down-regulated in Transcription
  misc_feature: MA Experiment 20000113 PARAMETER Experiment Name: At_42deg_Heat_cDNA_P Parameter: Temperature (deg C) Value: 42 vs. 22
  misc_feature: MA Experiment 20000113 PARAMETER Experiment Name: At_42deg_Heat_cDNA_P Parameter: Timepoint (hr) Value: 8
  misc_feature: MA Experiment 20000113 PARAMETER Experiment Name: At_42deg_Heat_cDNA_P Parameter: Tissue Value: Aerial
atggagcaaacttttattatgatcaagcctgacggcgtccagagaggactcatcggtgaagtcatctgcaggtttgagaagaagggtttcactttgaaaggtctgaagttgatcagtgtagagagatcttttgctgagaagcactacgaagacttatcttcaaagtctttcttcagtggactcgttgactacattgtatccggccctgttgttgctatgatctgggaaggaaagaatgttgtcttgaccggaagaaagatcattggagctaccaacccagcagcttctgagcctggaactatccgtggggactttgctattgacattggcaggaacgtgatccatggtagtgactctgtcgagagtgcaagaaaggagattgctttgtggttccctgatggacctgtcaactggcagagcagcgttcacccttgggtctatgaaacttga

SEQ ID NO: 88851 - protein, 149 aa, Arabidopsis thaliana; identical to SEQ ID NO: 21514
  peptide (1)..(149): Ceres Seq. ID no. 12713060
  misc_feature (2)..(138): Pfam Name: Nucleoside diphosphate kinase Pfam Description: Nucleoside diphosphate kinase
  misc_feature (1)..(149): Homolog of NCBI NO: 730129 NR Description: Nucleoside diphosphate kinase I (NDK I) (NDP
  misc_feature (1)..(149): Homolog of NCBI NO: 18413214 NR Description: nucleoside-diphosphate kinase; protein id:
  misc_feature (3)..(149): Homolog of NCBI NO: 322552 NR Description: nucleoside-diphosphate kinase (EC 2.7.4.6) - thaliana (fragment) >gi|16396|emb|CAA49170.1| nucleoside
  misc_feature (7)..(149): Homolog of NCBI NO: 13899069 NR Description: Unknown protein [Arabidopsis thaliana]
  misc_feature (1)..(148): Homolog of NCBI NO: 19570344 NR Description: nucleoside diphosphate kinase 1 [Brassica rapa]
  misc_feature (2)..(148): Homolog of NCBI NO: 1389640 NR Description: PNDKN1 [Pisum sativum]
  misc_feature (2)..(148): Homolog of NCBI NO: 1346672 NR Description: Nucleoside diphosphate kinase I (NDK I) (NDP
  misc_feature (1)..(149): Homolog of NCBI NO: 322551 NR Description: nucleoside-diphosphate kinase (EC 2.7.4.6) - thaliana >gi|16398|emb|CAA49173.1| nucleoside diphosphate kinase
  misc_feature (1)..(148): Homolog of NCBI NO: 2498076 NR Description: NUCLEOSIDE DIPHOSPHATE KINASE (NDK) (NDP KINASE)

SEQ ID NO: 88852 - protein, 143 aa, Arabidopsis thaliana; identical to SEQ ID NO: 21515
  peptide (1)..(143): Ceres Seq. ID no. 12713061
  misc_feature (1)..(132): Pfam Name: Nucleoside diphosphate kinase Pfam Description: Nucleoside diphosphate kinase
  misc_feature (1)..(143): Homolog of NCBI NO: 730129 NR Description: Nucleoside diphosphate kinase I (NDK I) (NDP
  misc_feature (1)..(143): Homolog of NCBI NO: 18413214 NR Description: nucleoside-diphosphate kinase; protein id:
  misc_feature (1)..(143): Homolog of NCBI NO: 322552 NR Description: nucleoside-diphosphate kinase (EC 2.7.4.6) - thaliana (fragment) >gi|16396|emb|CAA49170.1| nucleoside
  misc_feature (1)..(143): Homolog of NCBI NO: 13899069 NR Description: Unknown protein [Arabidopsis thaliana]
  misc_feature (1)..(142): Homolog of NCBI NO: 19570344 NR Description: nucleoside diphosphate kinase 1 [Brassica rapa]
  misc_feature (1)..(142): Homolog of NCBI NO: 1389640 NR Description: PNDKN1 [Pisum sativum]
  misc_feature (1)..(142): Homolog of NCBI NO: 1346672 NR Description: Nucleoside diphosphate kinase I (NDK I) (NDP
  misc_feature (1)..(143): Homolog of NCBI NO: 322551 NR Description: nucleoside-diphosphate kinase (EC 2.7.4.6) - thaliana >gi|16398|emb|CAA49173.1| nucleoside diphosphate kinase
  misc_feature (1)..(142): Homolog of NCBI NO: 2498076 NR Description: NUCLEOSIDE DIPHOSPHATE KINASE (NDK) (NDP KINASE)

SEQ ID NO: 88853 - protein, 77 aa, Arabidopsis thaliana; identical to SEQ ID NO: 21516
  peptide (1)..(77): Ceres Seq. ID no. 12713062
  misc_feature (1)..(66): Pfam Name: Nucleoside diphosphate kinase Pfam Description: Nucleoside diphosphate kinase
  misc_feature (1)..(77): Homolog of NCBI NO: 730129 NR Description: Nucleoside diphosphate kinase I (NDK I) (NDP
  misc_feature (1)..(77): Homolog of NCBI NO: 18413214 NR Description: nucleoside-diphosphate kinase; protein id:
  misc_feature (1)..(77): Homolog of NCBI NO: 322552 NR Description: nucleoside-diphosphate kinase (EC 2.7.4.6) - thaliana (fragment) >gi|16396|emb|CAA49170.1| nucleoside
  misc_feature (1)..(77): Homolog of NCBI NO: 13899069 NR Description: Unknown protein [Arabidopsis thaliana]
  misc_feature (1)..(76): Homolog of NCBI NO: 19570344 NR Description: nucleoside diphosphate kinase 1 [Brassica rapa]
  misc_feature (1)..(76): Homolog of NCBI NO: 1389640 NR Description: PNDKN1 [Pisum sativum]
  misc_feature (1)..(76): Homolog of NCBI NO: 1346672 NR Description: Nucleoside diphosphate kinase I (NDK I) (NDP
  misc_feature (1)..(77): Homolog of NCBI NO: 322551 NR Description: nucleoside-diphosphate kinase (EC 2.7.4.6) - thaliana >gi|16398|emb|CAA49173.1| nucleoside diphosphate kinase
  misc_feature (1)..(76): Homolog of NCBI NO: 2498076 NR Description: NUCLEOSIDE DIPHOSPHATE KINASE (NDK) (NDP KINASE)

SEQ ID NO: 88854 - DNA, 1227 bp, Arabidopsis thaliana
  misc_feature (1)..(1227): Ceres Seq. ID no. 12713115
  misc_feature: MA Experiment ID: 20000328 Result: Up-regulated in Transcription
  misc_feature: MA Experiment 20000328 PARAMETER Experiment Name: At_42deg_Heat_Sub_P Parameter: Age (day) Value: 14
  misc_feature: MA Experiment 20000328 PARAMETER Experiment Name: At_42deg_Heat_Sub_P Parameter: Organism Value: A. thaliana
  misc_feature: MA Experiment 20000328 PARAMETER Experiment Name: At_42deg_Heat_Sub_P Parameter: Plant Line Value: WS
  misc_feature: MA Experiment 20000328 PARAMETER Experiment Name: At_42deg_Heat_Sub_P Parameter: Temperature (deg C) Value: 42 vs. 22
  misc_feature: MA Experiment 20000328 PARAMETER Experiment Name: At_42deg_Heat_Sub_P Parameter: Timepoint (hr) Value: 6
  misc_feature: MA Experiment 20000328 PARAMETER Experiment Name: At_42deg_Heat_Sub_P Parameter: Tissue Value: Aerial
  misc_feature: MA Experiment ID: 20000347 Result: Up-regulated in Transcription
  misc_feature: MA Experiment 20000347 PARAMETER Experiment Name: At_2mM_SA_Sub_P Parameter: Age (day) Value: 14
  misc_feature: MA Experiment 20000347 PARAMETER Experiment Name: At_2mM_SA_Sub_P Parameter: Organism Value: A. thaliana
  misc_feature: MA Experiment 20000347 PARAMETER Experiment Name: At_2mM_SA_Sub_P Parameter: Plant Line Value: WS
  misc_feature: MA Experiment 20000347 PARAMETER Experiment Name: At_2mM_SA_Sub_P Parameter: Timepoint (hr) Value: 6
  misc_feature: MA Experiment 20000347 PARAMETER Experiment Name: At_2mM_SA_Sub_P Parameter: Tissue Value: Aerial
  misc_feature: MA Experiment 20000347 PARAMETER Experiment Name: At_2mM_SA_Sub_P Parameter: Treatment Value: 2mM SA vs. No Treatment
atgaatctatcgaaccgttttggctccaattccaagacggcgatactcaacgattcttactccgacgagaatcattcttcctccgccgccgccgccgtaacttccgtcgtaatcccaccgtgctccggcaatgtactccgagccgttctcttgctcttcttcatctgcttctgcttctccctctacagaacttctggttatctccgaatcgtctctgactcttcctccaccctctctcgcattttcccctctgtcaacgattcttcttcgtctccgtctccatctccgtctctgtctccggaggaaattgaggaacctaagctagaagaagtattgcgtagagcagcaactaaagatggtacagtgattttgacaactttgaatgaagcttgggcggctccaggatctgtgattgatcttttctttgagagttttagaattggtaaaggaacaagaaggctattgaaacacttggtgatcattgctttggatgctaaagcttattcacgttgtcaagaactgcataagcattgcttcagacttgaaacagaaggtgttgatttctctggtggtgaagcttatttcatgactccttcttacttgacaatgatgtggagacgaatctctttccttcgctctgttcttgaaaagggttacaactttgttttcacggatgctgatgtgatgtggttcaggaacccttttcgacggttttacgaagacggtgatttccagattgcttgtgaccattacataggaaggccgaatgattttaggaatagaccaaatggaggatttacctttgtgagagccaataaccgaagtataggcttctacaagttctggtatgattcaaggaccaagtaccccaaaaaccacgaccaggatgttctaaacttcatcaagacagatcctttcctttggaaactaaggattaggattaggttcttgaacacagtgtattttggtggattctgtgaaccaagcaaagatttgaatcttgtttgtacaatgcatgcgaattgctgctttggtttggatagtaagcttcatgatcttagaatcatgcttcaagactggagagatttcaagtctttaccacttcatagtaaccaatcctctggtttcacctggagcgtcccacagaattgcagtcttgattcacttaggcctgttgattctaaggatgaagaagagagtgaaccaccaggagaatctacacagtga

SEQ ID NO: 88855 - protein, 408 aa, Arabidopsis thaliana
  peptide (1)..(408): Ceres Seq. ID no. 12713116
  misc_feature (1)..(408): Homolog of NCBI NO: 18395292 NR Description: unknown protein; protein id: At2g02060.1
  misc_feature (61)..(406): Homolog of NCBI NO: 15223826 NR Description: hypothetical protein common family; protein id:
  misc_feature (17)..(387): Homolog of NCBI NO: 21536907 NR Description: regulatory protein [Arabidopsis thaliana]
  misc_feature (48)..(386): Homolog of NCBI NO: 38344278 NR Description: OSJNBa0013K16.10 [Oryza sativa (japonica
  misc_feature (45)..(385): Homolog of NCBI NO: 15235236 NR Description: hypothetical protein common family; protein id:
  misc_feature (67)..(389): Homolog of NCBI NO: 23306127 NR Description: Putataive InsB from Escherichia coli [Oryza
  misc_feature (119)..(384): Homolog of NCBI NO: 6063544 NR Description: similar to Arabidopsis thaliana chromosome 2, BAC
  misc_feature (44)..(381): Homolog of NCBI NO: 15235236 NR Description: hypothetical protein common family; protein id:
  misc_feature (73)..(384): Homolog of NCBI NO: 34897442 NR Description: putative regulatory protein [Oryza sativa
  misc_feature (107)..(384): Homolog of NCBI NO: 18414558 NR Description: hypothetical protein common family; protein id:
MNLSNRFGSNSKTAILNDSYSDENHSSSAAAAVTSVVIPPCSGNVLRAVLLLFFICFCFSLYRTSGYLRIVSDSSSTLSRIFPSVNDSSSSPSPSPSLSPEEIEEPKLEEVLRRAATKDGTVILTTLNEAWAAPGSVIDLFFESFRIGKGTRRLLKHLVIIALDAKAYSRCQELHKHCFRLETEGVDFSGGEAYFMTPSYLTMMWRRISFLRSVLEKGYNFVFTDADVMWFRNPFRRFYEDGDFQIACDHYIGRPNDFRNRPNGGFTFVRANNRSIGFYKFWYDSRTKYPKNHDQDVLNFIKTDPFLWKLRIRIRFLNTVYFGGFCEPSKDLNLVCTMHANCCFGLDSKLHDLRIMLQDWRDFKSLPLHSNQSSGFTWSVPQNCSLDSLRPVDSKDEEESEPPGESTQ

SEQ ID NO: 88856 - protein, 213 aa, Arabidopsis thaliana
  peptide (1)..(213): Ceres Seq. ID no. 12713117
  misc_feature (1)..(213): Homolog of NCBI NO: 18395292 NR Description: unknown protein; protein id: At2g02060.1
  misc_feature (1)..(211): Homolog of NCBI NO: 15223826 NR Description: hypothetical protein common family; protein id:
  misc_feature (1)..(192): Homolog of NCBI NO: 21536907 NR Description: regulatory protein [Arabidopsis thaliana]
  misc_feature (1)..(191): Homolog of NCBI NO: 38344278 NR Description: OSJNBa0013K16.10 [Oryza sativa (japonica
  misc_feature (1)..(190): Homolog of NCBI NO: 15235236 NR Description: hypothetical protein common family; protein id:
  misc_feature (1)..(194): Homolog of NCBI NO: 23306127 NR Description: Putataive InsB from Escherichia coli [Oryza
  misc_feature (1)..(189): Homolog of NCBI NO: 6063544 NR Description: similar to Arabidopsis thaliana chromosome 2, BAC
  misc_feature (1)..(186): Homolog of NCBI NO: 15235236 NR Description: hypothetical protein common family; protein id:
  misc_feature (1)..(189): Homolog of NCBI NO: 34897442 NR Description: putative regulatory protein [Oryza sativa
  misc_feature (1)..(189): Homolog of NCBI NO: 18414558 NR Description: hypothetical protein common family; protein id:
MTPSYLTMMWRRISFLRSVLEKGYNFVFTDADVMWFRNPFRRFYEDGDFQIACDHYIGRPNDFRNRPNGGFTFVRANNRSIGFYKFWYDSRTKYPKNHDQDVLNFIKTDPFLWKLRIRIRFLNTVYFGGFCEPSKDLNLVCTMHANCCFGLDSKLHDLRIMLQDWRDFKSLPLHSNQSSGFTWSVPQNCSLDSLRPVDSKDEEESEPPGESTQ

SEQ ID NO: 88857 - protein, 206 aa, Arabidopsis thaliana
  peptide (1)..(206): Ceres Seq. ID no. 12713118
  misc_feature (1)..(206): Homolog of NCBI NO: 18395292 NR Description: unknown protein; protein id: At2g02060.1
  misc_feature (1)..(204): Homolog of NCBI NO: 15223826 NR Description: hypothetical protein common family; protein id:
  misc_feature (1)..(185): Homolog of NCBI NO: 21536907 NR Description: regulatory protein [Arabidopsis thaliana]
  misc_feature (1)..(184): Homolog of NCBI NO: 38344278 NR Description: OSJNBa0013K16.10 [Oryza sativa (japonica
  misc_feature (1)..(183): Homolog of NCBI NO: 15235236 NR Description: hypothetical protein common family; protein id:
  misc_feature (1)..(187): Homolog of NCBI NO: 23306127 NR Description: Putataive InsB from Escherichia coli [Oryza
  misc_feature (1)..(182): Homolog of NCBI NO: 6063544 NR Description: similar to Arabidopsis thaliana chromosome 2, BAC
  misc_feature (1)..(179): Homolog of NCBI NO: 15235236 NR Description: hypothetical protein common family; protein id:
  misc_feature (1)..(182): Homolog of NCBI NO: 34897442 NR Description: putative regulatory protein [Oryza sativa
  misc_feature (1)..(182): Homolog of NCBI NO: 18414558 NR Description: hypothetical protein common family; protein id:
MMWRRISFLRSVLEKGYNFVFTDADVMWFRNPFRRFYEDGDFQIACDHYIGRPNDFRNRPNGGFTFVRANNRSIGFYKFWYDSRTKYPKNHDQDVLNFIKTDPFLWKLRIRIRFLNTVYFGGFCEPSKDLNLVCTMHANCCFGLDSKLHDLRIMLQDWRDFKSLPLHSNQSSGFTWSVPQNCSLDSLRPVDSKDEEESEPPGESTQ

SEQ ID NO: 88858 - DNA, 496 bp, Arabidopsis thaliana
  misc_feature (1)..(496): Ceres Seq. ID no. 12713134
  misc_feature: MA Experiment ID: 108434 Result: Down-regulated in Transcription
  misc_feature: MA Experiment 108434 PARAMETER Experiment Name: At_Root_Tips_cDNA_P Parameter: Tissue Value: Root Tips
  misc_feature: MA Experiment ID: 108463 Result: Up-regulated in Transcription
  misc_feature: MA Experiment 108463 PARAMETER Experiment Name: At_Germinating_Seeds_cDNA_P Parameter: Age (day) Value: 3 vs. 0
  misc_feature: MA Experiment 108463 PARAMETER Experiment Name: At_Germinating_Seeds_cDNA_P Parameter: Tissue Value: Germinating Seeds
  misc_feature: MA Experiment ID: 108464 Result: Up-regulated in Transcription
  misc_feature: MA Experiment 108464 PARAMETER Experiment Name: At_Germinating_Seeds_cDNA_P Parameter: Age (day) Value: 4 vs. 0
  misc_feature: MA Experiment 108464 PARAMETER Experiment Name: At_Germinating_Seeds_cDNA_P Parameter: Tissue Value: Germinating Seeds
  misc_feature: MA Experiment ID: 108579 Result: Up-regulated in Transcription
  misc_feature: MA Experiment 108579 PARAMETER Experiment Name: At_4deg_Cold_cDNA_P Parameter: Temperature (deg C) Value: 4 vs. 22
  misc_feature: MA Experiment 108579 PARAMETER Experiment Name: At_4deg_Cold_cDNA_P Parameter: Timepoint (hr) Value: 6
  misc_feature: MA Experiment 108579 PARAMETER Experiment Name: At_4deg_Cold_cDNA_P Parameter: Tissue Value: Aerial
  misc_feature: MA Experiment ID: 20000087 Result: Up-regulated in Transcription
  misc_feature: MA Experiment 20000087 PARAMETER Experiment Name: At_100uM_ABA_Mutants_cDNA_P Parameter: Plant Line Value: WS
  misc_feature: MA Experiment 20000087 PARAMETER Experiment Name: At_100uM_ABA_Mutants_cDNA_P Parameter: Timepoint (hr) Value: 6
  misc_feature: MA Experiment 20000087 PARAMETER Experiment Name: At_100uM_ABA_Mutants_cDNA_P Parameter: Tissue Value: Aerial
  misc_feature: MA Experiment 20000087 PARAMETER Experiment Name: At_100uM_ABA_Mutants_cDNA_P Parameter: Treatment Value: 100uM ABA vs. No Treatment
  misc_feature: MA Experiment ID: 20000180 Result: Up-regulated in Transcription
  misc_feature: MA Experiment 20000180 PARAMETER Experiment Name: At_Germinating_Seeds_P Parameter: Age (hr) Value: 24 vs. 0
  misc_feature: MA Experiment 20000180 PARAMETER Experiment Name: At_Germinating_Seeds_P Parameter: Tissue Value: Germinating Seeds
  misc_feature: MA Experiment ID: 20000185 Result: Up-regulated in Transcription
  misc_feature: MA Experiment 20000185 PARAMETER Experiment Name: At_Roots__P Parameter: Age (day) Value: 7 vs. 21
  misc_feature: MA Experiment 20000185 PARAMETER Experiment Name: At_Roots__P Parameter: Organism Value: A. thaliana
  misc_feature: MA Experiment 20000185 PARAMETER Experiment Name: At_Roots__P Parameter: Tissue Value: Roots vs. Whole Plant
  misc_feature: MA Experiment ID: 20001560 Result: Up-regulated in Transcription
  misc_feature: MA Experiment 20001560 PARAMETER Experiment Name: At_Drought_Soil_Dry_P Parameter: Age (day) Value: 28
  misc_feature: MA Experiment 20001560 PARAMETER Experiment Name: At_Drought_Soil_Dry_P Parameter: Organism Value: A. thaliana
  misc_feature: MA Experiment 20001560 PARAMETER Experiment Name: At_Drought_Soil_Dry_P Parameter: Plant Line Value: WS
  misc_feature: MA Experiment 20001560 PARAMETER Experiment Name: At_Drought_Soil_Dry_P Parameter: Post Timepoint (hr) Value: None
  misc_feature: MA Experiment 20001560 PARAMETER Experiment Name: At_Drought_Soil_Dry_P Parameter: Post-Treatment Value: None
  misc_feature: MA Experiment 20001560 PARAMETER Experiment Name: At_Drought_Soil_Dry_P Parameter: Timepoint (day) Value: 14
  misc_feature: MA Experiment 20001560 PARAMETER Experiment Name: At_Drought_Soil_Dry_P Parameter: Treatment Value: Drought vs. No Drought
  misc_feature: MA Experiment ID: 20001904 Result: Up-regulated in Transcription
  misc_feature: MA Experiment 20001904 PARAMETER Experiment Name: At_Drought_Reproduction_P Parameter: Age (day) Value: 37
  misc_feature: MA Experiment 20001904 PARAMETER Experiment Name: At_Drought_Reproduction_P Parameter: Organism Value: A. thaliana
  misc_feature: MA Experiment 20001904 PARAMETER Experiment Name: At_Drought_Reproduction_P Parameter: Plant Line Value: WS
  misc_feature: MA Experiment 20001904 PARAMETER Experiment Name: At_Drought_Reproduction_P Parameter: Timepoint (day) Value: 7
  misc_feature: MA Experiment 20001904 PARAMETER Experiment Name: At_Drought_Reproduction_P Parameter: Tissue Value: Rosettes
  misc_feature: MA Experiment 20001904 PARAMETER Experiment Name: At_Drought_Reproduction_P Parameter: Treatment Value: Drought vs. No Drought
acagtctgcacacttatcacttctttcgaaatctctctctatccctctcaaaaatgaagctctctgtgcgttttatctccgctgctcttctcttgttcatggtattcattgccacagggatgggtccagtcaccgtggaggcacgcacgtgtgagtcaaaaagccataggttcaagggtccatgtgtgagcacacacaactgtgcaaacgtgtgccacaacgaaggcttcggcggaggtaaatgccgtggattccgtcgtcgttgctactgcacaagacactgctgatccatccattctcatgactcaaatcttcgatccatcgtcagtgtgttacttctttcttatctaaatcttccgtacggtaccatgtcgtaccgtacatgagtgttttctcgaataagtcattggtttgtgtgtttccggttttaatgtaatgttaaatcaattaatggcttttaatatattgtattatggatctcaatctaaaagttttt

SEQ ID NO: 88859 - protein, 94 aa, Arabidopsis thaliana
  peptide (1)..(94): Ceres Seq. ID no. 12713135
  misc_feature (48)..(94): Pfam Name: Gamma-thionins family Pfam Description: Gamma-thionins family
  misc_feature (18)..(94): Homolog of NCBI NO: 15226878 NR Description: plant defensin protein, putative (PDF2.3); id: At2g02130.1, supported by cDNA: gi_15293090, supported by
  misc_feature (18)..(94): Homolog of NCBI NO: 7488534 NR Description: proteinase inhibitor II - turnip
  misc_feature (18)..(94): Homolog of NCBI NO: 15226872 NR Description: plant defensin protein, putative (PDF2.2); id: At2g02100.1, supported by cDNA: gi_13878184 [Arabidopsis
  misc_feature (18)..(94): Homolog of NCBI NO: 15226876 NR Description: plant defensin protein, putative (PDF2.1);
  misc_feature (18)..(94): Homolog of NCBI NO: 21553559 NR Description: protease inhibitor II [Arabidopsis thaliana]
  misc_feature (18)..(94): Homolog of NCBI NO: 22330359 NR Description: plant defensin protein, putative (PDF2.4);
  misc_feature (18)..(94): Homolog of NCBI NO: 11387188 NR Description: Flower-specific gamma-thionin precursor (Defensin >gi|7672659|gb|AAF66591.1|AF141131_1 defensin [Helianthus annuus]
  misc_feature (18)..(94): Homolog of NCBI NO: 28624546 NR Description: defensin protein 1 [Prunus persica]
  misc_feature (18)..(94): Homolog of NCBI NO: 16225423 NR Description: putative gamma-thionin [Castanea sativa]
  misc_feature (18)..(94): Homolog of NCBI NO: 17066707 NR Description: defensin protein precursor [Capsicum annuum]
SLHTYHFFRNLSLSLSKMKLSVRFISAALLLFMVFIATGMGPVTVEARTCESKSHRFKGPCVSTHNCANVCHNEGFGGGKCRGFRRRCYCTRHC

SEQ ID NO: 88860 - protein, 77 aa, Arabidopsis thaliana; identical to SEQ ID NO: 25733
  peptide (1)..(77): Ceres Seq. ID no. 12713136
  misc_feature (31)..(77): Pfam Name: Gamma-thionins family Pfam Description: Gamma-thionins family
  misc_feature (1)..(77): Homolog of NCBI NO: 15226878 NR Description: plant defensin protein, putative (PDF2.3); id: At2g02130.1, supported by cDNA: gi_15293090, supported by
  misc_feature (1)..(77): Homolog of NCBI NO: 7488534 NR Description: proteinase inhibitor II - turnip
  misc_feature (1)..(77): Homolog of NCBI NO: 15226872 NR Description: plant defensin protein, putative (PDF2.2); id: At2g02100.1, supported by cDNA: gi_13878184 [Arabidopsis
  misc_feature (1)..(77): Homolog of NCBI NO: 15226876 NR Description: plant defensin protein, putative (PDF2.1);
  misc_feature (1)..(77): Homolog of NCBI NO: 21553559 NR Description: protease inhibitor II [Arabidopsis thaliana]
  misc_feature (1)..(77): Homolog of NCBI NO: 22330359 NR Description: plant defensin protein, putative (PDF2.4);
  misc_feature (1)..(77): Homolog of NCBI NO: 11387188 NR Description: Flower-specific gamma-thionin precursor (Defensin >gi|7672659|gb|AAF66591.1|AF141131_1 defensin [Helianthus annuus]
  misc_feature (1)..(77): Homolog of NCBI NO: 28624546 NR Description: defensin protein 1 [Prunus persica]
  misc_feature (1)..(77): Homolog of NCBI NO: 16225423 NR Description: putative gamma-thionin [Castanea sativa]
  misc_feature (1)..(77): Homolog of NCBI NO: 17066707 NR Description: defensin protein precursor [Capsicum annuum]

SEQ ID NO: 88861 - protein, 62 aa, Arabidopsis thaliana; identical to SEQ ID NO: 25734
  peptide (1)..(62): Ceres Seq. ID no. 12713137
  misc_feature (16)..(62): Pfam Name: Gamma-thionins family Pfam Description: Gamma-thionins family
  misc_feature (1)..(62): Homolog of NCBI NO: 15226878 NR Description: plant defensin protein, putative (PDF2.3); id: At2g02130.1, supported by cDNA: gi_15293090, supported by
  misc_feature (1)..(62): Homolog of NCBI NO: 7488534 NR Description: proteinase inhibitor II - turnip
  misc_feature (1)..(62): Homolog of NCBI NO: 15226872 NR Description: plant defensin protein, putative (PDF2.2); id: At2g02100.1, supported by cDNA: gi_13878184 [Arabidopsis
  misc_feature (1)..(62): Homolog of NCBI NO: 15226876 NR Description: plant defensin protein, putative (PDF2.1);
  misc_feature (1)..(62): Homolog of NCBI NO: 21553559 NR Description: protease inhibitor II [Arabidopsis thaliana]
  misc_feature (1)..(62): Homolog of NCBI NO: 22330359 NR Description: plant defensin protein, putative (PDF2.4);
  misc_feature (1)..(62): Homolog of NCBI NO: 11387188 NR Description: Flower-specific gamma-thionin precursor (Defensin >gi|7672659|gb|AAF66591.1|AF141131_1 defensin [Helianthus annuus]
  misc_feature (1)..(62): Homolog of NCBI NO: 28624546 NR Description: defensin protein 1 [Prunus persica]
  misc_feature (1)..(62): Homolog of NCBI NO: 16225423 NR Description: putative gamma-thionin [Castanea sativa]
  misc_feature (1)..(62): Homolog of NCBI NO: 17066707 NR Description: defensin protein precursor [Capsicum annuum]

SEQ ID NO: 88862 - protein, 50 aa, Arabidopsis thaliana
  peptide (1)..(50): Ceres Seq. ID no. 12713138
QSAHLSLLSKSLSIPLKNEALCAFYLRCSSLVHGIHCHRDGSSHRGGTHV

SEQ ID NO: 88863 - DNA, 2016 bp, Arabidopsis thaliana
  misc_feature (1)..(2016): Ceres Seq. ID no. 12713178
  misc_feature: MA Experiment ID: 20000314 Result: Up-regulated in Transcription
  misc_feature: MA Experiment 20000314 PARAMETER Experiment Name: At_14day_Shoots-Roots_Sub_P Parameter: Age (day) Value: 14
  misc_feature: MA Experiment 20000314 PARAMETER Experiment Name: At_14day_Shoots-Roots_Sub_P Parameter: Organism Value: A. thaliana
  misc_feature: MA Experiment 20000314 PARAMETER Experiment Name: At_14day_Shoots-Roots_Sub_P Parameter: Plant Line Value: WS
  misc_feature: MA Experiment 20000314 PARAMETER Experiment Name: At_14day_Shoots-Roots_Sub_P Parameter: Tissue Value: Roots vs. Whole Plant
  misc_feature: MA Experiment ID: 20000355 Result: Up-regulated in Transcription
  misc_feature: MA Experiment 20000355 PARAMETER Experiment Name: At_Siliques_Sub_P Parameter: Age (day) Value: 21
  misc_feature: MA Experiment 20000355 PARAMETER Experiment Name: At_Siliques_Sub_P Parameter: Organism Value: A. thaliana
  misc_feature: MA Experiment 20000355 PARAMETER Experiment Name: At_Siliques_Sub_P Parameter: Plant Line Value: WS
  misc_feature: MA Experiment 20000355 PARAMETER Experiment Name: At_Siliques_Sub_P Parameter: Tissue Value: Less Than 5mm Siliques vs. Whole Plant
  misc_feature: MA Experiment ID: 20000440 Result: Up-regulated in Transcription
  misc_feature: MA Experiment 20000440 PARAMETER Experiment Name: At_Closed-Flower__Sub_P Parameter: Tissue Value: Closed Flower vs. Whole Plant
  misc_feature: MA Experiment ID: 20001806 Result: Up-regulated in Transcription
  misc_feature: MA Experiment 20001806 PARAMETER Experiment Name: At_50mM_NH4NO3_L-to-H_Sub_P Parameter: Timepoint (hr) Value: 4
  misc_feature: MA Experiment 20001806 PARAMETER Experiment Name: At_50mM_NH4NO3_L-to-H_Sub_P Parameter: Tissue Value: Leaf
  misc_feature: MA Experiment 20001806 PARAMETER Experiment Name: At_50mM_NH4NO3_L-to-H_Sub_P Parameter: Treatment Value: 50mM NH4NO3 vs 100mM Mannitol
atgattccactctcgtttgcagcattaggagacatagttgataagaagcttgatgaggattatgtaaaggaagaagttgaaatgatgatacaagtatctctgctatccacacaagcagcaccgggagaacgaccaacgatgtcggaagttgaaatttttagaaactcctgcttgtgctacataaactggttttgcaacatcatctccataatatattctaacagtttgcttttgaggattgattcaggatcatcatctatatctgttgtcttcttagtttttactctgtctcggatggagcaacgacggatgttaacggcggctagaccacgtttgtcctcgacgatccgtacgattacgtctcacgtggcgttctcagcaagccgtctcttgaaaccttatgttgcatatcggcttggattggaggacgcgaatcagaggaaaacagagaacgaatccaccggtggagataaagaaatcgccaattcgctcctccactgtcttaaatttcactatcttcttcttcattttccttccttctcacttcaaatccataatcgctctacttctctctctctctctagattcgaaaaaatggcgaaactggtgatgttgttggttctctgtatcttaccggcgatagccatggcggcaaggaggggaaatattggaaagaatacaatggtggttcaaggtagcacctactgtgacatttgcaaattcggcttcgagactcctgaatcctcctacttcatccccggtgcaacggtgaagctatcatgcaaagacaggaagacaatggaagaggtttacacagacaaagctgtatcagacaaagaaggaaagtataagttcattgtccacgacgatcacagagaccagatgtgcgatgttttgcttgtgaaaagctcggataaaacctgctctaaaatctccgttggacgtgagaagtctcgtgtgatcttgaaccattacagtggcattgcctcgcagatcagacatgctaacaacatgggatttgagaaagaagtgagaatggctacttctacgactatgtctcatcaagcgattgggtctgttgtctctcaaagaccattcaaagcttctcagtttctaaaggagcctttgaataatgtaccaatgaaattcagacaaaaaagattcaagattgaagcaactgcttctcagatatctgtcgttgacaacactttcttgtctccgtctccttccaagaacaaaccacatgaatctaagaagaaatcaaatgaagcagctttgatattgattaggcatggagaatcgttatggaatgagaagaatttgttcacgggttgtgttgatgtgccattgactcagaaaggtgttggagaagctattgaagctgggaagaagattagtaacattcctgtagatttgattttcacttcttctttaatccgtgctcagatgactgcaatgcttgccatgactcagcatcgtcgcaagaaggttccaatcatcttgcacaacgagagtgtaaaggcgaaaacttggagtcatgttttcagcgaagaaactagaaaacaatctatcccggttatagcggcttggtatggagagttgcagggtttgaacaagaaagaaacagcggaaagatacgggacacaacaagttcacgaatggcgcaggagttacgaaattcctcctccgaaaggcgagagcttggagatgtgtgctgagagagcagtggcttattttgaagacaatatcaaaccagagcttgcatctggaaacaatgtaatgattgctgctcacgggaactcattgagatctatcattatgtatcttgacgatttaacttctcaggaggttacaactctagacctgtccacaggtgtaccattgctctacatcttcaaagaaggcaagttcatgaaacgaggaagccccgtcggttctactgaagctggtgtctatgcttatacaaagagattggcacaatacagagagaagcttgatgcggcggcgaccatttaa

SEQ ID NO: 88864 - protein, 671 aa, Arabidopsis thaliana
  peptide (1)..(671): Ceres Seq. ID no. 12713179
  misc_feature (424)..(640): Pfam Name: Phosphoglycerate mutase family Pfam Description: Phosphoglycerate mutase family
  misc_feature (346)..(666): Homolog of NCBI NO: 18395083 NR Description: expressed protein; protein id: At1g22170.1, by cDNA: 33490. [Arabidopsis thaliana] >gi|25511655|pir||C86354
  misc_feature (346)..(666): Homolog of NCBI NO: 21618275 NR Description: unknown [Arabidopsis thaliana]
  misc_feature (346)..(666): Homolog of NCBI NO: 21539557 NR Description: unknown protein [Arabidopsis thaliana]
  misc_feature (483)..(671): Homolog of NCBI NO: 15218201 NR Description: phosphoglycerate mutase, putative; protein id: [Arabidopsis thaliana] >gi|26451923|dbj|BAC43054.1| unknown [Arabidopsis thaliana] >gi|28372948|gb|AAO39956.1| At1g78050
  misc_feature (199)..(344): Homolog of NCBI NO: 15218200 NR Description: allergen, putative; protein id: At1g78040.1, by cDNA: 22488. [Arabidopsis thaliana] allergen, putative [Arabidopsis thaliana]
  misc_feature (199)..(344): Homolog of NCBI NO: 24417468 NR Description: unknown [Arabidopsis thaliana]
  misc_feature (424)..(639): Homolog of NCBI NO: 15618772 NR Description: Phosphoglycerate Mutase [Chlamydophila pneumoniae >gi|16752176|ref|NP_445543.1| phosphoglycerate mutase
  misc_feature (424)..(639): Homolog of NCBI NO: 15836396 NR Description: phosphoglycerate mutase [Chlamydophila pneumoniae
  misc_feature (424)..(645): Homolog of NCBI NO: 29840659 NR Description: phosphoglycerate mutase [Chlamydophila caviae >gi|29835009|gb|AAP05643.1| phosphoglycerate mutase
  misc_feature (426)..(645): Homolog of NCBI NO: 15834720 NR Description: phosphoglycerate mutase [Chlamydia muridarum]
MIPLSFAALGDIVDKKLDEDYVKEEVEMMIQVSLLSTQAAPGERPTMSEVEIFRNSCLCYINWFCNIISIIYSNSLLLRIDSGSSSISVVFLVFTLSRMEQRRMLTAARPRLSSTIRTITSHVAFSASRLLKPYVAYRLGLEDANQRKTENESTGGDKEIANSLLHCLKFHYLLLHFPSFSLQIHNRSTSLSLSRFEKMAKLVMLLVLCILPAIAMAARRGNIGKNTMVVQGSTYCDICKFGFETPESSYFIPGATVKLSCKDRKTMEEVYTDKAVSDKEGKYKFIVHDDHRDQMCDVLLVKSSDKTCSKISVGREKSRVILNHYSGIASQIRHANNMGFEKEVRMATSTTMSHQAIGSVVSQRPFKASQFLKEPLNNVPMKFRQKRFKIEATASQISVVDNTFLSPSPSKNKPHESKKKSNEAALILIRHGESLWNEKNLFTGCVDVPLTQKGVGEAIEAGKKISNIPVDLIFTSSLIRAQMTAMLAMTQHRRKKVPIILHNESVKAKTWSHVFSEETRKQSIPVIAAWYGELQGLNKKETAERYGTQQVHEWRRSYEIPPPKGESLEMCAERAVAYFEDNIKPELASGNNVMIAAHGNSLRSIIMYLDDLTSQEVTTLDLSTGVPLLYIFKEGKFMKRGSPVGSTEAGVYAYTKRLAQYREKLDAAATI

SEQ ID NO: 88865 - protein, 644 aa, Arabidopsis thaliana
  peptide (1)..(644): Ceres Seq. ID no. 12713180
  misc_feature (397)..(613): Pfam Name: Phosphoglycerate mutase family Pfam Description: Phosphoglycerate mutase family
  misc_feature (319)..(639): Homolog of NCBI NO: 18395083 NR Description: expressed protein; protein id: At1g22170.1, by cDNA: 33490. [Arabidopsis thaliana] >gi|25511655|pir||C86354
  misc_feature (319)..(639): Homolog of NCBI NO: 21618275 NR Description: unknown [Arabidopsis thaliana]
  misc_feature (319)..(639): Homolog of NCBI NO: 21539557 NR Description: unknown protein [Arabidopsis thaliana]
  misc_feature (456)..(644): Homolog of NCBI NO: 15218201 NR Description: phosphoglycerate mutase, putative; protein id: [Arabidopsis thaliana] >gi|26451923|dbj|BAC43054.1| unknown [Arabidopsis thaliana] >gi|28372948|gb|AAO39956.1| At1g78050
  misc_feature (172)..(317): Homolog of NCBI NO: 15218200 NR Description: allergen, putative; protein id: At1g78040.1, by cDNA: 22488. [Arabidopsis thaliana] allergen, putative [Arabidopsis thaliana]
  misc_feature (172)..(317): Homolog of NCBI NO: 24417468 NR Description: unknown [Arabidopsis thaliana]
  misc_feature (397)..(612): Homolog of NCBI NO: 15618772 NR Description: Phosphoglycerate Mutase [Chlamydophila pneumoniae >gi|16752176|ref|NP_445543.1| phosphoglycerate mutase
  misc_feature (397)..(612): Homolog of NCBI NO: 15836396 NR Description: phosphoglycerate mutase [Chlamydophila pneumoniae
  misc_feature (397)..(618): Homolog of NCBI NO: 29840659 NR Description: phosphoglycerate mutase [Chlamydophila caviae >gi|29835009|gb|AAP05643.1| phosphoglycerate mutase
  misc_feature (399)..(618): Homolog of NCBI NO: 15834720 NR Description: phosphoglycerate mutase [Chlamydia muridarum]
MMIQVSLLSTQAAPGERPTMSEVEIFRNSCLCYINWFCNIISIIYSNSLLLRIDSGSSSISVVFLVFTLSRMEQRRMLTAARPRLSSTIRTITSHVAFSASRLLKPYVAYRLGLEDANQRKTENESTGGDKEIANSLLHCLKFHYLLLHFPSFSLQIHNRSTSLSLSRFEKMAKLVMLLVLCILPAIAMAARRGNIGKNTMVVQGSTYCDICKFGFETPESSYFIPGATVKLSCKDRKTMEEVYTDKAVSDKEGKYKFIVHDDHRDQMCDVLLVKSSDKTCSKISVGREKSRVILNHYSGIASQIRHANNMGFEKEVRMATSTTMSHQAIGSVVSQRPFKASQFLKEPLNNVPMKFRQKRFKIEATASQISVVDNTFLSPSPSKNKPHESKKKSNEAALILIRHGESLWNEKNLFTGCVDVPLTQKGVGEAIEAGKKISNIPVDLIFTSSLIRAQMTAMLAMTQHRRKKVPIILHNESVKAKTWSHVFSEETRKQSIPVIAAWYGELQGLNKKETAERYGTQQVHEWRRSYEIPPPKGESLEMCAERAVAYFEDNIKPELASGNNVMIAAHGNSLRSIIMYLDDLTSQEVTTLDLSTGVPLLYIFKEGKFMKRGSPVGSTEAGVYAYTKRLAQYREKLDAAATI

SEQ ID NO: 88866 - protein, 643 aa, Arabidopsis thaliana
  peptide (1)..(643): Ceres Seq. ID no. 12713181
  misc_feature (396)..(612): Pfam Name: Phosphoglycerate mutase family Pfam Description: Phosphoglycerate mutase family
  misc_feature (318)..(638): Homolog of NCBI NO: 18395083 NR Description: expressed protein; protein id: At1g22170.1, by cDNA: 33490. [Arabidopsis thaliana] >gi|25511655|pir||C86354
  misc_feature (318)..(638): Homolog of NCBI NO: 21618275 NR Description: unknown [Arabidopsis thaliana]
  misc_feature (318)..(638): Homolog of NCBI NO: 21539557 NR Description: unknown protein [Arabidopsis thaliana]
  misc_feature (455)..(643): Homolog of NCBI NO: 15218201 NR Description: phosphoglycerate mutase, putative; protein id: [Arabidopsis thaliana] >gi|26451923|dbj|BAC43054.1| unknown [Arabidopsis thaliana] >gi|28372948|gb|AAO39956.1| At1g78050
  misc_feature (171)..(316): Homolog of NCBI NO: 15218200 NR Description: allergen, putative; protein id: At1g78040.1, by cDNA: 22488. [Arabidopsis thaliana] allergen, putative [Arabidopsis thaliana]
  misc_feature (171)..(316): Homolog of NCBI NO: 24417468 NR Description: unknown [Arabidopsis thaliana]
  misc_feature (396)..(611): Homolog of NCBI NO: 15618772 NR Description: Phosphoglycerate Mutase [Chlamydophila pneumoniae >gi|16752176|ref|NP_445543.1| phosphoglycerate mutase
  misc_feature (396)..(611): Homolog of NCBI NO: 15836396 NR Description: phosphoglycerate mutase [Chlamydophila pneumoniae
  misc_feature (396)..(617): Homolog of NCBI NO: 29840659 NR Description: phosphoglycerate mutase [Chlamydophila caviae >gi|29835009|gb|AAP05643.1| phosphoglycerate mutase
  misc_feature (398)..(617): Homolog of NCBI NO: 15834720 NR Description: phosphoglycerate mutase [Chlamydia muridarum]
MIQVSLLSTQAAPGERPTMSEVEIFRNSCLCYINWFCNIISIIYSNSLLLRIDSGSSSISVVFLVFTLSRMEQRRMLTAARPRLSSTIRTITSHVAFSASRLLKPYVAYRLGLEDANQRKTENESTGGDKEIANSLLHCLKFHYLLLHFPSFSLQIHNRSTSLSLSRFEKMAKLVMLLVLCILPAIAMAARRGNIGKNTMVVQGSTYCDICKFGFETPESSYFIPGATVKLSCKDRKTMEEVYTDKAVSDKEGKYKFIVHDDHRDQMCDVLLVKSSDKTCSKISVGREKSRVILNHYSGIASQIRHANNMGFEKEVRMATSTTMSHQAIGSVVSQRPFKASQFLKEPLNNVPMKFRQKRFKIEATASQISVVDNTFLSPSPSKNKPHESKKKSNEAALILIRHGESLWNEKNLFTGCVDVPLTQKGVGEAIEAGKKISNIPVDLIFTSSLIRAQMTAMLAMTQHRRKKVPIILHNESVKAKTWSHVFSEETRKQSIPVIAAWYGELQGLNKKETAERYGTQQVHEWRRSYEIPPPKGESLEMCAERAVAYFEDNIKPELASGNNVMIAAHGNSLRSIIMYLDDLTSQEVTTLDLSTGVPLLYIFKEGKFMKRGSPVGSTEAGVYAYTKRLAQYREKLDAAATI

SEQ ID NO: 88867 - DNA, 890 bp, Arabidopsis thaliana
  misc_feature (1)..(890): Ceres Seq. ID no. 12713249
  misc_feature: MA Experiment ID: 108434 Result: Down-regulated in Transcription
  misc_feature: MA Experiment 108434 PARAMETER Experiment Name: At_Root_Tips_cDNA_P Parameter: Tissue Value: Root Tips
  misc_feature: MA Experiment ID: 108461 Result: Up-regulated in Transcription
  misc_feature: MA Experiment 108461 PARAMETER Experiment Name: At_Germinating_Seeds_cDNA_P Parameter: Age (day) Value: 1 vs. 0
  misc_feature: MA Experiment 108461 PARAMETER Experiment Name: At_Germinating_Seeds_cDNA_P Parameter: Tissue Value: Germinating Seeds
  misc_feature: MA Experiment ID: 108462 Result: Up-regulated in Transcription
  misc_feature: MA Experiment 108462 PARAMETER Experiment Name: At_Germinating_Seeds_cDNA_P Parameter: Age (day) Value: 2 vs. 0
  misc_feature: MA Experiment 108462 PARAMETER Experiment Name: At_Germinating_Seeds_cDNA_P Parameter: Tissue Value: Germinating Seeds
  misc_feature: MA Experiment ID: 108469 Result: Down-regulated in Transcription
  misc_feature: MA Experiment ID: 108474 Result: Up-regulated in Transcription
  misc_feature: MA Experiment 108474 PARAMETER Experiment Name: At_Drought_Flowers_cDNA_P Parameter: Timepoint (hr) Value: null
  misc_feature: MA Experiment 108474 PARAMETER Experiment Name: At_Drought_Flowers_cDNA_P Parameter: Treatment Value: Drought vs. No Drought
  misc_feature: MA Experiment ID: 108573 Result: Down-regulated in Transcription
  misc_feature: MA Experiment 108573 PARAMETER Experiment Name: At_Drought_cDNA_P Parameter: Timepoint (hr) Value: 6
  misc_feature: MA Experiment 108573 PARAMETER Experiment Name: At_Drought_cDNA_P Parameter: Tissue Value: Aerial
  misc_feature: MA Experiment 108573 PARAMETER Experiment Name: At_Drought_cDNA_P Parameter: Treatment Value: Drought vs. No Drought
  misc_feature: MA Experiment ID: 108579 Result: Up-regulated in Transcription
  misc_feature: MA Experiment 108579 PARAMETER Experiment Name: At_4deg_Cold_cDNA_P Parameter: Temperature (deg C) Value: 4 vs. 22
  misc_feature: MA Experiment 108579 PARAMETER Experiment Name: At_4deg_Cold_cDNA_P Parameter: Timepoint (hr) Value: 6
  misc_feature: MA Experiment 108579 PARAMETER Experiment Name: At_4deg_Cold_cDNA_P Parameter: Tissue Value: Aerial
  misc_feature: MA Experiment ID: 108595 Result: Down-regulated in Transcription
  misc_feature: MA Experiment 108595 PARAMETER Experiment Name: At_Ler-pi_Ovule_cDNA_P Parameter: Plant Line Value: null
  misc_feature: MA Experiment ID: 108668 Result: Down-regulated in Transcription
  misc_feature: MA Experiment 108668 PARAMETER Experiment Name: At_2mM_SA_cDNA_P Parameter: Plant Line Value: WS
  misc_feature: MA Experiment 108668 PARAMETER Experiment Name: At_2mM_SA_cDNA_P Parameter: Timepoint (hr) Value: 6
  misc_feature: MA Experiment 108668 PARAMETER Experiment Name: At_2mM_SA_cDNA_P Parameter: Treatment Value: 2mM SA vs. No Treatment
  misc_feature: MA Experiment ID: 20000071 Result: Down-regulated in Transcription
  misc_feature: MA Experiment 20000071 PARAMETER Experiment Name: At_100uM_ABA_Mutants_cDNA_P Parameter: Plant Line Value: CS8104
  misc_feature: MA Experiment 20000071 PARAMETER Experiment Name: At_100uM_ABA_Mutants_cDNA_P Parameter: Timepoint (hr) Value: 6
  misc_feature: MA Experiment 20000071 PARAMETER Experiment Name: At_100uM_ABA_Mutants_cDNA_P Parameter: Tissue Value: Aerial
  misc_feature: MA Experiment 20000071 PARAMETER Experiment Name: At_100uM_ABA_Mutants_cDNA_P Parameter: Treatment Value: 100uM ABA vs. No Treatment
  misc_feature: MA Experiment ID: 20000090 Result: Down-regulated in Transcription
  misc_feature: MA Experiment ID: 20000111 Result: Down-regulated in Transcription
  misc_feature: MA Experiment 20000111 PARAMETER Experiment Name: At_42deg_Heat_cDNA_P Parameter: Temperature (deg C) Value: 42 vs. 22
  misc_feature: MA Experiment 20000111 PARAMETER Experiment Name: At_42deg_Heat_cDNA_P Parameter: Timepoint (hr) Value: 6
  misc_feature: MA Experiment 20000111 PARAMETER Experiment Name: At_42deg_Heat_cDNA_P Parameter: Tissue Value: Aerial
  misc_feature: MA Experiment ID: 20000113 Result: Down-regulated in Transcription
  misc_feature: MA Experiment 20000113 PARAMETER Experiment Name: At_42deg_Heat_cDNA_P Parameter: Temperature (deg C) Value: 42 vs. 22
  misc_feature: MA Experiment 20000113 PARAMETER Experiment Name: At_42deg_Heat_cDNA_P Parameter: Timepoint (hr) Value: 8
  misc_feature: MA Experiment 20000113 PARAMETER Experiment Name: At_42deg_Heat_cDNA_P Parameter: Tissue Value: Aerial
  misc_feature: MA Experiment ID: 20000117 Result: Down-regulated in Transcription
  misc_feature: MA Experiment 20000117 PARAMETER Experiment Name: At_100uM_ABA_Mutants_cDNA_P Parameter: Plant Line Value: Columbia
  misc_feature: MA Experiment 20000117 PARAMETER Experiment Name: At_100uM_ABA_Mutants_cDNA_P Parameter: Timepoint (hr) Value: 6
  misc_feature: MA Experiment 20000117 PARAMETER Experiment Name: At_100uM_ABA_Mutants_cDNA_P Parameter: Tissue Value: Aerial
  misc_feature: MA Experiment 20000117 PARAMETER Experiment Name: At_100uM_ABA_Mutants_cDNA_P Parameter: Treatment Value: 100uM ABA vs. No Treatment
  misc_feature: MA Experiment ID: 20000180 Result: Up-regulated in Transcription
  misc_feature: MA Experiment 20000180 PARAMETER Experiment Name: At_Germinating_Seeds_P Parameter: Age (hr) Value: 24 vs. 0
  misc_feature: MA Experiment 20000180 PARAMETER Experiment Name: At_Germinating_Seeds_P Parameter: Tissue Value: Germinating Seeds
  misc_feature: MA Experiment ID: 20000182 Result: Down-regulated in Transcription
  misc_feature: MA Experiment 20000182 PARAMETER Experiment Name: At_2mM_SA_P Parameter: Age (day) Value: 14
  misc_feature: MA Experiment 20000182 PARAMETER Experiment Name: At_2mM_SA_P Parameter: Organism Value: A. thaliana
  misc_feature: MA Experiment 20000182 PARAMETER Experiment Name: At_2mM_SA_P Parameter: Plant Line Value: WS
  misc_feature: MA Experiment 20000182 PARAMETER Experiment Name: At_2mM_SA_P Parameter: Timepoint (hr) Value: 6
  misc_feature: MA Experiment 20000182 PARAMETER Experiment Name: At_2mM_SA_P Parameter: Tissue Value: Aerial
  misc_feature: MA Experiment 20000182 PARAMETER Experiment Name: At_2mM_SA_P Parameter: Treatment Value: 2mM SA vs. No Treatment
  misc_feature: MA Experiment ID: 20000227 Result: Down-regulated in Transcription
  misc_feature: MA Experiment 20000227 PARAMETER Experiment Name: At_Root-Tips-vs-Tops_P Parameter: Tissue Value: Root Tips vs. Root Tops
  misc_feature: MA Experiment ID: 20000234 Result: Down-regulated in Transcription
  misc_feature: MA Experiment 20000234 PARAMETER Experiment Name: At_Siliques_P Parameter: Age (day) Value: 21
  misc_feature: MA Experiment 20000234 PARAMETER Experiment Name: At_Siliques_P Parameter: Organism Value: A. thaliana
  misc_feature: MA Experiment 20000234 PARAMETER Experiment Name: At_Siliques_P Parameter: Plant Line Value: WS
  misc_feature: MA Experiment 20000234 PARAMETER Experiment Name: At_Siliques_P Parameter: Tissue Value: Less Than 5mm Siliques vs. Whole Plant
  misc_feature: MA Experiment ID: 20000235 Result: Down-regulated in Transcription
  misc_feature: MA Experiment 20000235 PARAMETER Experiment Name: At_Siliques_P Parameter: Age (day) Value: 21
  misc_feature: MA Experiment 20000235 PARAMETER Experiment Name: At_Siliques_P Parameter: Organism Value: A. thaliana
  misc_feature: MA Experiment 20000235 PARAMETER Experiment Name: At_Siliques_P Parameter: Plant Line Value: WS
  misc_feature: MA Experiment 20000235 PARAMETER Experiment Name: At_Siliques_P Parameter: Tissue Value: 5-10mm Siliques vs. Whole Plant
  misc_feature: MA Experiment ID: 20000264 Result: Down-regulated in Transcription
  misc_feature: MA Experiment 20000264 PARAMETER Experiment Name: At_Open_Flower_P Parameter: Age (day) Value: 21
  misc_feature: MA Experiment 20000264 PARAMETER Experiment Name: At_Open_Flower_P Parameter: Plant Line Value: WS
  misc_feature: MA Experiment 20000264 PARAMETER Experiment Name: At_Open_Flower_P Parameter: Tissue Value: Open Flower vs. Whole Plant
  misc_feature: MA Experiment ID: 20000286 Result: Down-regulated in Transcription
  misc_feature: MA Experiment 20000286 PARAMETER Experiment Name: At_Open_Flower_P Parameter: Age (day) Value: 21
  misc_feature: MA Experiment 20000286 PARAMETER Experiment Name: At_Open_Flower_P Parameter: Plant Line Value: WS
  misc_feature: MA Experiment 20000286 PARAMETER Experiment Name: At_Open_Flower_P Parameter: Tissue Value: Half Open vs. Whole Plant
  misc_feature: MA Experiment ID: 20000308 Result: Up-regulated in Transcription
  misc_feature: MA Experiment 20000308 PARAMETER Experiment Name: At_100mM_NaCl__P Parameter: Age (day) Value: 17
  misc_feature: MA Experiment 20000308 PARAMETER Experiment Name: At_100mM_NaCl__P Parameter: Organism Value: A. thaliana
  misc_feature: MA Experiment 20000308 PARAMETER Experiment Name: At_100mM_NaCl__P Parameter: Plant Line Value: WS
  misc_feature: MA Experiment 20000308 PARAMETER Experiment Name: At_100mM_NaCl__P Parameter: Timepoint (hr) Value: 72
  misc_feature: MA Experiment 20000308 PARAMETER Experiment Name: At_100mM_NaCl__P Parameter: Tissue Value: Whole Plant
  misc_feature: MA Experiment 20000308 PARAMETER Experiment Name: At_100mM_NaCl__P Parameter: Treatment Value: 100mM NaCl vs. No Treatment
  misc_feature: MA Experiment ID: 20000436 Result: Down-regulated in Transcription
  misc_feature: MA Experiment 20000436 PARAMETER Experiment Name: At_Drought_P Parameter: Age (day) Value: 7
  misc_feature: MA Experiment 20000436 PARAMETER Experiment Name: At_Drought_P Parameter: Organism Value: A. thaliana
  misc_feature: MA Experiment 20000436 PARAMETER Experiment Name: At_Drought_P Parameter: Plant Line Value: WS
  misc_feature: MA Experiment 20000436 PARAMETER Experiment Name: At_Drought_P Parameter: Timepoint (hr) Value: 12
  misc_feature: MA Experiment 20000436 PARAMETER Experiment Name: At_Drought_P Parameter: Tissue Value: Whole Plant
  misc_feature: MA Experiment 20000436 PARAMETER Experiment Name: At_Drought_P Parameter: Treatment Value: Drought vs. No Drought
  misc_feature: MA Experiment ID: 20000437 Result: Down-regulated in Transcription
  misc_feature: MA Experiment 20000437 PARAMETER Experiment Name: At_Drought_P Parameter: Age (day) Value: 8
  misc_feature: MA Experiment 20000437 PARAMETER Experiment Name: At_Drought_P Parameter: Organism Value: A. thaliana
  misc_feature: MA Experiment 20000437 PARAMETER Experiment Name: At_Drought_P Parameter: Plant Line Value: WS
  misc_feature: MA Experiment 20000437 PARAMETER Experiment Name: At_Drought_P Parameter: Timepoint (hr) Value: 24
  misc_feature: MA Experiment 20000437 PARAMETER Experiment Name: At_Drought_P Parameter: Tissue Value: Whole Plant
  misc_feature: MA Experiment 20000437 PARAMETER Experiment Name: At_Drought_P Parameter: Treatment Value: Drought vs. No Drought
  misc_feature: MA Experiment ID: 20000438 Result: Up-regulated in Transcription
  misc_feature: MA Experiment 20000438 PARAMETER Experiment Name: At_Shoots__P Parameter: Age (day) Value: 14
  misc_feature: MA Experiment 20000438 PARAMETER Experiment Name: At_Shoots__P Parameter: Tissue Value: Shoots vs. Whole Plant
  misc_feature: MA Experiment ID: 20000439 Result: Down-regulated in Transcription
  misc_feature: MA Experiment 20000439 PARAMETER Experiment Name: At_Roots__P Parameter: Age (day) Value: 14 vs. 21
  misc_feature: MA Experiment 20000439 PARAMETER Experiment Name: At_Roots__P Parameter: Organism Value: A. thaliana
  misc_feature: MA Experiment 20000439 PARAMETER Experiment Name: At_Roots__P Parameter: Tissue Value: Roots vs. Whole Plant
  misc_feature: MA Experiment ID: 20000445 Result: Down-regulated in Transcription
  misc_feature: MA Experiment 20000445 PARAMETER Experiment Name: At_100uM_NAA__P Parameter: Age (day) Value: 14
  misc_feature: MA Experiment 20000445 PARAMETER Experiment Name: At_100uM_NAA__P Parameter: Organism Value: A. thaliana
  misc_feature: MA Experiment 20000445 PARAMETER Experiment Name: At_100uM_NAA__P Parameter: Plant Line Value: WS
  misc_feature: MA Experiment 20000445 PARAMETER Experiment Name: At_100uM_NAA__P Parameter: Timepoint (hr) Value: 6
  misc_feature: MA Experiment 20000445 PARAMETER Experiment Name: At_100uM_NAA__P Parameter: Tissue Value: Aerial
  misc_feature: MA Experiment 20000445 PARAMETER Experiment Name: At_100uM_NAA__P Parameter: Treatment Value: 100uM NAA vs. No Treatment
  misc_feature: MA Experiment ID: 20000495 Result: Up-regulated in Transcription
  misc_feature: MA Experiment 20000495 PARAMETER Experiment Name: At_Guard_Cells_P Parameter: Harvest Date Value: 8/2/2002
  misc_feature: MA Experiment 20000495 PARAMETER Experiment Name: At_Guard_Cells_P Parameter: Organism Value: A. thaliana
  misc_feature: MA Experiment 20000495 PARAMETER Experiment Name: At_Guard_Cells_P Parameter: Tissue Value: Guard Cells vs. Leaves
  misc_feature: MA Experiment ID: 20000527 Result: Up-regulated in Transcription
  misc_feature: MA Experiment 20000527 PARAMETER Experiment Name: At_10percent_PEG_P Parameter: Age (day) Value: 20
  misc_feature: MA Experiment 20000527 PARAMETER Experiment Name: At_10percent_PEG_P Parameter: Organism Value: A. thaliana
  misc_feature: MA Experiment 20000527 PARAMETER Experiment Name: At_10percent_PEG_P Parameter: Plant Line Value: WS
  misc_feature: MA Experiment 20000527 PARAMETER Experiment Name: At_10percent_PEG_P Parameter: Timepoint (day) Value: 20
  misc_feature: MA Experiment 20000527 PARAMETER Experiment Name: At_10percent_PEG_P Parameter: Tissue Value: Whole Plant
  misc_feature: MA Experiment 20000527 PARAMETER Experiment Name: At_10percent_PEG_P Parameter: Treatment Value: 10percent PEG vs. No Treatment
  misc_feature: MA Experiment ID: 20000573 Result: Down-regulated in Transcription
  misc_feature: MA Experiment 20000573 PARAMETER Experiment Name: At_100uM_ABA_Mutants__P Parameter: Organism Value: A. thaliana
  misc_feature: MA Experiment 20000573 PARAMETER Experiment Name: At_100uM_ABA_Mutants__P Parameter: Plant Line Value: CS22 vs. Ler wt
  misc_feature: MA Experiment 20000573 PARAMETER Experiment Name: At_100uM_ABA_Mutants__P Parameter: Timepoint (hr) Value: N/A
  misc_feature: MA Experiment 20000573 PARAMETER Experiment Name: At_100uM_ABA_Mutants__P Parameter: Tissue Value: Whole Plant
  misc_feature: MA Experiment 20000573 PARAMETER Experiment Name: At_100uM_ABA_Mutants__P Parameter: Treatment Value: None
  misc_feature: MA Experiment ID: 20000794 Result: Down-regulated in Transcription
  misc_feature: MA Experiment 20000794 PARAMETER Experiment Name: At_Petals_P Parameter: Age (day) Value: 23-25 days
  misc_feature: MA Experiment 20000794 PARAMETER Experiment Name: At_Petals_P Parameter: Plant Line Value: WS
  misc_feature: MA Experiment 20000794 PARAMETER Experiment Name: At_Petals_P Parameter: Tissue Value: Petals vs. Whole plant
  misc_feature: MA Experiment ID: 20001248 Result: Down-regulated in Transcription
  misc_feature: MA Experiment 20001248 PARAMETER Experiment Name: At_Far-red-induction_P Parameter: Age (day) Value: 7
  misc_feature: MA Experiment 20001248 PARAMETER Experiment Name: At_Far-red-induction_P Parameter: Light Value: Far-red vs. White
  misc_feature: MA Experiment 20001248 PARAMETER Experiment Name: At_Far-red-induction_P Parameter: Organism Value: A. thaliana
  misc_feature: MA Experiment 20001248 PARAMETER Experiment Name: At_Far-red-induction_P Parameter: Plant Line Value: Columbia
  misc_feature: MA Experiment 20001248 PARAMETER Experiment Name: At_Far-red-induction_P Parameter: Timepoint (hr) Value: 4
  misc_feature: MA Experiment 20001248 PARAMETER Experiment Name: At_Far-red-induction_P Parameter: Tissue Value: Whole Plant
  misc_feature: MA Experiment ID: 20001450 Result: Down-regulated in Transcription
  misc_feature: MA Experiment 20001450 PARAMETER Experiment Name: At_Far-red-induction_P Parameter: Age (day) Value: 7
  misc_feature: MA Experiment 20001450 PARAMETER Experiment Name: At_Far-red-induction_P Parameter: Light Value: Far-red vs. White
  misc_feature: MA Experiment 20001450 PARAMETER Experiment Name: At_Far-red-induction_P Parameter: Organism Value: A. thaliana
  misc_feature: MA Experiment 20001450 PARAMETER Experiment Name: At_Far-red-induction_P Parameter: Plant Line Value: Columbia
  misc_feature: MA Experiment 20001450 PARAMETER Experiment Name: At_Far-red-induction_P Parameter: Timepoint (hr) Value: 8
  misc_feature: MA Experiment 20001450 PARAMETER Experiment Name: At_Far-red-induction_P Parameter: Tissue Value: Whole Plant
  misc_feature: MA Experiment ID: 20001451 Result: Down-regulated in Transcription
  misc_feature: MA Experiment 20001451 PARAMETER Experiment Name: At_Far-red-induction_P Parameter: Age (day) Value: 7
  misc_feature: MA Experiment 20001451 PARAMETER Experiment Name: At_Far-red-induction_P Parameter: Light Value: Far-red vs. White
  misc_feature: MA Experiment 20001451 PARAMETER Experiment Name: At_Far-red-induction_P Parameter: Organism Value: A. thaliana
  misc_feature: MA Experiment 20001451 PARAMETER Experiment Name: At_Far-red-induction_P Parameter: Plant Line Value: Columbia
  misc_feature: MA Experiment 20001451 PARAMETER Experiment Name: At_Far-red-induction_P Parameter: Timepoint (hr) Value: 24
  misc_feature: MA Experiment 20001451 PARAMETER Experiment Name: At_Far-red-induction_P Parameter: Tissue Value: Whole Plant
  misc_feature: MA Experiment ID: 20001560 Result: Up-regulated in Transcription
  misc_feature: MA Experiment 20001560 PARAMETER Experiment Name: At_Drought_Soil_Dry_P Parameter: Age (day) Value: 28
  misc_feature: MA Experiment 20001560 PARAMETER Experiment Name: At_Drought_Soil_Dry_P Parameter: Organism Value: A. thaliana
  misc_feature: MA Experiment 20001560 PARAMETER Experiment Name: At_Drought_Soil_Dry_P Parameter: Plant Line Value: WS
  misc_feature: MA Experiment 20001560 PARAMETER Experiment Name: At_Drought_Soil_Dry_P Parameter: Post Timepoint (hr) Value: None
  misc_feature: MA Experiment 20001560 PARAMETER Experiment Name: At_Drought_Soil_Dry_P Parameter: Post-Treatment Value: None
  misc_feature: MA Experiment 20001560 PARAMETER Experiment Name: At_Drought_Soil_Dry_P Parameter: Timepoint (day) Value: 14
  misc_feature: MA Experiment 20001560 PARAMETER Experiment Name: At_Drought_Soil_Dry_P Parameter: Treatment Value: Drought vs. No Drought
  misc_feature: MA Experiment ID: 20001755 Result: Up-regulated in Transcription
  misc_feature: MA Experiment 20001755 PARAMETER Experiment Name: At_50mM_NH4NO3_L-to-H_P Parameter: Timepoint (hr) Value: 2
  misc_feature: MA Experiment 20001755 PARAMETER Experiment Name: At_50mM_NH4NO3_L-to-H_P Parameter: Tissue Value: Leaf
  misc_feature: MA Experiment 20001755 PARAMETER Experiment Name: At_50mM_NH4NO3_L-to-H_P Parameter: Treatment Value: 50mM NH4NO3 vs 100mM Mannitol
  misc_feature: MA Experiment ID: 20001756 Result: Up-regulated in Transcription
  misc_feature: MA Experiment 20001756 PARAMETER Experiment Name: At_50mM_NH4NO3_L-to-H_P Parameter: Timepoint (hr) Value: 4
  misc_feature: MA Experiment 20001756 PARAMETER Experiment Name: At_50mM_NH4NO3_L-to-H_P Parameter: Tissue Value: Leaf
  misc_feature: MA Experiment 20001756 PARAMETER Experiment Name: At_50mM_NH4NO3_L-to-H_P Parameter: Treatment Value: 50mM NH4NO3 vs 100mM Mannitol
  misc_feature: MA Experiment ID: 20001757 Result: Up-regulated in Transcription
  misc_feature: MA Experiment 20001757 PARAMETER Experiment Name: At_50mM_NH4NO3_L-to-H_P Parameter: Timepoint (hr) Value: 6
  misc_feature: MA Experiment 20001757 PARAMETER Experiment Name: At_50mM_NH4NO3_L-to-H_P Parameter: Tissue Value: Leaf
  misc_feature: MA Experiment 20001757 PARAMETER Experiment Name: At_50mM_NH4NO3_L-to-H_P Parameter: Treatment Value: 50mM NH4NO3 vs 100mM Mannitol
  misc_feature: MA Experiment ID: 20001905 Result: Down-regulated in Transcription
  misc_feature: MA Experiment 20001905 PARAMETER Experiment Name: At_Drought_Reproduction_P Parameter: Age (day) Value: 40
  misc_feature: MA Experiment 20001905 PARAMETER Experiment Name: At_Drought_Reproduction_P Parameter: Organism Value: A. thaliana
  misc_feature: MA Experiment 20001905 PARAMETER Experiment Name: At_Drought_Reproduction_P Parameter: Plant Line Value: WS
  misc_feature: MA Experiment 20001905 PARAMETER Experiment Name: At_Drought_Reproduction_P Parameter: Timepoint (day) Value: 10
  misc_feature: MA Experiment 20001905 PARAMETER Experiment Name: At_Drought_Reproduction_P Parameter: Tissue Value: Rosettes
  misc_feature: MA Experiment 20001905 PARAMETER Experiment Name: At_Drought_Reproduction_P Parameter: Treatment Value: Drought vs. No Drought
  misc_feature: MA Experiment ID: 20001911 Result: Down-regulated in Transcription
  misc_feature: MA Experiment 20001911 PARAMETER Experiment Name: At_Drought_Reproduction_P Parameter: Age (day) Value: 40
  misc_feature: MA Experiment 20001911 PARAMETER Experiment Name: At_Drought_Reproduction_P Parameter: Organism Value: A. thaliana
  misc_feature: MA Experiment 20001911 PARAMETER Experiment Name: At_Drought_Reproduction_P Parameter: Plant Line Value: WS
  misc_feature: MA Experiment 20001911 PARAMETER Experiment Name: At_Drought_Reproduction_P Parameter: Timepoint (day) Value: 10
  misc_feature: MA Experiment 20001911 PARAMETER Experiment Name: At_Drought_Reproduction_P Parameter: Tissue Value: Flowers
  misc_feature: MA Experiment 20001911 PARAMETER Experiment Name: At_Drought_Reproduction_P Parameter: Treatment Value: Drought vs. No Drought
tataacacacactcgcttgttcacgcacaacaaaaagcaagaatatataccactttgtgaacttcagagatcctatagcaatggcgaacctaccgattcttttggattactggccaagtatgttcgggatgagggctagagttgcgttgcgagagaaaggtgttgagtttgaatacagagaggaagatttctcgaacaagagccctttactcctccagagtaatcccattcacaagaaaatcccggttctggtccacaacggtaaaccggtatgtgaatctcttaacgttgtccagtacgtcgacgaggcttggcccgagaagaacccgttcttcccttccgatccttacgggagagctcaggctcgattctgggctgatttcgtggacaagaagttcaccgacgcccaattcaaggtatgggggaagaaaggtgaggaacaagaagcaggcaagaaggaatttattgaggcagtgaagattcttgaatctgagctaggagataaaccttactttggtggagatagctttgggtatgtagacatttccttgattacattctcgagttggttccaagcctatgagaagtttggtaactttagcatcgagtcagagagtccgaaactgatcgcttgggcaaagcggtgcatggagaaagagagtgtgtctaagtctctccctgactctgagaagattgttgcatatgctgctgagtataggaagaacaatctctgatttgaataatcttgttgttctcttgttgctaagctgtgttctgtttttgtctttgtttttttttttcccctaataatgcgagagagccttagtgaatgtgtgttgtggtttttatgcatcctaagtatggaatttaaataaaatttgtttcgactt

SEQ ID NO: 88868 - protein, 217 aa, Arabidopsis thaliana; identical to SEQ ID NO: 21617
  peptide (1)..(217): Ceres Seq. ID no. 12713250
  misc_feature (85)..(193): Pfam Name: Glutathione S-transferase, C-terminal domain Pfam Description: Glutathione S-transferase, C-terminal domain
  misc_feature (1)..(217): Homolog of NCBI NO: 15218311 NR Description: glutathione transferase, putative; protein id: supported by cDNA: 30680. [Arabidopsis thaliana]
  misc_feature (1)..(217): Homolog of NCBI NO: 21592638 NR Description: 2,4-D inducible glutathione S-transferase,
  misc_feature (1)..(168): Homolog of NCBI NO: 8052534 NR Description: F3F9.11 [Arabidopsis thaliana]
  misc_feature (1)..(214): Homolog of NCBI NO: 18411929 NR Description: glutathione transferase, putative; protein id: supported by cDNA: 30759., supported by cDNA: gi_14326476
  misc_feature (1)..(214): Homolog of NCBI NO: 21592644 NR Description: glutathione transferase, putative [Arabidopsis
  misc_feature (1)..(214): Homolog of NCBI NO: 8052534 NR Description: F3F9.11 [Arabidopsis thaliana]
  misc_feature (1)..(214): Homolog of NCBI NO: 15220041 NR Description: glutathione transferase, putative; protein id: [Arabidopsis thaliana] >gi|25313212|pir||H86307 probable
  misc_feature (1)..(214): Homolog of NCBI NO: 8052535 NR Description: F3F9.13 [Arabidopsis thaliana]
  misc_feature (1)..(214): Homolog of NCBI NO: 15218304 NR Description: glutathione transferase, putative; protein id: supported by cDNA: 252874. [Arabidopsis thaliana] GST7 like protein [Arabidopsis thaliana]

SEQ ID NO: 88869 - protein, 204 aa, Arabidopsis thaliana; identical to SEQ ID NO: 21618
  peptide (1)..(204): Ceres Seq. ID no. 12713251
  misc_feature (72)..(180): Pfam Name: Glutathione S-transferase, C-terminal domain Pfam Description: Glutathione S-transferase, C-terminal domain
  misc_feature (1)..(204): Homolog of NCBI NO: 15218311 NR Description: glutathione transferase, putative; protein id: supported by cDNA: 30680. [Arabidopsis thaliana]
  misc_feature (1)..(204): Homolog of NCBI NO: 21592638 NR Description: 2,4-D inducible glutathione S-transferase,
  misc_feature (1)..(155): Homolog of NCBI NO: 8052534 NR Description: F3F9.11 [Arabidopsis thaliana]
  misc_feature (1)..(201): Homolog of NCBI NO: 18411929 NR Description: glutathione transferase, putative; protein id: supported by cDNA: 30759., supported by cDNA: gi_14326476
  misc_feature (1)..(201): Homolog of NCBI NO: 21592644 NR Description: glutathione transferase, putative [Arabidopsis
  misc_feature (1)..(201): Homolog of NCBI NO: 8052534 NR Description: F3F9.11 [Arabidopsis thaliana]
  misc_feature (1)..(201): Homolog of NCBI NO: 15220041 NR Description: glutathione transferase, putative; protein id: [Arabidopsis thaliana] >gi|25313212|pir||H86307 probable
  misc_feature (1)..(201): Homolog of NCBI NO: 8052535 NR Description: F3F9.13 [Arabidopsis thaliana]
  misc_feature (1)..(201): Homolog of NCBI NO: 15218304 NR Description: glutathione transferase, putative; protein id: supported by cDNA: 252874. [Arabidopsis thaliana] GST7 like protein [Arabidopsis thaliana]

SEQ ID NO: 88870 - protein, 201 aa, Arabidopsis thaliana; identical to SEQ ID NO: 21619
  peptide (1)..(201): Ceres Seq. ID no. 12713252
  misc_feature (69)..(177): Pfam Name: Glutathione S-transferase, C-terminal domain Pfam Description: Glutathione S-transferase, C-terminal domain
  misc_feature (1)..(201): Homolog of NCBI NO: 15218311 NR Description: glutathione transferase, putative; protein id: supported by cDNA: 30680. [Arabidopsis thaliana]
  misc_feature (1)..(201): Homolog of NCBI NO: 21592638 NR Description: 2,4-D inducible glutathione S-transferase,
  misc_feature (1)..(152): Homolog of NCBI NO: 8052534 NR Description: F3F9.11 [Arabidopsis thaliana]
  misc_feature (1)..(198): Homolog of NCBI NO: 18411929 NR Description: glutathione transferase, putative; protein id: supported by cDNA: 30759., supported by cDNA: gi_14326476
  misc_feature (1)..(198): Homolog of NCBI NO: 21592644 NR Description: glutathione transferase, putative [Arabidopsis
  misc_feature (1)..(198): Homolog of NCBI NO: 8052534 NR Description: F3F9.11 [Arabidopsis thaliana]
  misc_feature (1)..(198): Homolog of NCBI NO: 15220041 NR Description: glutathione transferase, putative; protein id: [Arabidopsis thaliana] >gi|25313212|pir||H86307 probable
  misc_feature (1)..(198): Homolog of NCBI NO: 8052535 NR Description: F3F9.13 [Arabidopsis thaliana]
  misc_feature (1)..(198): Homolog of NCBI NO: 15218304 NR Description: glutathione transferase, putative; protein id: supported by cDNA: 252874. [Arabidopsis thaliana] GST7 like protein [Arabidopsis thaliana]

SEQ ID NO: 88871 - DNA, 981 bp, Arabidopsis thaliana
  misc_feature (1)..(981): Ceres Seq. ID no. 12713253
  misc_feature: MA Experiment ID: 108434 Result: Down-regulated in Transcription
  misc_feature: MA Experiment 108434 PARAMETER Experiment Name: At_Root_Tips_cDNA_P Parameter: Tissue Value: Root Tips
  misc_feature: MA Experiment ID: 108435 Result: Down-regulated in Transcription
  misc_feature: MA Experiment 108435 PARAMETER Experiment Name: At_stm_Mutants_cDNA_P Parameter: Plant Line Value: wt Landsburg vs stm
  misc_feature: MA Experiment 108435 PARAMETER Experiment Name: At_stm_Mutants_cDNA_P Parameter: Tissue Value: Shoot Apical Meristem Region
  misc_feature: MA Experiment ID: 108469 Result: Up-regulated in Transcription
  misc_feature: MA Experiment ID: 108576 Result: Up-regulated in Transcription
  misc_feature: MA Experiment 108576 PARAMETER Experiment Name: At_42deg_Heat_cDNA_P Parameter: Temperature (deg C) Value: 42 vs. 22
  misc_feature: MA Experiment 108576 PARAMETER Experiment Name: At_42deg_Heat_cDNA_P Parameter: Timepoint (hr) Value: 1
  misc_feature: MA Experiment 108576 PARAMETER Experiment Name: At_42deg_Heat_cDNA_P Parameter: Tissue Value: Aerial
  misc_feature: MA Experiment ID: 108577 Result: Up-regulated in Transcription
  misc_feature: MA Experiment 108577 PARAMETER Experiment Name: At_42deg_Heat_cDNA_P Parameter: Temperature (deg C) Value: 42 vs. 22
  misc_feature: MA Experiment 108577 PARAMETER Experiment Name: At_42deg_Heat_cDNA_P Parameter: Timepoint (hr) Value: 6
  misc_feature: MA Experiment 108577 PARAMETER Experiment Name: At_42deg_Heat_cDNA_P Parameter: Tissue Value: Aerial
  misc_feature: MA Experiment ID: 108594 Result: Down-regulated in Transcription
  misc_feature: MA Experiment 108594 PARAMETER Experiment Name: At_Ler-rhl_Root_cDNA_P Parameter: Plant Line Value: null
  misc_feature: MA Experiment ID: 20000069 Result: Up-regulated in Transcription
  misc_feature: MA Experiment 20000069 PARAMETER Experiment Name: At_100uM_ABA_Mutants_cDNA_P Parameter: Plant Line Value: CS23
  misc_feature: MA Experiment 20000069 PARAMETER Experiment Name: At_100uM_ABA_Mutants_cDNA_P Parameter: Timepoint (hr) Value: 6
  misc_feature: MA Experiment 20000069 PARAMETER Experiment Name: At_100uM_ABA_Mutants_cDNA_P Parameter: Tissue Value: Aerial
  misc_feature: MA Experiment 20000069 PARAMETER Experiment Name: At_100uM_ABA_Mutants_cDNA_P Parameter: Treatment Value: 100uM ABA vs. No Treatment
  misc_feature: MA Experiment ID: 20000070 Result: Up-regulated in Transcription
  misc_feature: MA Experiment 20000070 PARAMETER Experiment Name: At_100uM_ABA_Mutants_cDNA_P Parameter: Plant Line Value: CS24
  misc_feature: MA Experiment 20000070 PARAMETER Experiment Name: At_100uM_ABA_Mutants_cDNA_P Parameter: Timepoint (hr) Value: 6
  misc_feature: MA Experiment 20000070 PARAMETER Experiment Name: At_100uM_ABA_Mutants_cDNA_P Parameter: Tissue Value: Aerial
  misc_feature: MA Experiment 20000070 PARAMETER Experiment Name: At_100uM_ABA_Mutants_cDNA_P Parameter: Treatment Value: 100uM ABA vs. No Treatment
  misc_feature: MA Experiment ID: 20000071 Result: Up-regulated in Transcription
  misc_feature: MA Experiment 20000071 PARAMETER Experiment Name: At_100uM_ABA_Mutants_cDNA_P Parameter: Plant Line Value: CS8104
  misc_feature: MA Experiment 20000071 PARAMETER Experiment Name: At_100uM_ABA_Mutants_cDNA_P Parameter: Timepoint (hr) Value: 6
  misc_feature: MA Experiment 20000071 PARAMETER Experiment Name: At_100uM_ABA_Mutants_cDNA_P Parameter: Tissue Value: Aerial
  misc_feature: MA Experiment 20000071 PARAMETER Experiment Name: At_100uM_ABA_Mutants_cDNA_P Parameter: Treatment Value: 100uM ABA vs. No Treatment
  misc_feature: MA Experiment ID: 20000072 Result: Up-regulated in Transcription
  misc_feature: MA Experiment 20000072 PARAMETER Experiment Name: At_100uM_ABA_Mutants_cDNA_P Parameter: Plant Line Value: CS8105
  misc_feature: MA Experiment 20000072 PARAMETER Experiment Name: At_100uM_ABA_Mutants_cDNA_P Parameter: Timepoint (hr) Value: 6
  misc_feature: MA Experiment 20000072 PARAMETER Experiment Name: At_100uM_ABA_Mutants_cDNA_P Parameter: Tissue Value: Aerial
  misc_feature: MA Experiment 20000072 PARAMETER Experiment Name: At_100uM_ABA_Mutants_cDNA_P Parameter: Treatment Value: 100uM ABA vs. No Treatment
  misc_feature: MA Experiment ID: 20000086 Result: Up-regulated in Transcription
  misc_feature: MA Experiment 20000086 PARAMETER Experiment Name: At_100uM_ABA_Mutants_cDNA_P Parameter: Plant Line Value: CS22
  misc_feature: MA Experiment 20000086 PARAMETER Experiment Name: At_100uM_ABA_Mutants_cDNA_P Parameter: Timepoint (hr) Value: 6
  misc_feature: MA Experiment 20000086 PARAMETER Experiment Name: At_100uM_ABA_Mutants_cDNA_P Parameter: Tissue Value: Aerial
  misc_feature: MA Experiment 20000086 PARAMETER Experiment Name: At_100uM_ABA_Mutants_cDNA_P Parameter: Treatment Value: 100uM ABA vs. No Treatment
  misc_feature: MA Experiment ID: 20000087 Result: Up-regulated in Transcription
  misc_feature: MA Experiment 20000087 PARAMETER Experiment Name: At_100uM_ABA_Mutants_cDNA_P Parameter: Plant Line Value: WS
  misc_feature: MA Experiment 20000087 PARAMETER Experiment Name: At_100uM_ABA_Mutants_cDNA_P Parameter: Timepoint (hr) Value: 6
  misc_feature: MA Experiment 20000087 PARAMETER Experiment Name: At_100uM_ABA_Mutants_cDNA_P Parameter: Tissue Value: Aerial
  misc_feature: MA Experiment 20000087 PARAMETER Experiment Name: At_100uM_ABA_Mutants_cDNA_P Parameter: Treatment Value: 100uM ABA vs. No Treatment
  misc_feature: MA Experiment ID: 20000088 Result: Up-regulated in Transcription
  misc_feature: MA Experiment 20000088 PARAMETER Experiment Name: At_100uM_ABA_Mutants_cDNA_P Parameter: Plant Line Value: Landsberg
  misc_feature: MA Experiment 20000088 PARAMETER Experiment Name: At_100uM_ABA_Mutants_cDNA_P Parameter: Timepoint (hr) Value: 6
  misc_feature: MA Experiment 20000088 PARAMETER Experiment Name: At_100uM_ABA_Mutants_cDNA_P Parameter: Tissue Value: Aerial
  misc_feature: MA Experiment 20000088 PARAMETER Experiment Name: At_100uM_ABA_Mutants_cDNA_P Parameter: Treatment Value: 100uM ABA vs. No Treatment
  misc_feature: MA Experiment ID: 20000089 Result: Up-regulated in Transcription
  misc_feature: MA Experiment ID: 20000090 Result: Up-regulated in Transcription
  misc_feature: MA Experiment ID: 20000093 Result: Up-regulated in Transcription
  misc_feature: MA Experiment 20000093 PARAMETER Experiment Name: At_42deg_Heat_cDNA_P Parameter: Temperature (deg C) Value: 42 vs. 22
  misc_feature: MA Experiment 20000093 PARAMETER Experiment Name: At_42deg_Heat_cDNA_P Parameter: Timepoint (hr) Value: 0.5
  misc_feature: MA Experiment 20000093 PARAMETER Experiment Name: At_42deg_Heat_cDNA_P Parameter: Tissue Value: Aerial
  misc_feature: MA Experiment ID: 20000111 Result: Up-regulated in Transcription
  misc_feature: MA Experiment 20000111 PARAMETER Experiment Name: At_42deg_Heat_cDNA_P Parameter: Temperature (deg C) Value: 42 vs. 22
  misc_feature: MA Experiment 20000111 PARAMETER Experiment Name: At_42deg_Heat_cDNA_P Parameter: Timepoint (hr) Value: 6
  misc_feature: MA Experiment 20000111 PARAMETER Experiment Name: At_42deg_Heat_cDNA_P Parameter: Tissue Value: Aerial
  misc_feature: MA Experiment ID: 20000112 Result: Up-regulated in Transcription
  misc_feature: MA Experiment 20000112 PARAMETER Experiment Name: At_42deg_Heat_cDNA_P Parameter: Temperature (deg C) Value: 42 vs. 22
  misc_feature: MA Experiment 20000112 PARAMETER Experiment Name: At_42deg_Heat_cDNA_P Parameter: Timepoint (hr) Value: 2
  misc_feature: MA Experiment 20000112 PARAMETER Experiment Name: At_42deg_Heat_cDNA_P Parameter: Tissue Value: Aerial
  misc_feature: MA Experiment ID: 20000113 Result: Up-regulated in Transcription
  misc_feature: MA Experiment 20000113 PARAMETER Experiment Name: At_42deg_Heat_cDNA_P Parameter: Temperature (deg C) Value: 42 vs. 22
  misc_feature: MA Experiment 20000113 PARAMETER Experiment Name: At_42deg_Heat_cDNA_P Parameter: Timepoint (hr) Value: 8
  misc_feature: MA Experiment 20000113 PARAMETER Experiment Name: At_42deg_Heat_cDNA_P Parameter: Tissue Value: Aerial
  misc_feature: MA Experiment ID: 20000117 Result: Up-regulated in Transcription
  misc_feature: MA Experiment 20000117 PARAMETER Experiment Name: At_100uM_ABA_Mutants_cDNA_P Parameter: Plant Line Value: Columbia
  misc_feature: MA Experiment 20000117 PARAMETER Experiment Name: At_100uM_ABA_Mutants_cDNA_P Parameter: Timepoint (hr) Value: 6
  misc_feature: MA Experiment 20000117 PARAMETER Experiment Name: At_100uM_ABA_Mutants_cDNA_P Parameter: Tissue Value: Aerial
  misc_feature: MA Experiment 20000117 PARAMETER Experiment Name: At_100uM_ABA_Mutants_cDNA_P Parameter: Treatment Value: 100uM ABA vs. No Treatment
  misc_feature: MA Experiment ID: 20000144 Result: Up-regulated in Transcription
  misc_feature: MA Experiment 20000144 PARAMETER Experiment Name: At_42deg_Heat_cDNA_P Parameter: Temperature (deg C) Value: 42 vs. 22
  misc_feature: MA Experiment 20000144 PARAMETER Experiment Name: At_42deg_Heat_cDNA_P Parameter: Timepoint (hr) Value: 1
  misc_feature: MA Experiment 20000144 PARAMETER Experiment Name: At_42deg_Heat_cDNA_P Parameter: Tissue Value: Aerial
  misc_feature: MA Experiment ID: 20000171 Result: Up-regulated in Transcription
  misc_feature: MA Experiment 20000171 PARAMETER Experiment Name: At_42deg_Heat_P Parameter: Age (day) Value: 14
  misc_feature: MA Experiment 20000171 PARAMETER Experiment Name: At_42deg_Heat_P Parameter: Organism Value: A. thaliana
  misc_feature: MA Experiment 20000171 PARAMETER Experiment Name: At_42deg_Heat_P Parameter: Plant Line Value: WS
  misc_feature: MA Experiment 20000171 PARAMETER Experiment Name: At_42deg_Heat_P Parameter: Temperature (deg C) Value: 42 vs. 22
  misc_feature: MA Experiment 20000171 PARAMETER Experiment Name: At_42deg_Heat_P Parameter: Timepoint (hr) Value: 1
  misc_feature: MA Experiment 20000171 PARAMETER Experiment Name: At_42deg_Heat_P Parameter: Tissue Value: Aerial
  misc_feature: MA Experiment ID: 20000173 Result: Up-regulated in Transcription
  misc_feature: MA Experiment 20000173 PARAMETER Experiment Name: At_42deg_Heat_P Parameter: Age (day) Value: 14
  misc_feature: MA Experiment 20000173 PARAMETER Experiment Name: At_42deg_Heat_P Parameter: Organism Value: A. thaliana
  misc_feature: MA Experiment 20000173 PARAMETER Experiment Name: At_42deg_Heat_P Parameter: Plant Line Value: WS
  misc_feature: MA Experiment 20000173 PARAMETER Experiment Name: At_42deg_Heat_P Parameter: Temperature (deg C) Value: 42 vs. 22
  misc_feature: MA Experiment 20000173 PARAMETER Experiment Name: At_42deg_Heat_P Parameter: Timepoint (hr) Value: 6
  misc_feature: MA Experiment 20000173 PARAMETER Experiment Name: At_42deg_Heat_P Parameter: Tissue Value: Aerial
  misc_feature: MA Experiment ID: 20000182 Result: Up-regulated in Transcription
  misc_feature: MA Experiment 20000182 PARAMETER Experiment Name: At_2mM_SA_P Parameter: Age (day) Value: 14
  misc_feature: MA Experiment 20000182 PARAMETER Experiment Name: At_2mM_SA_P Parameter: Organism Value: A. thaliana
  misc_feature: MA Experiment 20000182 PARAMETER Experiment Name: At_2mM_SA_P Parameter: Plant Line Value: WS
  misc_feature: MA Experiment 20000182 PARAMETER Experiment Name: At_2mM_SA_P Parameter: Timepoint (hr) Value: 6
  misc_feature: MA Experiment 20000182 PARAMETER Experiment Name: At_2mM_SA_P Parameter: Tissue Value: Aerial
  misc_feature: MA Experiment 20000182 PARAMETER Experiment Name: At_2mM_SA_P Parameter: Treatment Value: 2mM SA vs. No Treatment
  misc_feature: MA Experiment ID: 20000185 Result: Up-regulated in Transcription
  misc_feature: MA Experiment 20000185 PARAMETER Experiment Name: At_Roots__P Parameter: Age (day) Value: 7 vs. 21
  misc_feature: MA Experiment 20000185 PARAMETER Experiment Name: At_Roots__P Parameter: Organism Value: A. thaliana
  misc_feature: MA Experiment 20000185 PARAMETER Experiment Name: At_Roots__P Parameter: Tissue Value: Roots vs. Whole Plant
  misc_feature: MA Experiment ID: 20000234 Result: Down-regulated in Transcription
  misc_feature: MA Experiment 20000234 PARAMETER Experiment Name: At_Siliques_P Parameter: Age (day) Value: 21
  misc_feature: MA Experiment 20000234 PARAMETER Experiment Name: At_Siliques_P Parameter: Organism Value: A. thaliana
  misc_feature: MA Experiment 20000234 PARAMETER Experiment Name: At_Siliques_P Parameter: Plant Line Value: WS
  misc_feature: MA Experiment 20000234 PARAMETER Experiment Name: At_Siliques_P Parameter: Tissue Value: Less Than 5mm Siliques vs. Whole Plant
  misc_feature: MA Experiment ID: 20000235 Result: Down-regulated in Transcription
  misc_feature: MA Experiment 20000235 PARAMETER Experiment Name: At_Siliques_P Parameter: Age (day) Value: 21
  misc_feature: MA Experiment 20000235 PARAMETER Experiment Name: At_Siliques_P Parameter: Organism Value: A. thaliana
  misc_feature: MA Experiment 20000235 PARAMETER Experiment Name: At_Siliques_P Parameter: Plant Line Value: WS
  misc_feature: MA Experiment 20000235 PARAMETER Experiment Name: At_Siliques_P Parameter: Tissue Value: 5-10mm Siliques vs. Whole Plant
  misc_feature: MA Experiment ID: 20000286 Result: Down-regulated in Transcription
  misc_feature: MA Experiment 20000286 PARAMETER Experiment Name: At_Open_Flower_P Parameter: Age (day) Value: 21
  misc_feature: MA Experiment 20000286 PARAMETER Experiment Name: At_Open_Flower_P Parameter: Plant Line Value: WS
  misc_feature: MA Experiment 20000286 PARAMETER Experiment Name: At_Open_Flower_P Parameter: Tissue Value: Half Open vs. Whole Plant
  misc_feature: MA Experiment ID: 20000709 Result: Up-regulated in Transcription
  misc_feature: MA Experiment 20000709 PARAMETER Experiment Name: At_15mM_NH4NO3_L-to-H_P Parameter: Age (hr) Value: 14
  misc_feature: MA Experiment 20000709 PARAMETER Experiment Name: At_15mM_NH4NO3_L-to-H_P Parameter: Organism Value: A. thaliana
  misc_feature: MA Experiment 20000709 PARAMETER Experiment Name: At_15mM_NH4NO3_L-to-H_P Parameter: Plant Line Value: WS
  misc_feature: MA Experiment 20000709 PARAMETER Experiment Name: At_15mM_NH4NO3_L-to-H_P Parameter: Timepoint (hr) Value: 4
  misc_feature: MA Experiment 20000709 PARAMETER Experiment Name: At_15mM_NH4NO3_L-to-H_P Parameter: Tissue Value: Aerial
  misc_feature: MA Experiment 20000709 PARAMETER Experiment Name: At_15mM_NH4NO3_L-to-H_P Parameter: Treatment Value: 15mM NH4NO3 vs. 30mM Mannitol
  misc_feature: MA Experiment ID: 20000794 Result: Down-regulated in Transcription
  misc_feature: MA Experiment 20000794 PARAMETER Experiment Name: At_Petals_P Parameter: Age (day) Value: 23-25 days
  misc_feature: MA Experiment 20000794 PARAMETER Experiment Name: At_Petals_P Parameter: Plant Line Value: WS
  misc_feature: MA Experiment 20000794 PARAMETER Experiment Name: At_Petals_P Parameter: Tissue Value: Petals vs. Whole plant
  misc_feature: MA Experiment ID: 20001450 Result: Down-regulated in Transcription
  misc_feature: MA Experiment 20001450 PARAMETER Experiment Name: At_Far-red-induction_P Parameter: Age (day) Value: 7
  misc_feature: MA Experiment 20001450 PARAMETER Experiment Name: At_Far-red-induction_P Parameter: Light Value: Far-red vs. White
  misc_feature: MA Experiment 20001450 PARAMETER Experiment Name: At_Far-red-induction_P Parameter: Organism Value: A. thaliana
  misc_feature: MA Experiment 20001450 PARAMETER Experiment Name: At_Far-red-induction_P Parameter: Plant Line Value: Columbia
  misc_feature: MA Experiment 20001450 PARAMETER Experiment Name: At_Far-red-induction_P Parameter: Timepoint (hr) Value: 8
  misc_feature: MA Experiment 20001450 PARAMETER Experiment Name: At_Far-red-induction_P Parameter: Tissue Value: Whole Plant
  misc_feature: MA Experiment ID: 20001451 Result: Down-regulated in Transcription
  misc_feature: MA Experiment 20001451 PARAMETER Experiment Name: At_Far-red-induction_P Parameter: Age (day) Value: 7
  misc_feature: MA Experiment 20001451 PARAMETER Experiment Name: At_Far-red-induction_P Parameter: Light Value: Far-red vs. White
  misc_feature: MA Experiment 20001451 PARAMETER Experiment Name: At_Far-red-induction_P Parameter: Organism Value: A. thaliana
  misc_feature: MA Experiment 20001451 PARAMETER Experiment Name: At_Far-red-induction_P Parameter: Plant Line Value: Columbia
  misc_feature: MA Experiment 20001451 PARAMETER Experiment Name: At_Far-red-induction_P Parameter: Timepoint (hr) Value: 24
  misc_feature: MA Experiment 20001451 PARAMETER Experiment Name: At_Far-red-induction_P Parameter: Tissue Value: Whole Plant
  misc_feature: MA Experiment ID: 20001557 Result: Up-regulated in Transcription
  misc_feature: MA Experiment 20001557 PARAMETER Experiment Name: At_Drought_Soil_Dry_P Parameter: Age (day) Value: 27
  misc_feature: MA Experiment 20001557 PARAMETER Experiment Name: At_Drought_Soil_Dry_P Parameter: Organism Value: A. thaliana
  misc_feature: MA Experiment 20001557 PARAMETER Experiment Name: At_Drought_Soil_Dry_P Parameter: Plant Line Value: WS
  misc_feature: MA Experiment 20001557 PARAMETER Experiment Name: At_Drought_Soil_Dry_P Parameter: Post Timepoint (hr) Value: 3
  misc_feature: MA Experiment 20001557 PARAMETER Experiment Name: At_Drought_Soil_Dry_P Parameter: Post-Treatment Value: Re-Water vs. No Drought
  misc_feature: MA Experiment 20001557 PARAMETER Experiment Name: At_Drought_Soil_Dry_P Parameter: Timepoint (day) Value: 13
  misc_feature: MA Experiment 20001557 PARAMETER Experiment Name: At_Drought_Soil_Dry_P Parameter: Treatment Value: Drought vs. No Drought
cttacaggtagtgtcccaaccaaacaaatcgagaaagacgaacacttacaaaaaaaaatctctttgtgagctttagcgatcgtaacaatggcgaacgaggtgattcttcttgatttctggccgagtatgttcgggatgaggacaaggatcgcattgagggagaaaggtgttgaatttgagtacagagaagaagatctaaggaacaagagtcctttgcttctccagatgaatccgattcacaagaagattcctgttctcatccacaatggtaaaccggttaacgaatctatcatccaggttcagtacattgacgaggtctggtctcacaagaaccctattcttccttctgatccttacctgagagctcaagctaggttctgggctgatttcattgacaagaagctgtatgatgctcagaggaaggtgtgggcgacaaagggtgaggaacaagaggcagggaagaaggatttcattgagatactcaagactcttgaatctgagcttggagacaaaccttactttagtggcgatgactttggctatgtagacattgcgttgattggattctacacatggtttccagcatacgagaagtttgctaacttcagtatcgaatctgaggttccgaaactgattgcttgggttaagaagtgtttgcagagggagagcgtggctaagtccttgcctgatcctgagaaggttactgaattcgtctctgagctcaggaagaaatttgtacctgagtaaatatgtttctcttgtcatatggttcggacttaagatgctctctgttttactttcgtgtgttgtctttcttaaataatgcagagcatctgtgaggtggtttgagtgtagagaatgtatgtctttgctgtagcagattcctgtgttttctggatttaatggcttgtcctagtttttatgcattgtaactatgagtttaattaatgatcgttaatctataatgattattaatttgtt

SEQ ID NO: 88872 - protein, 219 aa, Arabidopsis thaliana; identical to SEQ ID NO: 21639
  peptide (1)..(219): Ceres Seq. ID no. 12713254
  misc_feature (1)..(219): Homolog of NCBI NO: 18411929 NR Description: glutathione transferase, putative; protein id: supported by cDNA: 30759., supported by cDNA: gi_14326476
  misc_feature (1)..(219): Homolog of NCBI NO: 21592644 NR Description: glutathione transferase, putative [Arabidopsis
  misc_feature (1)..(219): Homolog of NCBI NO: 8052534 NR Description: F3F9.11 [Arabidopsis thaliana]
  misc_feature (1)..(215): Homolog of NCBI NO: 15220041 NR Description: glutathione transferase, putative; protein id: [Arabidopsis thaliana] >gi|25313212|pir||H86307 probable
  misc_feature (1)..(216): Homolog of NCBI NO: 1346215 NR Description: PROBABLE GLUTATHIONE S-TRANSFERASE PARC
  misc_feature (1)..(216): Homolog of NCBI NO: 416652 NR Description: PROBABLE GLUTATHIONE S-TRANSFERASE (AUXIN-INDUCED
  misc_feature (1)..(214): Homolog of NCBI NO: 7447307 NR Description: glutathione transferase (EC 2.5.1.18) - papaya
  misc_feature (1)..(216): Homolog of NCBI NO: 100302 NR Description: auxin-induced protein (clone pCNT107) - common
  misc_feature (1)..(214): Homolog of NCBI NO: 15218311 NR Description: glutathione transferase, putative; protein id: supported by cDNA: 30680. [Arabidopsis thaliana]

SEQ ID NO: 88873 - protein, 206 aa, Arabidopsis thaliana; identical to SEQ ID NO: 21640
  peptide (1)..(206): Ceres Seq. ID no. 12713255
  misc_feature (1)..(206): Homolog of NCBI NO: 18411929 NR Description: glutathione transferase, putative; protein id: supported by cDNA: 30759., supported by cDNA: gi_14326476
  misc_feature (1)..(206): Homolog of NCBI NO: 21592644 NR Description: glutathione transferase, putative [Arabidopsis
  misc_feature (1)..(206): Homolog of NCBI NO: 8052534 NR Description: F3F9.11 [Arabidopsis thaliana]
  misc_feature (1)..(202): Homolog of NCBI NO: 15220041 NR Description: glutathione transferase, putative; protein id: [Arabidopsis thaliana] >gi|25313212|pir||H86307 probable
  misc_feature (1)..(203): Homolog of NCBI NO: 1346215 NR Description: PROBABLE GLUTATHIONE S-TRANSFERASE PARC
  misc_feature (1)..(203): Homolog of NCBI NO: 416652 NR Description: PROBABLE GLUTATHIONE S-TRANSFERASE (AUXIN-INDUCED
  misc_feature (1)..(201): Homolog of NCBI NO: 7447307 NR Description: glutathione transferase (EC 2.5.1.18) - papaya
  misc_feature (1)..(203): Homolog of NCBI NO: 100302 NR Description: auxin-induced protein (clone pCNT107) - common
  misc_feature (1)..(201): Homolog of NCBI NO: 15218311 NR Description: glutathione transferase, putative; protein id: supported by cDNA: 30680. [Arabidopsis thaliana]

SEQ ID NO: 88874 - protein, 203 aa, Arabidopsis thaliana; identical to SEQ ID NO: 21641
  peptide (1)..(203): Ceres Seq. ID no. 12713256
  misc_feature (1)..(203): Homolog of NCBI NO: 18411929 NR Description: glutathione transferase, putative; protein id: supported by cDNA: 30759., supported by cDNA: gi_14326476
  misc_feature (1)..(203): Homolog of NCBI NO: 21592644 NR Description: glutathione transferase, putative [Arabidopsis
  misc_feature (1)..(203): Homolog of NCBI NO: 8052534 NR Description: F3F9.11 [Arabidopsis thaliana]
  misc_feature (1)..(199): Homolog of NCBI NO: 15220041 NR Description: glutathione transferase, putative; protein id: [Arabidopsis thaliana] >gi|25313212|pir||H86307 probable
  misc_feature (1)..(200): Homolog of NCBI NO: 1346215 NR Description: PROBABLE GLUTATHIONE S-TRANSFERASE PARC
  misc_feature (1)..(200): Homolog of NCBI NO: 416652 NR Description: PROBABLE GLUTATHIONE S-TRANSFERASE (AUXIN-INDUCED
  misc_feature (1)..(198): Homolog of NCBI NO: 7447307 NR Description: glutathione transferase (EC 2.5.1.18) - papaya
  misc_feature (1)..(200): Homolog of NCBI NO: 100302 NR Description: auxin-induced protein (clone pCNT107) - common
  misc_feature (1)..(198): Homolog of NCBI NO: 15218311 NR Description: glutathione transferase, putative; protein id: supported by cDNA: 30680. [Arabidopsis thaliana]

SEQ ID NO: 88875 - DNA, 1003 bp, Arabidopsis thaliana
  misc_feature (1)..(1003): Ceres Seq. ID no. 12713341
  misc_feature: MA Experiment ID: 108434 Result: Down-regulated in Transcription
  misc_feature: MA Experiment 108434 PARAMETER Experiment Name: At_Root_Tips_cDNA_P Parameter: Tissue Value: Root Tips
  misc_feature: MA Experiment ID: 20000234 Result: Up-regulated in Transcription
  misc_feature: MA Experiment 20000234 PARAMETER Experiment Name: At_Siliques_P Parameter: Age (day) Value: 21
  misc_feature: MA Experiment 20000234 PARAMETER Experiment Name: At_Siliques_P Parameter: Organism Value: A. thaliana
  misc_feature: MA Experiment 20000234 PARAMETER Experiment Name: At_Siliques_P Parameter: Plant Line Value: WS
  misc_feature: MA Experiment 20000234 PARAMETER Experiment Name: At_Siliques_P Parameter: Tissue Value: Less Than 5mm Siliques vs. Whole Plant
  misc_feature: MA Experiment ID: 20000235 Result: Up-regulated in Transcription
  misc_feature: MA Experiment 20000235 PARAMETER Experiment Name: At_Siliques_P Parameter: Age (day) Value: 21
  misc_feature: MA Experiment 20000235 PARAMETER Experiment Name: At_Siliques_P Parameter: Organism Value: A. thaliana
  misc_feature: MA Experiment 20000235 PARAMETER Experiment Name: At_Siliques_P Parameter: Plant Line Value: WS
  misc_feature: MA Experiment 20000235 PARAMETER Experiment Name: At_Siliques_P Parameter: Tissue Value: 5-10mm Siliques vs. Whole Plant
aagaccaaaagaaaaaaaaaaactttttcttttctgatgaatcgtatctattagctatgagcctgaggtgatgatcatgtcaacataaccatcaacgttctaccatggctagtcatagcaacaaaggcaaaggcatagcagaaggatcgtctcaaccgcaatcgcaaccgcaaccacaaccacaccaaccgcaatcacctcctaacccgccagcgttaagccggtacgagtcacagaaacgacgagactggaacacgttttgtcaatacctgcgtaaccaacagccaccggttcacatctcgcagtgtggatcaaaccacatcctcgatttcctccaatatctcgaccagtttgggaagacaaaggttcatatccatggatgcgttttcttcggacaggttgagccagcgggacagtgtaactgtcctttaaaacaagcgtgggggagtttagatgctttgatcggacggctaagagcggctttcgaggagaacggaggattgccggagagaaacccttttgccggcggcggaattagggtttttctgagggaagtgagagattcacaggcgaaggcaagaggagttccgtacaagaaaagaaaaaagaggaagaagaggaatcctatgaagagtcatgatggtgaagatggtactacgggaactagtagtagctccaacttggcttcttagcggaagcaaacaaaaaatctataataaaacaaagtggaattagttaatggtaagcatttaatactctccataatctctattaattttcagtactttaatcctattttgtgatctatttacaattttacatatagagtgaaaagaaacaattctacattcgtttcttgatagtcagctcttaatgcatagttgaattttatacgtatcatacccaaactataagattaatcttgatcttagatcatatacatatatcatcatggtgtgtaccctaagtttcataatcatttttcttaactatttatgtggat

SEQ ID NO: 88876 - protein, 195 aa, Arabidopsis thaliana
  peptide (1)..(195): Ceres Seq. ID no. 12713342
  misc_feature (22)..(154): Pfam Name: Protein of unknown function (DUF640) Pfam Description: Protein of unknown function (DUF640)
  misc_feature (1)..(195): Homolog of NCBI NO: 18412120 NR Description: Expressed protein; protein id: At1g78815.1, by cDNA: 230925. [Arabidopsis thaliana] >gi|25341951|pir||D96817
  misc_feature (1)..(195): Homolog of NCBI NO: 21592379 NR Description: unknown [Arabidopsis thaliana]
  misc_feature (35)..(168): Homolog of NCBI NO: 15219952 NR Description: hypothetical protein; protein id: At1g16910.1
  misc_feature (16)..(191): Homolog of NCBI NO: 18406012 NR Description: expressed protein; protein id: At2g42610.1, by cDNA: gi_6691164 [Arabidopsis thaliana]
  misc_feature (15)..(173): Homolog of NCBI NO: 15233942 NR Description: putative protein; protein id: At4g18610.1
  misc_feature (33)..(195): Homolog of NCBI NO: 34907938 NR Description: B1088C09.17 [Oryza sativa (japonica
  misc_feature (14)..(170): Homolog of NCBI NO: 18390725 NR Description: expressed protein; protein id: At1g07090.1, by cDNA: 28780. [Arabidopsis thaliana] >gi|25341953|pir||G86205
  misc_feature (27)..(172): Homolog of NCBI NO: 15241821 NR Description: putative protein; protein id: At5g28490.1
  misc_feature (5)..(181): Homolog of NCBI NO: 38344650 NR Description: OSJNBb0072M01.12 [Oryza sativa (japonica
  misc_feature (29)..(169): Homolog of NCBI NO: 15229310 NR Description: unknown protein; protein id: At3g04510.1 thaliana] >gi|7547110|gb|AAF63782.1| unknown protein [Arabidopsis
MASHSNKGKGIAEGSSQPQSQPQPQPHQPQSPPNPPALSRYESQKRRDWNTFCQYLRNQQPPVHISQCGSNHILDFLQYLDQFGKTKVHIHGCVFFGQVEPAGQCNCPLKQAWGSLDALIGRLRAAFEENGGLPERNPFAGGGIRVFLREVRDSQAKARGVPYKKRKKRKKRNPMKSHDGEDGTTGTSSSSNLAS

SEQ ID NO: 88877 - DNA, 450 bp, Arabidopsis thaliana
  misc_feature (1)..(450): Ceres Seq. ID no. 12713370
  misc_feature: MA Experiment ID: 20000180 Result: Up-regulated in Transcription
  misc_feature: MA Experiment 20000180 PARAMETER Experiment Name: At_Germinating_Seeds_P Parameter: Age (hr) Value: 24 vs. 0
  misc_feature: MA Experiment 20000180 PARAMETER Experiment Name: At_Germinating_Seeds_P Parameter: Tissue Value: Germinating Seeds
  misc_feature: MA Experiment ID: 20000185 Result: Down-regulated in Transcription
  misc_feature: MA Experiment 20000185 PARAMETER Experiment Name: At_Roots__P Parameter: Age (day) Value: 7 vs. 21
  misc_feature: MA Experiment 20000185 PARAMETER Experiment Name: At_Roots__P Parameter: Organism Value: A. thaliana
  misc_feature: MA Experiment 20000185 PARAMETER Experiment Name: At_Roots__P Parameter: Tissue Value: Roots vs. Whole Plant
  misc_feature: MA Experiment ID: 20000439 Result: Down-regulated in Transcription
  misc_feature: MA Experiment 20000439 PARAMETER Experiment Name: At_Roots__P Parameter: Age (day) Value: 14 vs. 21
  misc_feature: MA Experiment 20000439 PARAMETER Experiment Name: At_Roots__P Parameter: Organism Value: A. thaliana
  misc_feature: MA Experiment 20000439 PARAMETER Experiment Name: At_Roots__P Parameter: Tissue Value: Roots vs. Whole Plant
atggctgcttcagtgatgctatcttcggtgacattgaaaccagctggtttcacggtggagaagacggcggctagaggattaccgtcgctcacaagagctcgtccctccttcaaaattgtcgccagtggcgtcaagaagatcaagaccgacaagcccttcggaattaacggcagcatggacttgagggacggcgtcgacgcctccggcagaaagggcaagggatacggtgtttacaagtacgtcgacaagtatggagctaacgtcgatggatacagtcctatttacaacgagaacgagtggtcagcgagtgggaggagtcaccggattggcaatttgggcggtaactctcgccggaattcttgccggaggtgctcttcttgtgtacaacacaagtgctttggctcagtaaatcttaaagttgttagcgcatgtgtaatcatgtttctataa

SEQ ID NO: 88878 - protein, 149 aa, Arabidopsis thaliana
  peptide (1)..(149): Ceres Seq. ID no. 12713371
  misc_feature (42)..(113): Pfam Name: Photosystem II 10 kDa polypeptide PsbR Pfam Description: Photosystem II 10 kDa polypeptide PsbR
  misc_feature (1)..(113): Homolog of NCBI NO: 15219268 NR Description: photosystem II polypeptide, putative; protein id: supported by cDNA: 110067., supported by cDNA: gi_17979202, by cDNA: gi_20465468 [Arabidopsis thaliana]
  misc_feature (1)..(113): Homolog of NCBI NO: 1346871 NR Description: Photosystem II 10 kDa polypeptide, chloroplast
  misc_feature (4)..(113): Homolog of NCBI NO: 28207611 NR Description: photosystem II 10kDa polypeptide [Brassica rapa
  misc_feature (3)..(113): Homolog of NCBI NO: 131399 NR Description: Photosystem II 10 kDa polypeptide, chloroplast
  misc_feature (3)..(113): Homolog of NCBI NO: 3914471 NR Description: Photosystem II 10 kDa polypeptide, chloroplast >gi|1217642|emb|CAA65231.1| PSII polypeptide [Lycopersicon
  misc_feature (3)..(113): Homolog of NCBI NO: 21491 NR Description: ST-LS1 protein (AA 1-138) [Solanum tuberosum]
  misc_feature (1)..(113): Homolog of NCBI NO: 3914472 NR Description: Photosystem II 10 kDa polypeptide, chloroplast
  misc_feature (10)..(113): Homolog of NCBI NO: 1418984 NR Description: photosystem II 10 kD polypeptide [Lycopersicon
  misc_feature (1)..(113): Homolog of NCBI NO: 131400 NR Description: Photosystem II 10 kDa polypeptide, chloroplast
  misc_feature (1)..(113): Homolog of NCBI NO: 33694227 NR Description: 10 kDa photosystem II polypeptide [Trifolium
MAASVMLSSVTLKPAGFTVEKTAARGLPSLTRARPSFKIVASGVKKIKTDKPFGINGSMDLRDGVDASGRKGKGYGVYKYVDKYGANVDGYSPIYNENEWSASGRSHRIGNLGGNSRRNSCRRCSSCVQHKCFGSVNLKVVSACVIMFL

SEQ ID NO: 88879 - protein, 144 aa, Arabidopsis thaliana
  peptide (1)..(144): Ceres Seq. ID no. 12713372
  misc_feature (37)..(108): Pfam Name: Photosystem II 10 kDa polypeptide PsbR Pfam Description: Photosystem II 10 kDa polypeptide PsbR
  misc_feature (1)..(108): Homolog of NCBI NO: 15219268 NR Description: photosystem II polypeptide, putative; protein id: supported by cDNA: 110067., supported by cDNA: gi_17979202, by cDNA: gi_20465468 [Arabidopsis thaliana]
  misc_feature (1)..(108): Homolog of NCBI NO: 1346871 NR Description: Photosystem II 10 kDa polypeptide, chloroplast
  misc_feature (1)..(108): Homolog of NCBI NO: 28207611 NR Description: photosystem II 10kDa polypeptide [Brassica rapa
  misc_feature (1)..(108): Homolog of NCBI NO: 131399 NR Description: Photosystem II 10 kDa polypeptide, chloroplast
  misc_feature (1)..(108): Homolog of NCBI NO: 3914471 NR Description: Photosystem II 10 kDa polypeptide, chloroplast >gi|1217642|emb|CAA65231.1| PSII polypeptide [Lycopersicon
  misc_feature (1)..(108): Homolog of NCBI NO: 21491 NR Description: ST-LS1 protein (AA 1-138) [Solanum tuberosum]
  misc_feature (1)..(108): Homolog of NCBI NO: 3914472 NR Description: Photosystem II 10 kDa polypeptide, chloroplast
  misc_feature (5)..(108): Homolog of NCBI NO: 1418984 NR Description: photosystem II 10 kD polypeptide [Lycopersicon
  misc_feature (1)..(108): Homolog of NCBI NO: 131400 NR Description: Photosystem II 10 kDa polypeptide, chloroplast
  misc_feature (1)..(108): Homolog of NCBI NO: 33694227 NR Description: 10 kDa photosystem II polypeptide [Trifolium
MLSSVTLKPAGFTVEKTAARGLPSLTRARPSFKIVASGVKKIKTDKPFGINGSMDLRDGVDASGRKGKGYGVYKYVDKYGANVDGYSPIYNENEWSASGRSHRIGNLGGNSRRNSCRRCSSCVQHKCFGSVNLKVVSACVIMFL

SEQ ID NO: 88880 - protein, 91 aa, Arabidopsis thaliana
  peptide (1)..(91): Ceres Seq. ID no. 12713373
  misc_feature (1)..(55): Pfam Name: Photosystem II 10 kDa polypeptide PsbR Pfam Description: Photosystem II 10 kDa polypeptide PsbR
  misc_feature (1)..(55): Homolog of NCBI NO: 15219268 NR Description: photosystem II polypeptide, putative; protein id: supported by cDNA: 110067., supported by cDNA: gi_17979202, by cDNA: gi_20465468 [Arabidopsis thaliana]
  misc_feature (1)..(55): Homolog of NCBI NO: 1346871 NR Description: Photosystem II 10 kDa polypeptide, chloroplast
  misc_feature (1)..(55): Homolog of NCBI NO: 28207611 NR Description: photosystem II 10kDa polypeptide [Brassica rapa
  misc_feature (1)..(55): Homolog of NCBI NO: 131399 NR Description: Photosystem II 10 kDa polypeptide, chloroplast
  misc_feature (1)..(55): Homolog of NCBI NO: 3914471 NR Description: Photosystem II 10 kDa polypeptide, chloroplast >gi|1217642|emb|CAA65231.1| PSII polypeptide [Lycopersicon
  misc_feature (1)..(55): Homolog of NCBI NO: 21491 NR Description: ST-LS1 protein (AA 1-138) [Solanum tuberosum]
  misc_feature (1)..(55): Homolog of NCBI NO: 3914472 NR Description: Photosystem II 10 kDa polypeptide, chloroplast
  misc_feature (1)..(55): Homolog of NCBI NO: 1418984 NR Description: photosystem II 10 kD polypeptide [Lycopersicon
  misc_feature (1)..(55): Homolog of NCBI NO: 131400 NR Description: Photosystem II 10 kDa polypeptide, chloroplast
  misc_feature (1)..(55): Homolog of NCBI NO: 33694227 NR Description: 10 kDa photosystem II polypeptide [Trifolium
MDLRDGVDASGRKGKGYGVYKYVDKYGANVDGYSPIYNENEWSASGRSHRIGNLGGNSRRNSCRRCSSCVQHKCFGSVNLKVVSACVIMFL

SEQ ID NO: 88881 - DNA, 1092 bp, Arabidopsis thaliana
  misc_feature (1)..(1092): Ceres Seq. ID no. 12713449
  misc_feature: MA Experiment ID: 20000180 Result: Down-regulated in Transcription
  misc_feature: MA Experiment 20000180 PARAMETER Experiment Name: At_Germinating_Seeds_P Parameter: Age (hr) Value: 24 vs. 0
  misc_feature: MA Experiment 20000180 PARAMETER Experiment Name: At_Germinating_Seeds_P Parameter: Tissue Value: Germinating Seeds
  misc_feature: MA Experiment ID: 20000234 Result: Up-regulated in Transcription
  misc_feature: MA Experiment 20000234 PARAMETER Experiment Name: At_Siliques_P Parameter: Age (day) Value: 21
  misc_feature: MA Experiment 20000234 PARAMETER Experiment Name: At_Siliques_P Parameter: Organism Value: A. thaliana
  misc_feature: MA Experiment 20000234 PARAMETER Experiment Name: At_Siliques_P Parameter: Plant Line Value: WS
  misc_feature: MA Experiment 20000234 PARAMETER Experiment Name: At_Siliques_P Parameter: Tissue Value: Less Than 5mm Siliques vs. Whole Plant
  misc_feature: MA Experiment ID: 20000265 Result: Up-regulated in Transcription
  misc_feature: MA Experiment 20000265 PARAMETER Experiment Name: At_Open_Flower_P Parameter: Age (day) Value: 21
  misc_feature: MA Experiment 20000265 PARAMETER Experiment Name: At_Open_Flower_P Parameter: Plant Line Value: WS
  misc_feature: MA Experiment 20000265 PARAMETER Experiment Name: At_Open_Flower_P Parameter: Tissue Value: Closed Flower vs. Whole Plant
  misc_feature: MA Experiment ID: 20000437 Result: Down-regulated in Transcription
  misc_feature: MA Experiment 20000437 PARAMETER Experiment Name: At_Drought_P Parameter: Age (day) Value: 8
  misc_feature: MA Experiment 20000437 PARAMETER Experiment Name: At_Drought_P Parameter: Organism Value: A. thaliana
  misc_feature: MA Experiment 20000437 PARAMETER Experiment Name: At_Drought_P Parameter: Plant Line Value: WS
  misc_feature: MA Experiment 20000437 PARAMETER Experiment Name: At_Drought_P Parameter: Timepoint (hr) Value: 24
  misc_feature: MA Experiment 20000437 PARAMETER Experiment Name: At_Drought_P Parameter: Tissue Value: Whole Plant
  misc_feature: MA Experiment 20000437 PARAMETER Experiment Name: At_Drought_P Parameter: Treatment Value: Drought vs. No Drought
  misc_feature: MA Experiment ID: 20000495 Result: Up-regulated in Transcription
  misc_feature: MA Experiment 20000495 PARAMETER Experiment Name: At_Guard_Cells_P Parameter: Harvest Date Value: 8/2/2002
  misc_feature: MA Experiment 20000495 PARAMETER Experiment Name: At_Guard_Cells_P Parameter: Organism Value: A. thaliana
  misc_feature: MA Experiment 20000495 PARAMETER Experiment Name: At_Guard_Cells_P Parameter: Tissue Value: Guard Cells vs. Leaves
atgtcttctccactactctctctcacctcattgccactaattctcctcacctcatcatcccttttgtctccattagaggtcaatcttttaaaactcaaagatttcgcttttgtctttatatcttacttttgtgagattcaaagggatgatctttgttgtgttgagttaacagagaggttgaaagagaagatagaggaaacatttgggtgtgagtatgagctttttattgaattcacaggtttgattagttggtgcaaaggagctagcattggttggcatagtgatgataacagatcatatctaaaacaaagagattttgcgagtggtgaaccagtaaccgttgctccatcggctggtgatgttatcatgtacacagctgatgaccggaatattcactcagttgatgaggtaacagatggagaaagattgactcttgcactctggtttagccgggactcatcacatgacgaagattccaagcttctttctcgtctttcacaatgtacatcacatgaagtgtgcctccctttgcctgcatccactaacatgtactggttctgtcctcatcaagatggttctaatcaaaacataggttttgatgtttgcgttgcgaggttgcatcttcttggttttgatgtacatagcttacaaggcgaagatcattctacggatgcctctgaacaacttatgggaccactacaattagctaaaggaggaaagttactcacccgaaaatttgccaacattcttcatgctcttcaggttgttcagttctaccattggaaagcttctgaactcgtaacttctaatgtcgaaaatgacacattagaagaggtgaaagctatgtcccactctcagttggaaactatcaatgccctgaaatcagttttcctgctagatgagaacctcgtagccacaacttttggatattcgtgctctggtgaggatcgaaaggattcactcgacttgacgggtatagctctcgcggttacctcttgggaagagtatagctgtaagttactcaaggagctattatcatccttgcctcaatggaaaacttatcaaactatacacaaagtggaatctgattag

SEQ ID NO: 88882 - protein, 363 aa, Arabidopsis thaliana
  peptide (1)..(363): Ceres Seq. ID no. 12713450
  misc_feature (106)..(363): Homolog of NCBI NO: 15220642 NR Description: hypothetical protein; protein id: At1g68080.1
  misc_feature (1)..(108): Homolog of NCBI NO: 15220642 NR Description: hypothetical protein; protein id: At1g68080.1
MSSPLLSLTSLPLILLTSSSLLSPLEVNLLKLKDFAFVFISYFCEIQRDDLCCVELTERLKEKIEETFGCEYELFIEFTGLISWCKGASIGWHSDDNRSYLKQRDFASGEPVTVAPSAGDVIMYTADDRNIHSVDEVTDGERLTLALWFSRDSSHDEDSKLLSRLSQCTSHEVCLPLPASTNMYWFCPHQDGSNQNIGFDVCVARLHLLGFDVHSLQGEDHSTDASEQLMGPLQLAKGGKLLTRKFANILHALQVVQFYHWKASELVTSNVENDTLEEVKAMSHSQLETINALKSVFLLDENLVATTFGYSCSGEDRKDSLDLTGIALAVTSWEEYSCKLLKELLSSLPQWKTYQTIHKVESD

SEQ ID NO: 88883 - protein, 241 aa, Arabidopsis thaliana; identical to SEQ ID NO: 70722
  peptide (1)..(241): Ceres Seq. ID no. 12713451
  misc_feature (1)..(241): Homolog of NCBI NO: 15220642 NR Description: hypothetical protein; protein id: At1g68080.1

SEQ ID NO: 88884 - protein, 181 aa, Arabidopsis thaliana
  peptide (1)..(181): Ceres Seq. ID no. 12713452
  misc_feature (1)..(181): Homolog of NCBI NO: 15220642 NR Description: hypothetical protein; protein id: At1g68080.1
MYWFCPHQDGSNQNIGFDVCVARLHLLGFDVHSLQGEDHSTDASEQLMGPLQLAKGGKLLTRKFANILHALQVVQFYHWKASELVTSNVENDTLEEVKAMSHSQLETINALKSVFLLDENLVATTFGYSCSGEDRKDSLDLTGIALAVTSWEEYSCKLLKELLSSLPQWKTYQTIHKVESD

SEQ ID NO: 88885 - DNA, 1047 bp, Arabidopsis thaliana
  misc_feature (1)..(1047): Ceres Seq. ID no. 12713453
  misc_feature: MA Experiment ID: 20000436 Result: Down-regulated in Transcription
  misc_feature: MA Experiment 20000436 PARAMETER Experiment Name: At_Drought_P Parameter: Age (day) Value: 7
  misc_feature: MA Experiment 20000436 PARAMETER Experiment Name: At_Drought_P Parameter: Organism Value: A. thaliana
  misc_feature: MA Experiment 20000436 PARAMETER Experiment Name: At_Drought_P Parameter: Plant Line Value: WS
  misc_feature: MA Experiment 20000436 PARAMETER Experiment Name: At_Drought_P Parameter: Timepoint (hr) Value: 12
  misc_feature: MA Experiment 20000436 PARAMETER Experiment Name: At_Drought_P Parameter: Tissue Value: Whole Plant
  misc_feature: MA Experiment 20000436 PARAMETER Experiment Name: At_Drought_P Parameter: Treatment Value: Drought vs. No Drought
  misc_feature: MA Experiment ID: 20000439 Result: Up-regulated in Transcription
  misc_feature: MA Experiment 20000439 PARAMETER Experiment Name: At_Roots__P Parameter: Age (day) Value: 14 vs. 21
  misc_feature: MA Experiment 20000439 PARAMETER Experiment Name: At_Roots__P Parameter: Organism Value: A. thaliana
  misc_feature: MA Experiment 20000439 PARAMETER Experiment Name: At_Roots__P Parameter: Tissue Value: Roots vs. Whole Plant
atgggcatcgatctttctcttaagctcgaggccgaggagaaaaagaaagagatagaaggatcgaaacatagccgtgagaacaaagaagacgaagaacatgatgctagtggtgatgaagatgaacaaatggtgaaagaagacgaagatgattcttcttctttaggtttaagaacccgagaagaagaaaacgaacgtgaagagctcttgcagctacagatccagatggaaagtgtgaaagaagagaatactaggttgaggaagcttgtcgagcagactcttgaagattatcgtcatcttgagatgaaattcccggttatcgataaaaccaagaagatggatcttgaaatgttccttggagtacaaggcaaacgatgtgtggatataacaagtaaggctcggaaaagaggagctgagagatctccgtcaatggaaagagaaatagggctttcactttctctagagaaaaaacagaaacaagaagagagcaaagaagctgttcagtctcatcaccaaagatacaatagtagcagcttagatatgaatatgccacgtatcatttcatcttctcaaggtaatagaaaggccagggtgtccgtgagggcgagatgtgagaccgcaacaatgaatgatggatgccaatggaggaagtacggtcagaaaaccgcgaaagggaatccatgtcctcgagcttattaccgatgcaccgtggctccaggatgtcccgttagaaaacaggtgcaaaggtgtttagaagacatgtcaatactgataacaacctacgaaggaacacataaccatccacttccggtcggagcaacagccatggcttccactgcctctacttctccattcttgttactcgattccagtgacaacctctctcatccttcctattaccaaactcctcaagccatagactcttctttgattacatacccacaaaatagcagctacaacaatcgaaccataagaagcttgaactttgatggtccatctagaggagatcacgtttcatcttctcaaaaccgattaaattggatgatgtag

SEQ ID NO: 88886 - protein, 348 aa, Arabidopsis thaliana
  peptide (1)..(348): Ceres Seq. ID no. 12713454
  misc_feature (208)..(268): Pfam Name: WRKY DNA -binding domain Pfam Description: WRKY DNA -binding domain
  misc_feature (1)..(348): Homolog of NCBI NO: 15221291 NR Description: WRKY family transcription factor; protein id: supported by cDNA: gi_15990587 [Arabidopsis thaliana]
  misc_feature (61)..(331): Homolog of NCBI NO: 15234284 NR Description: WRKY family transcription factor; protein id: supported by cDNA: gi_19172391 [Arabidopsis thaliana]
  misc_feature (40)..(340): Homolog of NCBI NO: 18407554 NR Description: WRKY family transcription factor; protein id: supported by cDNA: gi_12658409, supported by cDNA: gi_15810266 thaliana] >gi|20978780|sp|Q9C519|WRK6_ARATH WRKY transcription
  misc_feature (16)..(346): Homolog of NCBI NO: 15242221 NR Description: WRKY family transcription factor; protein id:
  misc_feature (1)..(297): Homolog of NCBI NO: 18415833 NR Description: WRKY family transcription factor; protein id: supported by cDNA: gi_15990589 [Arabidopsis thaliana]
  misc_feature (24)..(297): Homolog of NCBI NO: 11357339 NR Description: hypothetical protein AT4g22070 - Arabidopsis >gi|2961352|emb|CAA18110.1| putative protein [Arabidopsis >gi|7269052|emb|CAB79162.1| putative protein [Arabidopsis
  misc_feature (59)..(294): Homolog of NCBI NO: 30686070 NR Description: WRKY family transcription factor [Arabidopsis >gi|20978774|sp|Q8VWV6|WR61_ARATH Probable WRKY transcription
  misc_feature (186)..(292): Homolog of NCBI NO: 30013667 NR Description: Avr9/Cf-9 rapidly elicited protein 126 [Nicotiana
  misc_feature (3)..(341): Homolog of NCBI NO: 15233516 NR Description: WRKY family transcription factor; protein id: supported by cDNA: gi_15990593 [Arabidopsis thaliana]
  misc_feature (193)..(290): Homolog of NCBI NO: 5042446 NR Description: putative WRKY DNA binding protein [Oryza sativa
MGIDLSLKLEAEEKKKEIEGSKHSRENKEDEEHDASGDEDEQMVKEDEDDSSSLGLRTREEENEREELLQLQIQMESVKEENTRLRKLVEQTLEDYRHLEMKFPVIDKTKKMDLEMFLGVQGKRCVDITSKARKRGAERSPSMEREIGLSLSLEKKQKQEESKEAVQSHHQRYNSSSLDMNMPRIISSSQGNRKARVSVRARCETATMNDGCQWRKYGQKTAKGNPCPRAYYRCTVAPGCPVRKQVQRCLEDMSILITTYEGTHNHPLPVGATAMASTASTSPFLLLDSSDNLSHPSYYQTPQAIDSSLITYPQNSSYNNRTIRSLNFDGPSRGDHVSSSQNRLNWMM

SEQ ID NO: 88887 - protein, 306 aa, Arabidopsis thaliana
  peptide (1)..(306): Ceres Seq. ID no. 12713455
  misc_feature (166)..(226): Pfam Name: WRKY DNA -binding domain Pfam Description: WRKY DNA -binding domain
  misc_feature (1)..(306): Homolog of NCBI NO: 15221291 NR Description: WRKY family transcription factor; protein id: supported by cDNA: gi_15990587 [Arabidopsis thaliana]
  misc_feature (19)..(289): Homolog of NCBI NO: 15234284 NR Description: WRKY family transcription factor; protein id: supported by cDNA: gi_19172391 [Arabidopsis thaliana]
  misc_feature (1)..(298): Homolog of NCBI NO: 18407554 NR Description: WRKY family transcription factor; protein id: supported by cDNA: gi_12658409, supported by cDNA: gi_15810266 thaliana] >gi|20978780|sp|Q9C519|WRK6_ARATH WRKY transcription
  misc_feature (1)..(304): Homolog of NCBI NO: 15242221 NR Description: WRKY family transcription factor; protein id:
  misc_feature (1)..(255): Homolog of NCBI NO: 18415833 NR Description: WRKY family transcription factor; protein id: supported by cDNA: gi_15990589 [Arabidopsis thaliana]
  misc_feature (1)..(255): Homolog of NCBI NO: 11357339 NR Description: hypothetical protein AT4g22070 - Arabidopsis >gi|2961352|emb|CAA18110.1| putative protein [Arabidopsis >gi|7269052|emb|CAB79162.1| putative protein [Arabidopsis
  misc_feature (17)..(252): Homolog of NCBI NO: 30686070 NR Description: WRKY family transcription factor [Arabidopsis >gi|20978774|sp|Q8VWV6|WR61_ARATH Probable WRKY transcription
  misc_feature (144)..(250): Homolog of NCBI NO: 30013667 NR Description: Avr9/Cf-9 rapidly elicited protein 126 [Nicotiana
  misc_feature (1)..(299): Homolog of NCBI NO: 15233516 NR Description: WRKY family transcription factor; protein id: supported by cDNA: gi_15990593 [Arabidopsis thaliana]
  misc_feature (151)..(248): Homolog of NCBI NO: 5042446 NR Description: putative WRKY DNA binding protein [Oryza sativa
MVKEDEDDSSSLGLRTREEENEREELLQLQIQMESVKEENTRLRKLVEQTLEDYRHLEMKFPVIDKTKKMDLEMFLGVQGKRCVDITSKARKRGAERSPSMEREIGLSLSLEKKQKQEESKEAVQSHHQRYNSSSLDMNMPRIISSSQGNRKARVSVRARCETATMNDGCQWRKYGQKTAKGNPCPRAYYRCTVAPGCPVRKQVQRCLEDMSILITTYEGTHNHPLPVGATAMASTASTSPFLLLDSSDNLSHPSYYQTPQAIDSSLITYPQNSSYNNRTIRSLNFDGPSRGDHVSSSQNRLNWMM

SEQ ID NO: 88888 - protein, 274 aa, Arabidopsis thaliana
  peptide (1)..(274): Ceres Seq. ID no. 12713456
  misc_feature (134)..(194): Pfam Name: WRKY DNA -binding domain Pfam Description: WRKY DNA -binding domain
  misc_feature (1)..(274): Homolog of NCBI NO: 15221291 NR Description: WRKY family transcription factor; protein id: supported by cDNA: gi_15990587 [Arabidopsis thaliana]
  misc_feature (1)..(257): Homolog of NCBI NO: 15234284 NR Description: WRKY family transcription factor; protein id: supported by cDNA: gi_19172391 [Arabidopsis thaliana]
  misc_feature (1)..(266): Homolog of NCBI NO: 18407554 NR Description: WRKY family transcription factor; protein id: supported by cDNA: gi_12658409, supported by cDNA: gi_15810266 thaliana] >gi|20978780|sp|Q9C519|WRK6_ARATH WRKY transcription
  misc_feature (1)..(272): Homolog of NCBI NO: 15242221 NR Description: WRKY family transcription factor; protein id:
  misc_feature (1)..(223): Homolog of NCBI NO: 18415833 NR Description: WRKY family transcription factor; protein id: supported by cDNA: gi_15990589 [Arabidopsis thaliana]
  misc_feature (1)..(223): Homolog of NCBI NO: 11357339 NR Description: hypothetical protein AT4g22070 - Arabidopsis >gi|2961352|emb|CAA18110.1| putative protein [Arabidopsis >gi|7269052|emb|CAB79162.1| putative protein [Arabidopsis
  misc_feature (1)..(220): Homolog of NCBI NO: 30686070 NR Description: WRKY family transcription factor [Arabidopsis >gi|20978774|sp|Q8VWV6|WR61_ARATH Probable WRKY transcription
  misc_feature (112)..(218): Homolog of NCBI NO: 30013667 NR Description: Avr9/Cf-9 rapidly elicited protein 126 [Nicotiana
  misc_feature (1)..(267): Homolog of NCBI NO: 15233516 NR Description: WRKY family transcription factor; protein id: supported by cDNA: gi_15990593 [Arabidopsis thaliana]
  misc_feature (119)..(216): Homolog of NCBI NO: 5042446 NR Description: putative WRKY DNA binding protein [Oryza sativa
MESVKEENTRLRKLVEQTLEDYRHLEMKFPVIDKTKKMDLEMFLGVQGKRCVDITSKARKRGAERSPSMEREIGLSLSLEKKQKQEESKEAVQSHHQRYNSSSLDMNMPRIISSSQGNRKARVSVRARCETATMNDGCQWRKYGQKTAKGNPCPRAYYRCTVAPGCPVRKQVQRCLEDMSILITTYEGTHNHPLPVGATAMASTASTSPFLLLDSSDNLSHPSYYQTPQAIDSSLITYPQNSSYNNRTIRSLNFDGPSRGDHVSSSQNRLNWMM

SEQ ID NO: 88889 - DNA, 1029 bp, Arabidopsis thaliana
  misc_feature (1)..(1029): Ceres Seq. ID no. 12713457
  misc_feature: MA Experiment ID: 20001451 Result: Up-regulated in Transcription
  misc_feature: MA Experiment 20001451 PARAMETER Experiment Name: At_Far-red-induction_P Parameter: Age (day) Value: 7
  misc_feature: MA Experiment 20001451 PARAMETER Experiment Name: At_Far-red-induction_P Parameter: Light Value: Far-red vs. White
  misc_feature: MA Experiment 20001451 PARAMETER Experiment Name: At_Far-red-induction_P Parameter: Organism Value: A. thaliana
  misc_feature: MA Experiment 20001451 PARAMETER Experiment Name: At_Far-red-induction_P Parameter: Plant Line Value: Columbia
  misc_feature: MA Experiment 20001451 PARAMETER Experiment Name: At_Far-red-induction_P Parameter: Timepoint (hr) Value: 24
  misc_feature: MA Experiment 20001451 PARAMETER Experiment Name: At_Far-red-induction_P Parameter: Tissue Value: Whole Plant
atggagagaatatgtgaaatgtggagagaaatgaaagatataacggcaatggtggtggttcaaatagctacggcagggttaaacatatttttcaagctagcaatggaagatggtatgaacccaagtgtactcgtggcctatcgtctcttgtttgctacacttttcatgattcctatatgcttcatctttcaaaggctgatgttactagcattactctcagggttactcggtgtggtgataccaagtatcctaaccattacgggtctagctctaacgtcagcaacattcacctctgctgctggcgttctcactccattggtcactttcatcttcgctgcacttcttaggatggagagtgtacggcttggatcgagcgtagggctggctaaggtttttggaacattgtttggtgttggtggagctcttgtctttatattctatagaggaatagagatccgactatggtcaactcacgttaacctagtgaaccaaccacgtgactcctcacgtgatgctaccactcaccatatttccatccttggggctcttctagttaagataagcaaacaatttggagggccttattggaacgcgactctaatgaacatgatgggaggcgtagtggctatgcttgtcgctctttgctgggaacacgatttagatgaatggagattaggatggaatatcagactattaaccattgcttatgcggcaattctgatttccgggatggtggtagcagtcaacgcatggtgcattgagtctagaggaccgttatttgtatcggtatttagccctgtaggacttgtgatcgtagctcttgttggatcatttttgctagatgaaacacttcatttggggagcataattggtacagtgattatcgttggagcattatacattgtgctatgggctaaaaacaaggaaatgaagagtatgcttacgacatcggatcataatgaaacaaataagactagcaaagatatcacagtcaacaatctcccaacattaagtacaaatgtcccttga

SEQ ID NO: 88890 - protein, 342 aa, Arabidopsis thaliana
  peptide (1)..(342): Ceres Seq. ID no. 12713458
  misc_feature (17)..(342): Homolog of NCBI NO: 15221295 NR Description: MtN21-like protein; protein id: At1g68170.1
  misc_feature (11)..(342): Homolog of NCBI NO: 15222541 NR Description: MtN21 nodulin protein, putative; protein id: [Arabidopsis thaliana] >gi|11761475|gb|AAG40088.1|AC079374_4
  misc_feature (11)..(302): Homolog of NCBI NO: 25518509 NR Description: hypothetical protein F4F7.12 [imported] -
  misc_feature (6)..(185): Homolog of NCBI NO: 38345836 NR Description: OSJNBa0070M12.19 [Oryza sativa (japonica
  misc_feature (183)..(309): Homolog of NCBI NO: 38345836 NR Description: OSJNBa0070M12.19 [Oryza sativa (japonica
  misc_feature (7)..(188): Homolog of NCBI NO: 34894456 NR Description: putative MtN21 [Oryza sativa (japonica
  misc_feature (186)..(312): Homolog of NCBI NO: 34894456 NR Description: putative MtN21 [Oryza sativa (japonica
  misc_feature (14)..(152): Homolog of NCBI NO: 38605909 NR Description: OSJNBb0088C09.3 [Oryza sativa (japonica
  misc_feature (186)..(330): Homolog of NCBI NO: 38605909 NR Description: OSJNBb0088C09.3 [Oryza sativa (japonica
  misc_feature (17)..(185): Homolog of NCBI NO: 5777632 NR Description: CAA303720.1 protein [Oryza sativa]
MERICEMWREMKDITAMVVVQIATAGLNIFFKLAMEDGMNPSVLVAYRLLFATLFMIPICFIFQRLMLLALLSGLLGVVIPSILTITGLALTSATFTSAAGVLTPLVTFIFAALLRMESVRLGSSVGLAKVFGTLFGVGGALVFIFYRGIEIRLWSTHVNLVNQPRDSSRDATTHHISILGALLVKISKQFGGPYWNATLMNMMGGVVAMLVALCWEHDLDEWRLGWNIRLLTIAYAAILISGMVVAVNAWCIESRGPLFVSVFSPVGLVIVALVGSFLLDETLHLGSIIGTVIIVGALYIVLWAKNKEMKSMLTTSDHNETNKTSKDITVNNLPTLSTNVP

SEQ ID NO: 88891 - protein, 336 aa, Arabidopsis thaliana
  peptide (1)..(336): Ceres Seq. ID no. 12713459
  misc_feature (11)..(336): Homolog of NCBI NO: 15221295 NR Description: MtN21-like protein; protein id: At1g68170.1
  misc_feature (5)..(336): Homolog of NCBI NO: 15222541 NR Description: MtN21 nodulin protein, putative; protein id: [Arabidopsis thaliana] >gi|11761475|gb|AAG40088.1|AC079374_4
  misc_feature (5)..(296): Homolog of NCBI NO: 25518509 NR Description: hypothetical protein F4F7.12 [imported] -
  misc_feature (1)..(179): Homolog of NCBI NO: 38345836 NR Description: OSJNBa0070M12.19 [Oryza sativa (japonica
  misc_feature (177)..(303): Homolog of NCBI NO: 38345836 NR Description: OSJNBa0070M12.19 [Oryza sativa (japonica
  misc_feature (1)..(182): Homolog of NCBI NO: 34894456 NR Description: putative MtN21 [Oryza sativa (japonica
  misc_feature (180)..(306): Homolog of NCBI NO: 34894456 NR Description: putative MtN21 [Oryza sativa (japonica
  misc_feature (8)..(146): Homolog of NCBI NO: 38605909 NR Description: OSJNBb0088C09.3 [Oryza sativa (japonica
  misc_feature (180)..(324): Homolog of NCBI NO: 38605909 NR Description: OSJNBb0088C09.3 [Oryza sativa (japonica
  misc_feature (11)..(179): Homolog of NCBI NO: 5777632 NR Description: CAA303720.1 protein [Oryza sativa]
MWREMKDITAMVVVQIATAGLNIFFKLAMEDGMNPSVLVAYRLLFATLFMIPICFIFQRLMLLALLSGLLGVVIPSILTITGLALTSATFTSAAGVLTPLVTFIFAALLRMESVRLGSSVGLAKVFGTLFGVGGALVFIFYRGIEIRLWSTHVNLVNQPRDSSRDATTHHISILGALLVKISKQFGGPYWNATLMNMMGGVVAMLVALCWEHDLDEWRLGWNIRLLTIAYAAILISGMVVAVNAWCIESRGPLFVSVFSPVGLVIVALVGSFLLDETLHLGSIIGTVIIVGALYIVLWAKNKEMKSMLTTSDHNETNKTSKDITVNNLPTLSTNVP

SEQ ID NO: 88892 - protein, 332 aa, Arabidopsis thaliana
  peptide (1)..(332): Ceres Seq. ID no. 12713460
  misc_feature (7)..(332): Homolog of NCBI NO: 15221295 NR Description: MtN21-like protein; protein id: At1g68170.1
  misc_feature (1)..(332): Homolog of NCBI NO: 15222541 NR Description: MtN21 nodulin protein, putative; protein id: [Arabidopsis thaliana] >gi|11761475|gb|AAG40088.1|AC079374_4
  misc_feature (1)..(292): Homolog of NCBI NO: 25518509 NR Description: hypothetical protein F4F7.12 [imported] -
  misc_feature (1)..(175): Homolog of NCBI NO: 38345836 NR Description: OSJNBa0070M12.19 [Oryza sativa (japonica
  misc_feature (173)..(299): Homolog of NCBI NO: 38345836 NR Description: OSJNBa0070M12.19 [Oryza sativa (japonica
  misc_feature (1)..(178): Homolog of NCBI NO: 34894456 NR Description: putative MtN21 [Oryza sativa (japonica
  misc_feature (176)..(302): Homolog of NCBI NO: 34894456 NR Description: putative MtN21 [Oryza sativa (japonica
  misc_feature (4)..(142): Homolog of NCBI NO: 38605909 NR Description: OSJNBb0088C09.3 [Oryza sativa (japonica
  misc_feature (176)..(320): Homolog of NCBI NO: 38605909 NR Description: OSJNBb0088C09.3 [Oryza sativa (japonica
  misc_feature (7)..(175): Homolog of NCBI NO: 5777632 NR Description: CAA303720.1 protein [Oryza sativa]
MKDITAMVVVQIATAGLNIFFKLAMEDGMNPSVLVAYRLLFATLFMIPICFIFQRLMLLALLSGLLGVVIPSILTITGLALTSATFTSAAGVLTPLVTFIFAALLRMESVRLGSSVGLAKVFGTLFGVGGALVFIFYRGIEIRLWSTHVNLVNQPRDSSRDATTHHISILGALLVKISKQFGGPYWNATLMNMMGGVVAMLVALCWEHDLDEWRLGWNIRLLTIAYAAILISGMVVAVNAWCIESRGPLFVSVFSPVGLVIVALVGSFLLDETLHLGSIIGTVIIVGALYIVLWAKNKEMKSMLTTSDHNETNKTSKDITVNNLPTLSTNVP

SEQ ID NO: 88893 - DNA, 1293 bp, Arabidopsis thaliana
  misc_feature (1)..(1293): Ceres Seq. ID no. 12713545
  misc_feature: MA Experiment ID: 108461 Result: Up-regulated in Transcription
  misc_feature: MA Experiment 108461 PARAMETER Experiment Name: At_Germinating_Seeds_cDNA_P Parameter: Age (day) Value: 1 vs. 0
  misc_feature: MA Experiment 108461 PARAMETER Experiment Name: At_Germinating_Seeds_cDNA_P Parameter: Tissue Value: Germinating Seeds
  misc_feature: MA Experiment ID: 108462 Result: Up-regulated in Transcription
  misc_feature: MA Experiment 108462 PARAMETER Experiment Name: At_Germinating_Seeds_cDNA_P Parameter: Age (day) Value: 2 vs. 0
  misc_feature: MA Experiment 108462 PARAMETER Experiment Name: At_Germinating_Seeds_cDNA_P Parameter: Tissue Value: Germinating Seeds
  misc_feature: MA Experiment ID: 108463 Result: Up-regulated in Transcription
  misc_feature: MA Experiment 108463 PARAMETER Experiment Name: At_Germinating_Seeds_cDNA_P Parameter: Age (day) Value: 3 vs. 0
  misc_feature: MA Experiment 108463 PARAMETER Experiment Name: At_Germinating_Seeds_cDNA_P Parameter: Tissue Value: Germinating Seeds
  misc_feature: MA Experiment ID: 108464 Result: Up-regulated in Transcription
  misc_feature: MA Experiment 108464 PARAMETER Experiment Name: At_Germinating_Seeds_cDNA_P Parameter: Age (day) Value: 4 vs. 0
  misc_feature: MA Experiment 108464 PARAMETER Experiment Name: At_Germinating_Seeds_cDNA_P Parameter: Tissue Value: Germinating Seeds
  misc_feature: MA Experiment ID: 108473 Result: Down-regulated in Transcription
  misc_feature: MA Experiment 108473 PARAMETER Experiment Name: At_Drought_Flowers_cDNA_P Parameter: Timepoint (hr) Value: 7 d
  misc_feature: MA Experiment 108473 PARAMETER Experiment Name: At_Drought_Flowers_cDNA_P Parameter: Tissue Value: Flower
  misc_feature: MA Experiment 108473 PARAMETER Experiment Name: At_Drought_Flowers_cDNA_P Parameter: Treatment Value: Drought vs. No Drought
  misc_feature: MA Experiment ID: 108595 Result: Down-regulated in Transcription
  misc_feature: MA Experiment 108595 PARAMETER Experiment Name: At_Ler-pi_Ovule_cDNA_P Parameter: Plant Line Value: null
  misc_feature: MA Experiment ID: 108668 Result: Down-regulated in Transcription
  misc_feature: MA Experiment 108668 PARAMETER Experiment Name: At_2mM_SA_cDNA_P Parameter: Plant Line Value: WS
  misc_feature: MA Experiment 108668 PARAMETER Experiment Name: At_2mM_SA_cDNA_P Parameter: Timepoint (hr) Value: 6
  misc_feature: MA Experiment 108668 PARAMETER Experiment Name: At_2mM_SA_cDNA_P Parameter: Treatment Value: 2mM SA vs. No Treatment
  misc_feature: MA Experiment ID: 20000069 Result: Down-regulated in Transcription
  misc_feature: MA Experiment 20000069 PARAMETER Experiment Name: At_100uM_ABA_Mutants_cDNA_P Parameter: Plant Line Value: CS23
  misc_feature: MA Experiment 20000069 PARAMETER Experiment Name: At_100uM_ABA_Mutants_cDNA_P Parameter: Timepoint (hr) Value: 6
  misc_feature: MA Experiment 20000069 PARAMETER Experiment Name: At_100uM_ABA_Mutants_cDNA_P Parameter: Tissue Value: Aerial
  misc_feature: MA Experiment 20000069 PARAMETER Experiment Name: At_100uM_ABA_Mutants_cDNA_P Parameter: Treatment Value: 100uM ABA vs. No Treatment
  misc_feature: MA Experiment ID: 20000070 Result: Down-regulated in Transcription
  misc_feature: MA Experiment 20000070 PARAMETER Experiment Name: At_100uM_ABA_Mutants_cDNA_P Parameter: Plant Line Value: CS24
  misc_feature: MA Experiment 20000070 PARAMETER Experiment Name: At_100uM_ABA_Mutants_cDNA_P Parameter: Timepoint (hr) Value: 6
  misc_feature: MA Experiment 20000070 PARAMETER Experiment Name: At_100uM_ABA_Mutants_cDNA_P Parameter: Tissue Value: Aerial
  misc_feature: MA Experiment 20000070 PARAMETER Experiment Name: At_100uM_ABA_Mutants_cDNA_P Parameter: Treatment Value: 100uM ABA vs. No Treatment
  misc_feature: MA Experiment ID: 20000071 Result: Down-regulated in Transcription
  misc_feature: MA Experiment 20000071 PARAMETER Experiment Name: At_100uM_ABA_Mutants_cDNA_P Parameter: Plant Line Value: CS8104
  misc_feature: MA Experiment 20000071 PARAMETER Experiment Name: At_100uM_ABA_Mutants_cDNA_P Parameter: Timepoint (hr) Value: 6
  misc_feature: MA Experiment 20000071 PARAMETER Experiment Name: At_100uM_ABA_Mutants_cDNA_P Parameter: Tissue Value: Aerial
  misc_feature: MA Experiment 20000071 PARAMETER Experiment Name: At_100uM_ABA_Mutants_cDNA_P Parameter: Treatment Value: 100uM ABA vs. No Treatment
  misc_feature: MA Experiment ID: 20000072 Result: Down-regulated in Transcription
  misc_feature: MA Experiment 20000072 PARAMETER Experiment Name: At_100uM_ABA_Mutants_cDNA_P Parameter: Plant Line Value: CS8105
  misc_feature: MA Experiment 20000072 PARAMETER Experiment Name: At_100uM_ABA_Mutants_cDNA_P Parameter: Timepoint (hr) Value: 6
  misc_feature: MA Experiment 20000072 PARAMETER Experiment Name: At_100uM_ABA_Mutants_cDNA_P Parameter: Tissue Value: Aerial
  misc_feature: MA Experiment 20000072 PARAMETER Experiment Name: At_100uM_ABA_Mutants_cDNA_P Parameter: Treatment Value: 100uM ABA vs. No Treatment
  misc_feature: MA Experiment ID: 20000087 Result: Down-regulated in Transcription
  misc_feature: MA Experiment 20000087 PARAMETER Experiment Name: At_100uM_ABA_Mutants_cDNA_P Parameter: Plant Line Value: WS
  misc_feature: MA Experiment 20000087 PARAMETER Experiment Name: At_100uM_ABA_Mutants_cDNA_P Parameter: Timepoint (hr) Value: 6
  misc_feature: MA Experiment 20000087 PARAMETER Experiment Name: At_100uM_ABA_Mutants_cDNA_P Parameter: Tissue Value: Aerial
  misc_feature: MA Experiment 20000087 PARAMETER Experiment Name: At_100uM_ABA_Mutants_cDNA_P Parameter: Treatment Value: 100uM ABA vs. No Treatment
  misc_feature: MA Experiment ID: 20000113 Result: Down-regulated in Transcription
  misc_feature: MA Experiment 20000113 PARAMETER Experiment Name: At_42deg_Heat_cDNA_P Parameter: Temperature (deg C) Value: 42 vs. 22
  misc_feature: MA Experiment 20000113 PARAMETER Experiment Name: At_42deg_Heat_cDNA_P Parameter: Timepoint (hr) Value: 8
  misc_feature: MA Experiment 20000113 PARAMETER Experiment Name: At_42deg_Heat_cDNA_P Parameter: Tissue Value: Aerial
  misc_feature: MA Experiment ID: 20000117 Result: Down-regulated in Transcription
  misc_feature: MA Experiment 20000117 PARAMETER Experiment Name: At_100uM_ABA_Mutants_cDNA_P Parameter: Plant Line Value: Columbia
  misc_feature: MA Experiment 20000117 PARAMETER Experiment Name: At_100uM_ABA_Mutants_cDNA_P Parameter: Timepoint (hr) Value: 6
  misc_feature: MA Experiment 20000117 PARAMETER Experiment Name: At_100uM_ABA_Mutants_cDNA_P Parameter: Tissue Value: Aerial
  misc_feature: MA Experiment 20000117 PARAMETER Experiment Name: At_100uM_ABA_Mutants_cDNA_P Parameter: Treatment Value: 100uM ABA vs. No Treatment
atgctgagacttagaaagaagcaacatttggtgtttctactatgcgtgtggtgtttggtggtggattggagcaaagcagaaacagaggaaagtgatggaagtcccatggagaaaacagagcaagctgctctatactctaccattcaaggctttgttggtgaatcttggaatggctcttatctttatcctgacccttgtggctggactcctatccagggtgtgacttgtgatatctatgatgagctttggtatgtaactgctctaagctttgggactatgaaagacaactctcttgcttgttctgaaagtccagtgatcagaccacaactctttgagctcaagcacctcaagtctctctctcttttcaactgcttcacaacgcctaaccgatatctagcttcaatctccgatgaaaagtggttggatctctctaaaagcttggagagacttgagatcagatcaaacccgggactgataggtgaactcccttctgtcatcactaacctcaccaaccttcaatctctggtggtgctagaaaacaagttaacaggtccattgccagtgaatttggccaagttaaccagattgagacgtttagtactgtctggaaaccggttcacagggagaatacctgaggtctacgggttaaccggattgttgatattggatgtgagcaggaatttcttatctggggcgttgcctttaagcgttggaggattgtattctctgctgaaacttgatcttagtaacaattacttggaaggaaagttacctagagagctagagtccttgaagaatctcactctattggacttgagaaacaacagattatcaggtgggttgagtaaagagatccaagagatgacttctttggtagaactggttctgtccaataatcgcctagccggggacttgacaggaataaagtggagaaatctgaagaatttagtggttcttgatctctccaacacaggcttaaaaggggagattcctggttcaatcttggagctcaagaaactgaggtttttgggtttgagcaacaacaatctcggaggcaaactcattccacaaatggaaaccgaaatgcctagtctcagcgcgctttacgtgaatggaaataacatcagcggagagttggaattctctaggtacttttatgagagaatgggaaggagacttggtgtttgggggaaccctaatctgtgttacaacggagatgagaccaagaaccttagcgatcatgttcctttcggagtgaaccaatgtaagagaattaaggcagataaatattag

SEQ ID NO: 88894 - protein, 430 aa, Arabidopsis thaliana; identical to SEQ ID NO: 47881
  peptide (1)..(430): Ceres Seq. ID no. 12713546
  misc_feature (339)..(363): Pfam Name: Leucine Rich Repeat Pfam Description: Leucine Rich Repeat
  misc_feature (1)..(430): Homolog of NCBI NO: 18409119 NR Description: leucine rich repeat protein family; protein id: supported by cDNA: gi_13605580 [Arabidopsis thaliana]
  misc_feature (9)..(428): Homolog of NCBI NO: 15230865 NR Description: leucine rich repeat protein family; protein id:
  misc_feature (36)..(428): Homolog of NCBI NO: 11994758 NR Description: contains similarity to elicitor-inducible
  misc_feature (36)..(422): Homolog of NCBI NO: 15222215 NR Description: leucine rich repeat protein family; protein id:
  misc_feature (1)..(423): Homolog of NCBI NO: 34894182 NR Description: P0439B06.12 [Oryza sativa (japonica
  misc_feature (28)..(406): Homolog of NCBI NO: 15220050 NR Description: leucine rich repeat protein family; protein id: [Arabidopsis thaliana] >gi|22096215|sp|Q9SSD1|TMM_ARATH TOO MANY protein precursor (TMM) >gi|25406630|pir||C96832
  misc_feature (28)..(406): Homolog of NCBI NO: 26452151 NR Description: GPI-anchored protein [Arabidopsis thaliana]
  misc_feature (11)..(415): Homolog of NCBI NO: 7487680 NR Description: hypothetical protein T5F17.10 - Arabidopsis
  misc_feature (11)..(415): Homolog of NCBI NO: 15236148 NR Description: leucine rich repeat protein family (fragment);
  misc_feature (29)..(422): Homolog of NCBI NO: 15228004 NR Description: leucine rich repeat protein family; protein id: [Arabidopsis thaliana] >gi|25408813|pir||D84858 hypothetical

SEQ ID NO: 88895 - protein, 395 aa, Arabidopsis thaliana; identical to SEQ ID NO: 47882
  peptide (1)..(395): Ceres Seq. ID no. 12713547
  misc_feature (304)..(328): Pfam Name: Leucine Rich Repeat Pfam Description: Leucine Rich Repeat
  misc_feature (1)..(395): Homolog of NCBI NO: 18409119 NR Description: leucine rich repeat protein family; protein id: supported by cDNA: gi_13605580 [Arabidopsis thaliana]
  misc_feature (1)..(393): Homolog of NCBI NO: 15230865 NR Description: leucine rich repeat protein family; protein id:
  misc_feature (1)..(393): Homolog of NCBI NO: 11994758 NR Description: contains similarity to elicitor-inducible
  misc_feature (1)..(387): Homolog of NCBI NO: 15222215 NR Description: leucine rich repeat protein family; protein id:
  misc_feature (1)..(388): Homolog of NCBI NO: 34894182 NR Description: P0439B06.12 [Oryza sativa (japonica
  misc_feature (1)..(371): Homolog of NCBI NO: 15220050 NR Description: leucine rich repeat protein family; protein id: [Arabidopsis thaliana] >gi|22096215|sp|Q9SSD1|TMM_ARATH TOO MANY protein precursor (TMM) >gi|25406630|pir||C96832
  misc_feature (1)..(371): Homolog of NCBI NO: 26452151 NR Description: GPI-anchored protein [Arabidopsis thaliana]
  misc_feature (1)..(380): Homolog of NCBI NO: 7487680 NR Description: hypothetical protein T5F17.10 - Arabidopsis
  misc_feature (1)..(380): Homolog of NCBI NO: 15236148 NR Description: leucine rich repeat protein family (fragment);
  misc_feature (1)..(387): Homolog of NCBI NO: 15228004 NR Description: leucine rich repeat protein family; protein id: [Arabidopsis thaliana] >gi|25408813|pir||D84858 hypothetical

SEQ ID NO: 88896 - protein, 338 aa, Arabidopsis thaliana
  peptide (1)..(338): Ceres Seq. ID no. 12713548
  misc_feature (247)..(271): Pfam Name: Leucine Rich Repeat Pfam Description: Leucine Rich Repeat
  misc_feature (1)..(338): Homolog of NCBI NO: 18409119 NR Description: leucine rich repeat protein family; protein id: supported by cDNA: gi_13605580 [Arabidopsis thaliana]
  misc_feature (1)..(336): Homolog of NCBI NO: 15230865 NR Description: leucine rich repeat protein family; protein id:
  misc_feature (1)..(336): Homolog of NCBI NO: 11994758 NR Description: contains similarity to elicitor-inducible
  misc_feature (1)..(330): Homolog of NCBI NO: 15222215 NR Description: leucine rich repeat protein family; protein id:
  misc_feature (1)..(331): Homolog of NCBI NO: 34894182 NR Description: P0439B06.12 [Oryza sativa (japonica
  misc_feature (1)..(314): Homolog of NCBI NO: 15220050 NR Description: leucine rich repeat protein family; protein id: [Arabidopsis thaliana] >gi|22096215|sp|Q9SSD1|TMM_ARATH TOO MANY protein precursor (TMM) >gi|25406630|pir||C96832
  misc_feature (1)..(314): Homolog of NCBI NO: 26452151 NR Description: GPI-anchored protein [Arabidopsis thaliana]
  misc_feature (1)..(323): Homolog of NCBI NO: 7487680 NR Description: hypothetical protein T5F17.10 - Arabidopsis
  misc_feature (1)..(323): Homolog of NCBI NO: 15236148 NR Description: leucine rich repeat protein family (fragment);
  misc_feature (1)..(330): Homolog of NCBI NO: 15228004 NR Description: leucine rich repeat protein family; protein id: [Arabidopsis thaliana] >gi|25408813|pir||D84858 hypothetical
MKDNSLACSESPVIRPQLFELKHLKSLSLFNCFTTPNRYLASISDEKWLDLSKSLERLEIRSNPGLIGELPSVITNLTNLQSLVVLENKLTGPLPVNLAKLTRLRRLVLSGNRFTGRIPEVYGLTGLLILDVSRNFLSGALPLSVGGLYSLLKLDLSNNYLEGKLPRELESLKNLTLLDLRNNRLSGGLSKEIQEMTSLVELVLSNNRLAGDLTGIKWRNLKNLVVLDLSNTGLKGEIPGSILELKKLRFLGLSNNNLGGKLIPQMETEMPSLSALYVNGNNISGELEFSRYFYERMGRRLGVWGNPNLCYNGDETKNLSDHVPFGVNQCKRIKADKY

SEQ ID NO: 88897 - DNA, 2226 bp, Arabidopsis thaliana
  misc_feature (1)..(2226): Ceres Seq. ID no. 12713632
  misc_feature: MA Experiment ID: 20000307 Result: Down-regulated in Transcription
  misc_feature: MA Experiment 20000307 PARAMETER Experiment Name: At_Germinating_Seeds_Sub_P Parameter: Age (hr) Value: 24 vs. 0
  misc_feature: MA Experiment 20000307 PARAMETER Experiment Name: At_Germinating_Seeds_Sub_P Parameter: Organism Value: A. thaliana
  misc_feature: MA Experiment 20000307 PARAMETER Experiment Name: At_Germinating_Seeds_Sub_P Parameter: Plant Line Value: WS
  misc_feature: MA Experiment 20000307 PARAMETER Experiment Name: At_Germinating_Seeds_Sub_P Parameter: Tissue Value: Germinating Seeds
  misc_feature: MA Experiment ID: 20000355 Result: Up-regulated in Transcription
  misc_feature: MA Experiment 20000355 PARAMETER Experiment Name: At_Siliques_Sub_P Parameter: Age (day) Value: 21
  misc_feature: MA Experiment 20000355 PARAMETER Experiment Name: At_Siliques_Sub_P Parameter: Organism Value: A. thaliana
  misc_feature: MA Experiment 20000355 PARAMETER Experiment Name: At_Siliques_Sub_P Parameter: Plant Line Value: WS
  misc_feature: MA Experiment 20000355 PARAMETER Experiment Name: At_Siliques_Sub_P Parameter: Tissue Value: Less Than 5mm Siliques vs. Whole Plant
atgggttctccagattcgtctaggctcgtctttgaagcttttccttaccctgattccttcatgtacggtgttctcatcaaatgcaacgtctggtgtcatttactcgacgccgccattgatctgtaccataggttggtttcggagacgacccaaatcagtaagtttgtgtttccgtctgttttgagggcttgtgcgggttcgagggagcatctgagtgttggtgggaaagtccatgggagaattatcaagggcggtgtagacgacgacgctgtgatagagacgtctctgttgtgtatgtatggtcaaactgggaatttaagtgatgcagagaaggtgttcgatggaatgcctgtgagagaccttgtggcttggagtactcttgtttctagctgtctcgagaatggtgaggtggtgaaagcattgaggatgtttaagtgtatggtggatgatggtgttgagcccgatgctgtgacgatgatcagcgttgtagaaggatgtgctgagcttggatgtttgaggatcgctagatcagttcatggccagataacgaggaaaatgtttgatttagatgaaacattatgcaattctctgcttacaatgtacagtaagtgtggggatttgcttagctcggagagaatctttgagaagatcgccaagaagaatgctgtttcgtggacagccatgatttctagttacaaccgtggcgagttctctgaaaaggcattgagaagtttcagtgagatgataaagtctggaattgagcctaatttggttaccctttatagtgttttgagctcttgtggtttgatagggttgattagagaaggtaagtcggtccatggttttgcagttagacgagagctggatccgaattacgagtcgctttctctggccttagttgagctgtacgctgaatgcgggaaactaagcgactgtgagacagttttacgtgtggttagtgatagaaatattgtcgcatggaactctcttatatctctatatgcacacagaggtatggtgattcaagcattgggcttgtttagacagatggtgacacagagaataaaaccagacgcattcactttggccagctcaatctcagcatgcgagaatgctggtttagttccgctagggaaacagattcacggacatgttataaggacagatgtttcagatgagtttgtgcagaactcgttgatagacatgtactctaaaagcggatctgtggattcagcaagcacagtgtttaatcaaatcaagcataggagcgttgtgacatggaactcaatgctctgcgggttttctcagaatggtaactctgtagaggcaattagcctcttcgactatatgtatcatagctatctcgagatgaatgaagttacatttttggcggttattcaagcatgctcaagcataggttcactggagaaagggaaatgggttcaccacaagctcattatttccggtttaaaggatcttttcactgatacagctctaatcgacatgtatgccaaatgtggagatctcaacgcagctgaaacagtcttcagggccatgtcgagtagaagcattgtgtcatggagtagtatgatcaatgcctatggaatgcacggacggataggatccgccatatctacattcaatcaaatggtggaatccggaacgaaacctaacgaagttgtcttcatgaacgttctctctgcttgtggtcactctggttccgttgaagaaggtaagtactactttaacttgatgaaaagttttggcgtatcaccaaactcagagcatttcgcctgtttcatcgaccttttgagccgttctggtgatctcaaagaagcatatagaaccatcaaggagatgccttttctagctgatgcttcagtttggggttctctggtcaatggatgcagaatccatcagaaaatggatatcatcaaagccattaaaaacgatctttcggatattgttacagatgatacgggatactacactctcttgtccaatatatatgctgaagaaggggaatgggaagaattcaggagactgagatcagctatgaagagttcgaatcttaagaaagttcctgggtacagcgcgattgagattgatcaaaaagttttcagatttggagctggtgaagaaaatcgtatccaaacagatgaaatctataggtttcttggaaatttgcagaatctaacgaatgaagaacatgtcgtagattcttag

SEQ ID NO: 88898 - protein, 741 aa, Arabidopsis thaliana
  peptide (1)..(741): Ceres Seq. ID no. 12713633
  misc_feature (425)..(459): Pfam Name: PPR repeat Pfam Description: PPR repeat
  misc_feature (35)..(736): Homolog of NCBI NO: 15234006 NR Description: putative protein; protein id: At4g18750.1
  misc_feature (4)..(741): Homolog of NCBI NO: 38606535 NR Description: OSJNBa0016O02.23 [Oryza sativa (japonica
  misc_feature (2)..(702): Homolog of NCBI NO: 38567725 NR Description: B1358B12.23 [Oryza sativa (japonica
  misc_feature (2)..(702): Homolog of NCBI NO: 38347057 NR Description: OSJNBa0060P14.4 [Oryza sativa (japonica
  misc_feature (1)..(741): Homolog of NCBI NO: 38423978 NR Description: PPR-repeat protein-like [Oryza sativa (japonica
  misc_feature (34)..(729): Homolog of NCBI NO: 15233590 NR Description: putative protein; protein id: At4g21300.1
  misc_feature (2)..(713): Homolog of NCBI NO: 18394615 NR Description: hypothetical protein; protein id: At1g18485.1
  misc_feature (57)..(737): Homolog of NCBI NO: 34897084 NR Description: hypothetical protein [Oryza sativa (japonica group)] >gi|12957718|gb|AAK09236.1| hypothetical protein [Oryza
  misc_feature (2)..(713): Homolog of NCBI NO: 25402861 NR Description: protein F15H18.4 [imported] - Arabidopsis >gi|6714305|gb|AAF26001.1|AC013354_20 F15H18.4 [Arabidopsis
  misc_feature (2)..(735): Homolog of NCBI NO: 15236324 NR Description: putative protein; protein id: At4g13650.1
MGSPDSSRLVFEAFPYPDSFMYGVLIKCNVWCHLLDAAIDLYHRLVSETTQISKFVFPSVLRACAGSREHLSVGGKVHGRIIKGGVDDDAVIETSLLCMYGQTGNLSDAEKVFDGMPVRDLVAWSTLVSSCLENGEVVKALRMFKCMVDDGVEPDAVTMISVVEGCAELGCLRIARSVHGQITRKMFDLDETLCNSLLTMYSKCGDLLSSERIFEKIAKKNAVSWTAMISSYNRGEFSEKALRSFSEMIKSGIEPNLVTLYSVLSSCGLIGLIREGKSVHGFAVRRELDPNYESLSLALVELYAECGKLSDCETVLRVVSDRNIVAWNSLISLYAHRGMVIQALGLFRQMVTQRIKPDAFTLASSISACENAGLVPLGKQIHGHVIRTDVSDEFVQNSLIDMYSKSGSVDSASTVFNQIKHRSVVTWNSMLCGFSQNGNSVEAISLFDYMYHSYLEMNEVTFLAVIQACSSIGSLEKGKWVHHKLIISGLKDLFTDTALIDMYAKCGDLNAAETVFRAMSSRSIVSWSSMINAYGMHGRIGSAISTFNQMVESGTKPNEVVFMNVLSACGHSGSVEEGKYYFNLMKSFGVSPNSEHFACFIDLLSRSGDLKEAYRTIKEMPFLADASVWGSLVNGCRIHQKMDIIKAIKNDLSDIVTDDTGYYTLLSNIYAEEGEWEEFRRLRSAMKSSNLKKVPGYSAIEIDQKVFRFGAGEENRIQTDEIYRFLGNLQNLTNEEHVVDS

SEQ ID NO: 88899 - protein, 721 aa, Arabidopsis thaliana
  peptide (1)..(721): Ceres Seq. ID no. 12713634
  misc_feature (405)..(439): Pfam Name: PPR repeat Pfam Description: PPR repeat
  misc_feature (15)..(716): Homolog of NCBI NO: 15234006 NR Description: putative protein; protein id: At4g18750.1
  misc_feature (1)..(721): Homolog of NCBI NO: 38606535 NR Description: OSJNBa0016O02.23 [Oryza sativa (japonica
  misc_feature (1)..(682): Homolog of NCBI NO: 38567725 NR Description: B1358B12.23 [Oryza sativa (japonica
  misc_feature (1)..(682): Homolog of NCBI NO: 38347057 NR Description: OSJNBa0060P14.4 [Oryza sativa (japonica
  misc_feature (1)..(721): Homolog of NCBI NO: 38423978 NR Description: PPR-repeat protein-like [Oryza sativa (japonica
  misc_feature (14)..(709): Homolog of NCBI NO: 15233590 NR Description: putative protein; protein id: At4g21300.1
  misc_feature (1)..(693): Homolog of NCBI NO: 18394615 NR Description: hypothetical protein; protein id: At1g18485.1
  misc_feature (37)..(717): Homolog of NCBI NO: 34897084 NR Description: hypothetical protein [Oryza sativa (japonica group)] >gi|12957718|gb|AAK09236.1| hypothetical protein [Oryza
  misc_feature (1)..(693): Homolog of NCBI NO: 25402861 NR Description: protein F15H18.4 [imported] - Arabidopsis >gi|6714305|gb|AAF26001.1|AC013354_20 F15H18.4 [Arabidopsis
  misc_feature (1)..(715): Homolog of NCBI NO: 15236324 NR Description: putative protein; protein id: At4g13650.1
MYGVLIKCNVWCHLLDAAIDLYHRLVSETTQISKFVFPSVLRACAGSREHLSVGGKVHGRIIKGGVDDDAVIETSLLCMYGQTGNLSDAEKVFDGMPVRDLVAWSTLVSSCLENGEVVKALRMFKCMVDDGVEPDAVTMISVVEGCAELGCLRIARSVHGQITRKMFDLDETLCNSLLTMYSKCGDLLSSERIFEKIAKKNAVSWTAMISSYNRGEFSEKALRSFSEMIKSGIEPNLVTLYSVLSSCGLIGLIREGKSVHGFAVRRELDPNYESLSLALVELYAECGKLSDCETVLRVVSDRNIVAWNSLISLYAHRGMVIQALGLFRQMVTQRIKPDAFTLASSISACENAGLVPLGKQIHGHVIRTDVSDEFVQNSLIDMYSKSGSVDSASTVFNQIKHRSVVTWNSMLCGFSQNGNSVEAISLFDYMYHSYLEMNEVTFLAVIQACSSIGSLEKGKWVHHKLIISGLKDLFTDTALIDMYAKCGDLNAAETVFRAMSSRSIVSWSSMINAYGMHGRIGSAISTFNQMVESGTKPNEVVFMNVLSACGHSGSVEEGKYYFNLMKSFGVSPNSEHFACFIDLLSRSGDLKEAYRTIKEMPFLADASVWGSLVNGCRIHQKMDIIKAIKNDLSDIVTDDTGYYTLLSNIYAEEGEWEEFRRLRSAMKSSNLKKVPGYSAIEIDQKVFRFGAGEENRIQTDEIYRFLGNLQNLTNEEHVVDS

SEQ ID NO: 88900 - protein, 643 aa, Arabidopsis thaliana
  peptide (1)..(643): Ceres Seq. ID no. 12713635
  misc_feature (327)..(361): Pfam Name: PPR repeat Pfam Description: PPR repeat
  misc_feature (1)..(638): Homolog of NCBI NO: 15234006 NR Description: putative protein; protein id: At4g18750.1
  misc_feature (1)..(643): Homolog of NCBI NO: 38606535 NR Description: OSJNBa0016O02.23 [Oryza sativa (japonica
  misc_feature (1)..(604): Homolog of NCBI NO: 38567725 NR Description: B1358B12.23 [Oryza sativa (japonica
  misc_feature (1)..(604): Homolog of NCBI NO: 38347057 NR Description: OSJNBa0060P14.4 [Oryza sativa (japonica
  misc_feature (1)..(643): Homolog of NCBI NO: 38423978 NR Description: PPR-repeat protein-like [Oryza sativa (japonica
  misc_feature (1)..(631): Homolog of NCBI NO: 15233590 NR Description: putative protein; protein id: At4g21300.1
  misc_feature (1)..(615): Homolog of NCBI NO: 18394615 NR Description: hypothetical protein; protein id: At1g18485.1
  misc_feature (1)..(639): Homolog of NCBI NO: 34897084 NR Description: hypothetical protein [Oryza sativa (japonica group)] >gi|12957718|gb|AAK09236.1| hypothetical protein [Oryza
  misc_feature (1)..(615): Homolog of NCBI NO: 25402861 NR Description: protein F15H18.4 [imported] - Arabidopsis >gi|6714305|gb|AAF26001.1|AC013354_20 F15H18.4 [Arabidopsis
  misc_feature (1)..(637): Homolog of NCBI NO: 15236324 NR Description: putative protein; protein id: At4g13650.1
MYGQTGNLSDAEKVFDGMPVRDLVAWSTLVSSCLENGEVVKALRMFKCMVDDGVEPDAVTMISVVEGCAELGCLRIARSVHGQITRKMFDLDETLCNSLLTMYSKCGDLLSSERIFEKIAKKNAVSWTAMISSYNRGEFSEKALRSFSEMIKSGIEPNLVTLYSVLSSCGLIGLIREGKSVHGFAVRRELDPNYESLSLALVELYAECGKLSDCETVLRVVSDRNIVAWNSLISLYAHRGMVIQALGLFRQMVTQRIKPDAFTLASSISACENAGLVPLGKQIHGHVIRTDVSDEFVQNSLIDMYSKSGSVDSASTVFNQIKHRSVVTWNSMLCGFSQNGNSVEAISLFDYMYHSYLEMNEVTFLAVIQACSSIGSLEKGKWVHHKLIISGLKDLFTDTALIDMYAKCGDLNAAETVFRAMSSRSIVSWSSMINAYGMHGRIGSAISTFNQMVESGTKPNEVVFMNVLSACGHSGSVEEGKYYFNLMKSFGVSPNSEHFACFIDLLSRSGDLKEAYRTIKEMPFLADASVWGSLVNGCRIHQKMDIIKAIKNDLSDIVTDDTGYYTLLSNIYAEEGEWEEFRRLRSAMKSSNLKKVPGYSAIEIDQKVFRFGAGEENRIQTDEIYRFLGNLQNLTNEEHVVDS

SEQ ID NO: 88901 - DNA, 1153 bp, Arabidopsis thaliana
  misc_feature (1)..(1153): Ceres Seq. ID no. 12713671
  misc_feature: MA Experiment ID: 20001905 Result: Up-regulated in Transcription
  misc_feature: MA Experiment 20001905 PARAMETER Experiment Name: At_Drought_Reproduction_P Parameter: Age (day) Value: 40
  misc_feature: MA Experiment 20001905 PARAMETER Experiment Name: At_Drought_Reproduction_P Parameter: Organism Value: A. thaliana
  misc_feature: MA Experiment 20001905 PARAMETER Experiment Name: At_Drought_Reproduction_P Parameter: Plant Line Value: WS
  misc_feature: MA Experiment 20001905 PARAMETER Experiment Name: At_Drought_Reproduction_P Parameter: Timepoint (day) Value: 10
  misc_feature: MA Experiment 20001905 PARAMETER Experiment Name: At_Drought_Reproduction_P Parameter: Tissue Value: Rosettes
  misc_feature: MA Experiment 20001905 PARAMETER Experiment Name: At_Drought_Reproduction_P Parameter: Treatment Value: Drought vs. No Drought
ctaatcttgtgcctttagatttcttttcggggagatctagtagttgttggattcgttaaacggagaagtggatttggtacgagtctttaggtttccttcttcaccaaaagctctatatagagagaatctgcgagctctttttggtaggaaattagggttcgtgttgcttggtaaatatagaatcaatgacggaggttgttctgcatatatacgatgtgacgaacagtggatcggagaagactaacaacaccattgttcagatcaataggttcttcaaagacgggatcggtcttggcggtatattccacagcgctattcaggtatatggaaacgatgaatggtcttacgggtattgtgaactaggaactggtgtattcagctgcccgagtggaaagaatccaatgtacacataccgtgagaaaatcgtccttggcaaaacagattgcacaatcttcatggtgaatcagatgttgcgtgaactcagcagggaatggcctggacacacttatgatttgttgtcaaaaaattgcaatcacttctgcgatgtactctgtgaccggcttggtgtgccaaagatcccaggttgggttaatcgctttgctaatgctggggacacagccttggaagtggcaggaaacacagcaatgcggatgaagcaagccaaaactgaacttgtgtcagctagtaaagtggcttatcgcttcctctcgaatgttacttcgaacgtaaccaatggctccaatggctctccacaacgaccgggaactctcaacaattcagacagcgggaacttgagattgcaaggtagttggctcaaaggcttacttaacacagccaaaccctccactagtacagagatagggaacaaagatgaagatgcaaatcatgcagtcaccaatcagaagaaacaaagccgtgactctgatgttctactgtttcagtagcaaccgtaccgatccaccacaatgcattcggttagctgtatatccaccggtctaagagtcacgcactattctcctcgtctgtacccattactctgtatcaacgttggaacctgtcattttttcttgagtttttagctcacgtgtgcttttgttaagatcattctcgcttgttactgtcaaatcttaacatcaaaaggtttattagtctc

SEQ ID NO: 88902 - protein, 252 aa, Arabidopsis thaliana; identical to SEQ ID NO: 41677
  peptide (1)..(252): Ceres Seq. ID no. 12713672
  misc_feature (2)..(139): Pfam Name: Eukaryotic protein of unknown function (DUF862) Pfam Description: Eukaryotic protein of unknown function (DUF862)
  misc_feature (1)..(252): Homolog of NCBI NO: 15235955 NR Description: putative protein; protein id: At4g25680.1, by cDNA: 122917. [Arabidopsis thaliana] >gi|7486773|pir||T09560
  misc_feature (1)..(252): Homolog of NCBI NO: 15235952 NR Description: putative protein; protein id: At4g25660.1, by cDNA: 20902. [Arabidopsis thaliana] >gi|7486771|pir||T09558
  misc_feature (1)..(246): Homolog of NCBI NO: 37536408 NR Description: unknown protein [Oryza sativa (japonica
  misc_feature (3)..(100): Homolog of NCBI NO: 34897764 NR Description: hypothetical protein [Oryza sativa (japonica group)] >gi|6907109|dbj|BAA90636.1| hypothetical protein [Oryza
  misc_feature (14)..(243): Homolog of NCBI NO: 18400749 NR Description: expressed protein; protein id: At2g25190.1, by cDNA: 14105., supported by cDNA: gi_13877550, supported by gi_20148724 [Arabidopsis thaliana] >gi|25354456|pir||D84645
  misc_feature (34)..(206): Homolog of NCBI NO: 18420889 NR Description: putative protein; protein id: At5g25170.1,
  misc_feature (34)..(142): Homolog of NCBI NO: 18412886 NR Description: expressed protein; protein id: At1g80690.1, by cDNA: 40037. [Arabidopsis thaliana]
  misc_feature (34)..(142): Homolog of NCBI NO: 25354458 NR Description: hypothetical protein F23A5.4 [imported] - thaliana >gi|6503281|gb|AAF14657.1|AC011713_5 Contains similarity
  misc_feature (13)..(142): Homolog of NCBI NO: 17529024 NR Description: unknown protein [Arabidopsis thaliana]
  misc_feature (1)..(142): Homolog of NCBI NO: 15238059 NR Description: putative protein; protein id: At5g47310.1

SEQ ID NO: 88903 - protein, 180 aa, Arabidopsis thaliana; identical to SEQ ID NO: 41678
  peptide (1)..(180): Ceres Seq. ID no. 12713673
  misc_feature (1)..(67): Pfam Name: Eukaryotic protein of unknown function (DUF862) Pfam Description: Eukaryotic protein of unknown function (DUF862)
  misc_feature (1)..(180): Homolog of NCBI NO: 15235955 NR Description: putative protein; protein id: At4g25680.1, by cDNA: 122917. [Arabidopsis thaliana] >gi|7486773|pir||T09560
  misc_feature (1)..(180): Homolog of NCBI NO: 15235952 NR Description: putative protein; protein id: At4g25660.1, by cDNA: 20902. [Arabidopsis thaliana] >gi|7486771|pir||T09558
  misc_feature (1)..(174): Homolog of NCBI NO: 37536408 NR Description: unknown protein [Oryza sativa (japonica
  misc_feature (1)..(28): Homolog of NCBI NO: 34897764 NR Description: hypothetical protein [Oryza sativa (japonica group)] >gi|6907109|dbj|BAA90636.1| hypothetical protein [Oryza
  misc_feature (1)..(171): Homolog of NCBI NO: 18400749 NR Description: expressed protein; protein id: At2g25190.1, by cDNA: 14105., supported by cDNA: gi_13877550, supported by gi_20148724 [Arabidopsis thaliana] >gi|25354456|pir||D84645
  misc_feature (1)..(134): Homolog of NCBI NO: 18420889 NR Description: putative protein; protein id: At5g25170.1,
  misc_feature (1)..(70): Homolog of NCBI NO: 18412886 NR Description: expressed protein; protein id: At1g80690.1, by cDNA: 40037. [Arabidopsis thaliana]
  misc_feature (1)..(70): Homolog of NCBI NO: 25354458 NR Description: hypothetical protein F23A5.4 [imported] - thaliana >gi|6503281|gb|AAF14657.1|AC011713_5 Contains similarity
  misc_feature (1)..(70): Homolog of NCBI NO: 17529024 NR Description: unknown protein [Arabidopsis thaliana]
  misc_feature (1)..(70): Homolog of NCBI NO: 15238059 NR Description: putative protein; protein id: At5g47310.1

SEQ ID NO: 88904 - protein, 162 aa, Arabidopsis thaliana; identical to SEQ ID NO: 41679
  peptide (1)..(162): Ceres Seq. ID no. 12713674
  misc_feature (1)..(162): Homolog of NCBI NO: 15235955 NR Description: putative protein; protein id: At4g25680.1, by cDNA: 122917. [Arabidopsis thaliana] >gi|7486773|pir||T09560
  misc_feature (1)..(162): Homolog of NCBI NO: 15235952 NR Description: putative protein; protein id: At4g25660.1, by cDNA: 20902. [Arabidopsis thaliana] >gi|7486771|pir||T09558
  misc_feature (1)..(156): Homolog of NCBI NO: 37536408 NR Description: unknown protein [Oryza sativa (japonica
  misc_feature (1)..(153): Homolog of NCBI NO: 18400749 NR Description: expressed protein; protein id: At2g25190.1, by cDNA: 14105., supported by cDNA: gi_13877550, supported by gi_20148724 [Arabidopsis thaliana] >gi|25354456|pir||D84645
  misc_feature (1)..(116): Homolog of NCBI NO: 18420889 NR Description: putative protein; protein id: At5g25170.1,
  misc_feature (1)..(52): Homolog of NCBI NO: 18412886 NR Description: expressed protein; protein id: At1g80690.1, by cDNA: 40037. [Arabidopsis thaliana]
  misc_feature (1)..(52): Homolog of NCBI NO: 25354458 NR Description: hypothetical protein F23A5.4 [imported] - thaliana >gi|6503281|gb|AAF14657.1|AC011713_5 Contains similarity
  misc_feature (1)..(52): Homolog of NCBI NO: 17529024 NR Description: unknown protein [Arabidopsis thaliana]
  misc_feature (1)..(52): Homolog of NCBI NO: 15238059 NR Description: putative protein; protein id: At5g47310.1
  misc_feature (1)..(52): Homolog of NCBI NO: 30684058 NR Description: expressed protein [Arabidopsis thaliana] AT4g17486/AT4g17486 [Arabidopsis thaliana]

SEQ ID NO: 88905 - DNA, 1188 bp, Arabidopsis thaliana
  misc_feature (1)..(1188): Ceres Seq. ID no. 12713680
  misc_feature: MA Experiment ID: 20000171 Result: Down-regulated in Transcription
  misc_feature: MA Experiment 20000171 PARAMETER Experiment Name: At_42deg_Heat_P Parameter: Age (day) Value: 14
  misc_feature: MA Experiment 20000171 PARAMETER Experiment Name: At_42deg_Heat_P Parameter: Organism Value: A. thaliana
  misc_feature: MA Experiment 20000171 PARAMETER Experiment Name: At_42deg_Heat_P Parameter: Plant Line Value: WS
  misc_feature: MA Experiment 20000171 PARAMETER Experiment Name: At_42deg_Heat_P Parameter: Temperature (deg C) Value: 42 vs. 22
  misc_feature: MA Experiment 20000171 PARAMETER Experiment Name: At_42deg_Heat_P Parameter: Timepoint (hr) Value: 1
  misc_feature: MA Experiment 20000171 PARAMETER Experiment Name: At_42deg_Heat_P Parameter: Tissue Value: Aerial
  misc_feature: MA Experiment ID: 20000173 Result: Down-regulated in Transcription
  misc_feature: MA Experiment 20000173 PARAMETER Experiment Name: At_42deg_Heat_P Parameter: Age (day) Value: 14
  misc_feature: MA Experiment 20000173 PARAMETER Experiment Name: At_42deg_Heat_P Parameter: Organism Value: A. thaliana
  misc_feature: MA Experiment 20000173 PARAMETER Experiment Name: At_42deg_Heat_P Parameter: Plant Line Value: WS
  misc_feature: MA Experiment 20000173 PARAMETER Experiment Name: At_42deg_Heat_P Parameter: Temperature (deg C) Value: 42 vs. 22
  misc_feature: MA Experiment 20000173 PARAMETER Experiment Name: At_42deg_Heat_P Parameter: Timepoint (hr) Value: 6
  misc_feature: MA Experiment 20000173 PARAMETER Experiment Name: At_42deg_Heat_P Parameter: Tissue Value: Aerial
  misc_feature: MA Experiment ID: 20000180 Result: Up-regulated in Transcription
  misc_feature: MA Experiment 20000180 PARAMETER Experiment Name: At_Germinating_Seeds_P Parameter: Age (hr) Value: 24 vs. 0
  misc_feature: MA Experiment 20000180 PARAMETER Experiment Name: At_Germinating_Seeds_P Parameter: Tissue Value: Germinating Seeds
  misc_feature: MA Experiment ID: 20000184 Result: Down-regulated in Transcription
  misc_feature: MA Experiment 20000184 PARAMETER Experiment Name: At_Shoots__P Parameter: Age (day) Value: 7
  misc_feature: MA Experiment 20000184 PARAMETER Experiment Name: At_Shoots__P Parameter: Tissue Value: Shoots vs. Whole Plant
  misc_feature: MA Experiment ID: 20000264 Result: Down-regulated in Transcription
  misc_feature: MA Experiment 20000264 PARAMETER Experiment Name: At_Open_Flower_P Parameter: Age (day) Value: 21
  misc_feature: MA Experiment 20000264 PARAMETER Experiment Name: At_Open_Flower_P Parameter: Plant Line Value: WS
  misc_feature: MA Experiment 20000264 PARAMETER Experiment Name: At_Open_Flower_P Parameter: Tissue Value: Open Flower vs. Whole Plant
  misc_feature: MA Experiment ID: 20000265 Result: Down-regulated in Transcription
  misc_feature: MA Experiment 20000265 PARAMETER Experiment Name: At_Open_Flower_P Parameter: Age (day) Value: 21
  misc_feature: MA Experiment 20000265 PARAMETER Experiment Name: At_Open_Flower_P Parameter: Plant Line Value: WS
  misc_feature: MA Experiment 20000265 PARAMETER Experiment Name: At_Open_Flower_P Parameter: Tissue Value: Closed Flower vs. Whole Plant
  misc_feature: MA Experiment ID: 20000451 Result: Up-regulated in Transcription
  misc_feature: MA Experiment 20000451 PARAMETER Experiment Name: At_CS6879_Shoots-Roots_P Parameter: Age (day) Value: 14
  misc_feature: MA Experiment 20000451 PARAMETER Experiment Name: At_CS6879_Shoots-Roots_P Parameter: Organism Value: A. thaliana
  misc_feature: MA Experiment 20000451 PARAMETER Experiment Name: At_CS6879_Shoots-Roots_P Parameter: Plant Line Value: CS6879 vs. WS
  misc_feature: MA Experiment 20000451 PARAMETER Experiment Name: At_CS6879_Shoots-Roots_P Parameter: Tissue Value: Roots
  misc_feature: MA Experiment ID: 20000452 Result: Up-regulated in Transcription
  misc_feature: MA Experiment 20000452 PARAMETER Experiment Name: At_CS6879_Shoots-Roots_P Parameter: Age (day) Value: 14
  misc_feature: MA Experiment 20000452 PARAMETER Experiment Name: At_CS6879_Shoots-Roots_P Parameter: Organism Value: A. thaliana
  misc_feature: MA Experiment 20000452 PARAMETER Experiment Name: At_CS6879_Shoots-Roots_P Parameter: Plant Line Value: CS6879 vs. WS
  misc_feature: MA Experiment 20000452 PARAMETER Experiment Name: At_CS6879_Shoots-Roots_P Parameter: Tissue Value: Shoots
  misc_feature: MA Experiment ID: 20001558 Result: Down-regulated in Transcription
  misc_feature: MA Experiment 20001558 PARAMETER Experiment Name: At_Drought_Soil_Dry_P Parameter: Age (day) Value: 27
  misc_feature: MA Experiment 20001558 PARAMETER Experiment Name: At_Drought_Soil_Dry_P Parameter: Organism Value: A. thaliana
  misc_feature: MA Experiment 20001558 PARAMETER Experiment Name: At_Drought_Soil_Dry_P Parameter: Plant Line Value: WS
  misc_feature: MA Experiment 20001558 PARAMETER Experiment Name: At_Drought_Soil_Dry_P Parameter: Post Timepoint (hr) Value: 6
  misc_feature: MA Experiment 20001558 PARAMETER Experiment Name: At_Drought_Soil_Dry_P Parameter: Post-Treatment Value: Re-Water vs. No Drought
  misc_feature: MA Experiment 20001558 PARAMETER Experiment Name: At_Drought_Soil_Dry_P Parameter: Timepoint (day) Value: 13
  misc_feature: MA Experiment 20001558 PARAMETER Experiment Name: At_Drought_Soil_Dry_P Parameter: Treatment Value: Drought vs. No Drought
gactgcgaatgaagtttaatggcgactagatcgccttataagagacaaacgaagcgatccatgattcagtctcttccagcttcttcttctgcatcatctcgccgccgattcatttctcggaagaggttcgcgatgatgattcctcttgctctcctctccggcgccgttttcctattctttatgccattcaatagctggggccaatcatctggttcttctctggatctctcccataggatcaatgaaattgaagtagttgctgagtttcctcatgatccggacgcctttactcagggtcttctttatgcgggaaacgatacactgttcgaatccactggtctatacgggaagtcttcagtgaggaaagtggatctacgaacaggaaaggttgaaattcttgaaaaaatggacaatacatattttggagagggtttaacactccttggagaaaggctctttcaagtcgcatggttgacaaacacgggtttcacatatgaccttcgcaacttaagtaaagtaaaaccatttaaacatcatatgaaagatggatggggactggctaccgatggaaaagcgttatttggaagtgatggcacttctacattatatcggatggaccctcaaacaatgaaagttactgataagcatatagtcagatataatggccgtgaggtacgttaccttaatgagctcgagtacataaacaacgaagtttgggcaaatgtgtggcagtctgattgtattgctagaatttcacccaaggacggatctctgcttggatggatactgctttcaaaattaagtcggggattgctgaaatctggacataggggtattgatgttttgaatggcatagcatgggacagtgacaagcaacgcctctttggtaataaatcttgttatcatcccctctaggcttgattactcgacgtcgcctcatagtcacaacattttgtgtctccatcaattttgtgtctcgatcatttgttttgcagtaacggggaaactgtggccaaagctgtaccaaatcaagctaaaacaagcatcagcaaagagcggaaattatatcgagcaacaatgcttggtatgaaaatattgcgcttggtaatggttagaatgtatactggctataatttaccataatttctgaacattagcatttagcaaacttcaatgattgaagatgag

SEQ ID NO: 88906 - protein, 298 aa, Arabidopsis thaliana
  peptide (1)..(298): Ceres Seq. ID no. 12713681
  misc_feature (40)..(289): Pfam Name: Glutamine cyclotransferase Pfam Description: Glutamine cyclotransferase
  misc_feature (1)..(289): Homolog of NCBI NO: 18416607 NR Description: glutamine cyclotransferase precursor - like protein id: At4g25720.1, supported by cDNA: 114197. [Arabidopsis >gi|25054886|gb|AAN71928.1| putative glutamine cyclotransferase
  misc_feature (1)..(289): Homolog of NCBI NO: 21536884 NR Description: glutamine cyclotransferase precursor-like protein
  misc_feature (1)..(289): Homolog of NCBI NO: 7484984 NR Description: glutaminyl-peptide cyclotransferase homolog - Arabidopsis thaliana >gi|4914464|emb|CAB43703.1| glutamine
  misc_feature (71)..(289): Homolog of NCBI NO: 7484740 NR Description: glutaminyl-peptide cyclotransferase (EC 2.3.2.5) - papaya >gi|3342798|gb|AAC27745.1| glutamine cyclotransferase
  misc_feature (78)..(292): Homolog of NCBI NO: 24413973 NR Description: putative glutaminyl-peptide cyclotransferase
  misc_feature (78)..(289): Homolog of NCBI NO: 16126885 NR Description: glutamine cyclotransferase [Caulobacter
  misc_feature (35)..(289): Homolog of NCBI NO: 31790364 NR Description: putative glutamine cyclotransferase [uncultured
  misc_feature (79)..(289): Homolog of NCBI NO: 21231655 NR Description: glutamine cyclotransferase [Xanthomonas pv. campestris str. ATCC 33913] >gi|21113351|gb|AAM41496.1| cyclotransferase [Xanthomonas campestris pv. campestris str. ATCC
  misc_feature (79)..(289): Homolog of NCBI NO: 22970826 NR Description: hypothetical protein [Chloroflexus aurantiacus]
  misc_feature (78)..(289): Homolog of NCBI NO: 16124007 NR Description: putative exported protein [Yersinia pestis]
MATRSPYKRQTKRSMIQSLPASSSASSRRRFISRKRFAMMIPLALLSGAVFLFFMPFNSWGQSSGSSLDLSHRINEIEVVAEFPHDPDAFTQGLLYAGNDTLFESTGLYGKSSVRKVDLRTGKVEILEKMDNTYFGEGLTLLGERLFQVAWLTNTGFTYDLRNLSKVKPFKHHMKDGWGLATDGKALFGSDGTSTLYRMDPQTMKVTDKHIVRYNGREVRYLNELEYINNEVWANVWQSDCIARISPKDGSLLGWILLSKLSRGLLKSGHRGIDVLNGIAWDSDKQRLFGNKSCYHPL

SEQ ID NO: 88907 - protein, 284 aa, Arabidopsis thaliana
  peptide (1)..(284): Ceres Seq. ID no. 12713682
  misc_feature (26)..(275): Pfam Name: Glutamine cyclotransferase Pfam Description: Glutamine cyclotransferase
  misc_feature (1)..(275): Homolog of NCBI NO: 18416607 NR Description: glutamine cyclotransferase precursor - like protein id: At4g25720.1, supported by cDNA: 114197. [Arabidopsis >gi|25054886|gb|AAN71928.1| putative glutamine cyclotransferase
  misc_feature (1)..(275): Homolog of NCBI NO: 21536884 NR Description: glutamine cyclotransferase precursor-like protein
  misc_feature (1)..(275): Homolog of NCBI NO: 7484984 NR Description: glutaminyl-peptide cyclotransferase homolog - Arabidopsis thaliana >gi|4914464|emb|CAB43703.1| glutamine
  misc_feature (57)..(275): Homolog of NCBI NO: 7484740 NR Description: glutaminyl-peptide cyclotransferase (EC 2.3.2.5) - papaya >gi|3342798|gb|AAC27745.1| glutamine cyclotransferase
  misc_feature (64)..(278): Homolog of NCBI NO: 24413973 NR Description: putative glutaminyl-peptide cyclotransferase
  misc_feature (64)..(275): Homolog of NCBI NO: 16126885 NR Description: glutamine cyclotransferase [Caulobacter
  misc_feature (21)..(275): Homolog of NCBI NO: 31790364 NR Description: putative glutamine cyclotransferase [uncultured
  misc_feature (65)..(275): Homolog of NCBI NO: 21231655 NR Description: glutamine cyclotransferase [Xanthomonas pv. campestris str. ATCC 33913] >gi|21113351|gb|AAM41496.1| cyclotransferase [Xanthomonas campestris pv. campestris str. ATCC
  misc_feature (65)..(275): Homolog of NCBI NO: 22970826 NR Description: hypothetical protein [Chloroflexus aurantiacus]
  misc_feature (64)..(275): Homolog of NCBI NO: 16124007 NR Description: putative exported protein [Yersinia pestis]
MIQSLPASSSASSRRRFISRKRFAMMIPLALLSGAVFLFFMPFNSWGQSSGSSLDLSHRINEIEVVAEFPHDPDAFTQGLLYAGNDTLFESTGLYGKSSVRKVDLRTGKVEILEKMDNTYFGEGLTLLGERLFQVAWLTNTGFTYDLRNLSKVKPFKHHMKDGWGLATDGKALFGSDGTSTLYRMDPQTMKVTDKHIVRYNGREVRYLNELEYINNEVWANVWQSDCIARISPKDGSLLGWILLSKLSRGLLKSGHRGIDVLNGIAWDSDKQRLFGNKSCYHPL

SEQ ID NO: 88908 - protein, 260 aa, Arabidopsis thaliana
  peptide (1)..(260): Ceres Seq. ID no. 12713683
  misc_feature (2)..(251): Pfam Name: Glutamine cyclotransferase Pfam Description: Glutamine cyclotransferase
  misc_feature (1)..(251): Homolog of NCBI NO: 18416607 NR Description: glutamine cyclotransferase precursor - like protein id: At4g25720.1, supported by cDNA: 114197. [Arabidopsis >gi|25054886|gb|AAN71928.1| putative glutamine cyclotransferase
  misc_feature (1)..(251): Homolog of NCBI NO: 21536884 NR Description: glutamine cyclotransferase precursor-like protein
  misc_feature (1)..(251): Homolog of NCBI NO: 7484984 NR Description: glutaminyl-peptide cyclotransferase homolog - Arabidopsis thaliana >gi|4914464|emb|CAB43703.1| glutamine
  misc_feature (33)..(251): Homolog of NCBI NO: 7484740 NR Description: glutaminyl-peptide cyclotransferase (EC 2.3.2.5) - papaya >gi|3342798|gb|AAC27745.1| glutamine cyclotransferase
  misc_feature (40)..(254): Homolog of NCBI NO: 24413973 NR Description: putative glutaminyl-peptide cyclotransferase
  misc_feature (40)..(251): Homolog of NCBI NO: 16126885 NR Description: glutamine cyclotransferase [Caulobacter
  misc_feature (1)..(251): Homolog of NCBI NO: 31790364 NR Description: putative glutamine cyclotransferase [uncultured
  misc_feature (41)..(251): Homolog of NCBI NO: 21231655 NR Description: glutamine cyclotransferase [Xanthomonas pv. campestris str. ATCC 33913] >gi|21113351|gb|AAM41496.1| cyclotransferase [Xanthomonas campestris pv. campestris str. ATCC
  misc_feature (41)..(251): Homolog of NCBI NO: 22970826 NR Description: hypothetical protein [Chloroflexus aurantiacus]
  misc_feature (40)..(251): Homolog of NCBI NO: 16124007 NR Description: putative exported protein [Yersinia pestis]
MMIPLALLSGAVFLFFMPFNSWGQSSGSSLDLSHRINEIEVVAEFPHDPDAFTQGLLYAGNDTLFESTGLYGKSSVRKVDLRTGKVEILEKMDNTYFGEGLTLLGERLFQVAWLTNTGFTYDLRNLSKVKPFKHHMKDGWGLATDGKALFGSDGTSTLYRMDPQTMKVTDKHIVRYNGREVRYLNELEYINNEVWANVWQSDCIARISPKDGSLLGWILLSKLSRGLLKSGHRGIDVLNGIAWDSDKQRLFGNKSCYHPL

SEQ ID NO: 88909 - DNA, 3153 bp, Arabidopsis thaliana
  misc_feature (1)..(3153): Ceres Seq. ID no. 12713760
  misc_feature: MA Experiment ID: 20000355 Result: Up-regulated in Transcription
  misc_feature: MA Experiment 20000355 PARAMETER Experiment Name: At_Siliques_Sub_P Parameter: Age (day) Value: 21
  misc_feature: MA Experiment 20000355 PARAMETER Experiment Name: At_Siliques_Sub_P Parameter: Organism Value: A. thaliana
  misc_feature: MA Experiment 20000355 PARAMETER Experiment Name: At_Siliques_Sub_P Parameter: Plant Line Value: WS
  misc_feature: MA Experiment 20000355 PARAMETER Experiment Name: At_Siliques_Sub_P Parameter: Tissue Value: Less Than 5mm Siliques vs. Whole Plant
  misc_feature: MA Experiment ID: 20000440 Result: Up-regulated in Transcription
  misc_feature: MA Experiment 20000440 PARAMETER Experiment Name: At_Closed-Flower__Sub_P Parameter: Tissue Value: Closed Flower vs. Whole Plant
atggcgtccacgcctcctcaaacttctaaaaaggtccgtaacaattccggtagcggccaaaccgtcaaatttgcaagacgaacatctagcggaagatatgtgagtttatctcgagataatatagaattatcaggcgagctctccggggattattctaactatacggtgcacatacctccgacgccggacaatcagcccatggccaccaaagccgaagagcaatacgtgtcaaattctttatttactggtggtttcaacagtgtaacacgtgcacatcttatggacaaagtgatcgattcagatgtcacacaccctcagatggctggcgctaaaggctcttcgtgtgccatgcctgcttgcgacggaaatgtcatgaaagacgagagaggaaaggacgtgatgccatgtgaatgccggtttaagatctgtagggattgcttcatggacgcccagaaagagacaggcctttgtccaggatgcaaggaacaatacaaaatcggggacctagatgacgatacgcctgactattctagtggtgctctccccttaccagctccagggaaagatcaacgtgggaacaacaacaacatgtctatgatgaagaggaaccaaaacggtgaatttgatcacaacagatggctattcgagacgcaaggcacatatgggtacggtaatgcgtattggcctcaagacgaaatgtatggcgatgatatggatgaagggatgagaggcggcatggtggaaacagctgacaagccatggcggccactgagccgacgaatccctattccagccgccatcattagtccttacagattactaatcgtcattcgttttgtcgtgctatgtttttttctaacttggaggatccgaaatcctaacgaagacgcaatatggttatggctcatgtctataatatgcgagctttggtttggattttcatggattctagaccagatccctaagttgtgtccaataaaccggtccactgacctggaagttcttcgtgacaaatttgacatgccttctccctccaacccaacagggaggtcggatctcccaggtattgacctttttgtgtcaacggcagatccagagaaagagccgccccttgtcaccgccaacacgattctgtccatattggccgttgattatccggtggagaaggtgtcatgctatctttctgatgatggaggagctcttctatcctttgaagctatggcagaagctgctagctttgcggatctctgggtacctttttgtcgcaaacataacattgagcctcgaaatccagactcgtatttcagtttgaagatagatccaacaaagaataagagcagaattgattttgtcaaggacagaagaaagattaagagggagtatgatgaattcaaggttcgcatcaacgatggcacccactggccaggaacttgggcagcctctactcgagagcattccaaaggtgatcatgctgggattctccaggtgatgttgaaaccacctagcaacacggacactcgtttacccatgtttgtgtatgtgtcacgtgagaagcggcctggatatgatcacaacaagaaagctggagccatgaatgcacttgttcgtgcctctgctatcctctcaaatggaccttttatccttaatcttgattgtgatcattacatctataactgtaaggccgtacgagaagggatgtgttttatgatggacagaggtggtgaagacatttgctacattcagtttccgcaaagattcgaaggcatcgatccttctgatagatatgctaacaataacactgtattttttgacggtaatatgcgtgctctcgacggtgtccagggaccagtttatgttggaacaggtactatgtttaggcgctttgctctctatggttttgatccacccaaccctgacaagcttcttgagaagaaggaatcagaaacagaggctctaaccaccagtgactttgacccggaccttgatgtcacacaactccccaagcgctttgggaactccacactcctagctgagtcaattccaattgcagagttccaaggtcgtccattggcagaccacccggctgtcaagtacggtcgtcctcccggagcccttagagtccctcgtgacccacttgatgctaccactgtcgcagagtctgtttctgtaatctcttgttggtatgaggataaaacggagtggggagatagagttggatggatttatgggtcggtgacagaggacgtggtcacaggataccgcatgcataatcgtgggtggcgctcggtttactgcataactaagcgagattcttttcgaggctctgcacccattaatctcacggatcgtcttcaccaggtgttgcggtgggccactgggtctgttgagatcttcttctctagaaacaacgccattctcgcctccaaacgtctcaagttcctccaacgtctcgcatacctcaatgttgggatataccctttcacgtctctgtttctcatcctctattgttttcttccggcattctctcttttctctggacagttcatcgtgcggacgctcagtatctccttcttggtctaccttcttatgatcaccatttgtttgattggattggcggttttggaggtcaagtggtctggcattgggctggaagaatggtggagaaacgaacagtggtggctcatctcaggaacaagctctcacctttacgcagtggtccaaggagtcctcaaagtgattgcagggatcgagatctcctttaccttgacgaccaagtcagggggagatgacaatgaagacatatacgcggatttgtacatagtgaaatggtcgtcgctgatgataccgcctatagtgatagcaatggtgaacataatagcgattgtggtggcgttcatcaggacaatataccaagcggtgccacaatggagcaagctaatcggaggagcatttttcagcttctgggtgttggcgcatttgtatccatttgcaaaaggattgatgggacgaagaggcaaaactccaaccatagtttttgtgtgggcaggtctcattgccatcaccatctctctactgtggacggccataaacccaaacaccggacctgcagctgctgcagagggtgttggaggcggtggttttcaattcccgtaa

SEQ ID NO: 88910 - protein, 1050 aa, Arabidopsis thaliana
  peptide (1)..(1050): Ceres Seq. ID no. 12713761
  misc_feature (17)..(201): Homolog of NCBI NO: 34897878 NR Description: Similar to Arabidopsis thaliana DNA chromosome 4,
  misc_feature (470)..(636): Homolog of NCBI NO: 15237873 NR Description: cellulose synthase catalytic subunit -like protein id: At5g16910.1 [Arabidopsis thaliana]
  misc_feature (184)..(640): Homolog of NCBI NO: 28411807 NR Description: cellulose synthase-4 [Oryza sativa (japonica
  misc_feature (707)..(1033): Homolog of NCBI NO: 28411807 NR Description: cellulose synthase-4 [Oryza sativa (japonica
  misc_feature (184)..(640): Homolog of NCBI NO: 30103013 NR Description: putative cellulose synthase catalytic subunit
  misc_feature (707)..(1033): Homolog of NCBI NO: 30103013 NR Description: putative cellulose synthase catalytic subunit
  misc_feature (184)..(640): Homolog of NCBI NO: 9622880 NR Description: cellulose synthase-4 [Zea mays]
  misc_feature (244)..(635): Homolog of NCBI NO: 21954719 NR Description: cellulose synthase catalytic subunit [Mesotaenium
  misc_feature (714)..(1042): Homolog of NCBI NO: 21954719 NR Description: cellulose synthase catalytic subunit [Mesotaenium
  misc_feature (707)..(1033): Homolog of NCBI NO: 9622880 NR Description: cellulose synthase-4 [Zea mays]
MASTPPQTSKKVRNNSGSGQTVKFARRTSSGRYVSLSRDNIELSGELSGDYSNYTVHIPPTPDNQPMATKAEEQYVSNSLFTGGFNSVTRAHLMDKVIDSDVTHPQMAGAKGSSCAMPACDGNVMKDERGKDVMPCECRFKICRDCFMDAQKETGLCPGCKEQYKIGDLDDDTPDYSSGALPLPAPGKDQRGNNNNMSMMKRNQNGEFDHNRWLFETQGTYGYGNAYWPQDEMYGDDMDEGMRGGMVETADKPWRPLSRRIPIPAAIISPYRLLIVIRFVVLCFFLTWRIRNPNEDAIWLWLMSIICELWFGFSWILDQIPKLCPINRSTDLEVLRDKFDMPSPSNPTGRSDLPGIDLFVSTADPEKEPPLVTANTILSILAVDYPVEKVSCYLSDDGGALLSFEAMAEAASFADLWVPFCRKHNIEPRNPDSYFSLKIDPTKNKSRIDFVKDRRKIKREYDEFKVRINDGTHWPGTWAASTREHSKGDHAGILQVMLKPPSNTDTRLPMFVYVSREKRPGYDHNKKAGAMNALVRASAILSNGPFILNLDCDHYIYNCKAVREGMCFMMDRGGEDICYIQFPQRFEGIDPSDRYANNNTVFFDGNMRALDGVQGPVYVGTGTMFRRFALYGFDPPNPDKLLEKKESETEALTTSDFDPDLDVTQLPKRFGNSTLLAESIPIAEFQGRPLADHPAVKYGRPPGALRVPRDPLDATTVAESVSVISCWYEDKTEWGDRVGWIYGSVTEDVVTGYRMHNRGWRSVYCITKRDSFRGSAPINLTDRLHQVLRWATGSVEIFFSRNNAILASKRLKFLQRLAYLNVGIYPFTSLFLILYCFLPAFSLFSGQFIVRTLSISFLVYLLMITICLIGLAVLEVKWSGIGLEEWWRNEQWWLISGTSSHLYAVVQGVLKVIAGIEISFTLTTKSGGDDNEDIYADLYIVKWSSLMIPPIVIAMVNIIAIVVAFIRTIYQAVPQWSKLIGGAFFSFWVLAHLYPFAKGLMGRRGKTPTIVFVWAGLIAITISLLWTAINPNTGPAAAAEGVGGGGFQFP

SEQ ID NO: 88911 - protein, 984 aa, Arabidopsis thaliana
  peptide (1)..(984): Ceres Seq. ID no. 12713762
  misc_feature (1)..(135): Homolog of NCBI NO: 34897878 NR Description: Similar to Arabidopsis thaliana DNA chromosome 4,
  misc_feature (404)..(570): Homolog of NCBI NO: 15237873 NR Description: cellulose synthase catalytic subunit -like protein id: At5g16910.1 [Arabidopsis thaliana]
  misc_feature (118)..(574): Homolog of NCBI NO: 28411807 NR Description: cellulose synthase-4 [Oryza sativa (japonica
  misc_feature (641)..(967): Homolog of NCBI NO: 28411807 NR Description: cellulose synthase-4 [Oryza sativa (japonica
  misc_feature (118)..(574): Homolog of NCBI NO: 30103013 NR Description: putative cellulose synthase catalytic subunit
  misc_feature (641)..(967): Homolog of NCBI NO: 30103013 NR Description: putative cellulose synthase catalytic subunit
  misc_feature (118)..(574): Homolog of NCBI NO: 9622880 NR Description: cellulose synthase-4 [Zea mays]
  misc_feature (178)..(569): Homolog of NCBI NO: 21954719 NR Description: cellulose synthase catalytic subunit [Mesotaenium
  misc_feature (648)..(976): Homolog of NCBI NO: 21954719 NR Description: cellulose synthase catalytic subunit [Mesotaenium
  misc_feature (641)..(967): Homolog of NCBI NO: 9622880 NR Description: cellulose synthase-4 [Zea mays]
MATKAEEQYVSNSLFTGGFNSVTRAHLMDKVIDSDVTHPQMAGAKGSSCAMPACDGNVMKDERGKDVMPCECRFKICRDCFMDAQKETGLCPGCKEQYKIGDLDDDTPDYSSGALPLPAPGKDQRGNNNNMSMMKRNQNGEFDHNRWLFETQGTYGYGNAYWPQDEMYGDDMDEGMRGGMVETADKPWRPLSRRIPIPAAIISPYRLLIVIRFVVLCFFLTWRIRNPNEDAIWLWLMSIICELWFGFSWILDQIPKLCPINRSTDLEVLRDKFDMPSPSNPTGRSDLPGIDLFVSTADPEKEPPLVTANTILSILAVDYPVEKVSCYLSDDGGALLSFEAMAEAASFADLWVPFCRKHNIEPRNPDSYFSLKIDPTKNKSRIDFVKDRRKIKREYDEFKVRINDGTHWPGTWAASTREHSKGDHAGILQVMLKPPSNTDTRLPMFVYVSREKRPGYDHNKKAGAMNALVRASAILSNGPFILNLDCDHYIYNCKAVREGMCFMMDRGGEDICYIQFPQRFEGIDPSDRYANNNTVFFDGNMRALDGVQGPVYVGTGTMFRRFALYGFDPPNPDKLLEKKESETEALTTSDFDPDLDVTQLPKRFGNSTLLAESIPIAEFQGRPLADHPAVKYGRPPGALRVPRDPLDATTVAESVSVISCWYEDKTEWGDRVGWIYGSVTEDVVTGYRMHNRGWRSVYCITKRDSFRGSAPINLTDRLHQVLRWATGSVEIFFSRNNAILASKRLKFLQRLAYLNVGIYPFTSLFLILYCFLPAFSLFSGQFIVRTLSISFLVYLLMITICLIGLAVLEVKWSGIGLEEWWRNEQWWLISGTSSHLYAVVQGVLKVIAGIEISFTLTTKSGGDDNEDIYADLYIVKWSSLMIPPIVIAMVNIIAIVVAFIRTIYQAVPQWSKLIGGAFFSFWVLAHLYPFAKGLMGRRGKTPTIVFVWAGLIAITISLLWTAINPNTGPAAAAEGVGGGGFQFP

SEQ ID NO: 88912 - protein, 957 aa, Arabidopsis thaliana
  peptide (1)..(957): Ceres Seq. ID no. 12713763
  misc_feature (1)..(108): Homolog of NCBI NO: 34897878 NR Description: Similar to Arabidopsis thaliana DNA chromosome 4,
  misc_feature (377)..(543): Homolog of NCBI NO: 15237873 NR Description: cellulose synthase catalytic subunit -like protein id: At5g16910.1 [Arabidopsis thaliana]
  misc_feature (91)..(547): Homolog of NCBI NO: 28411807 NR Description: cellulose synthase-4 [Oryza sativa (japonica
  misc_feature (614)..(940): Homolog of NCBI NO: 28411807 NR Description: cellulose synthase-4 [Oryza sativa (japonica
  misc_feature (91)..(547): Homolog of NCBI NO: 30103013 NR Description: putative cellulose synthase catalytic subunit
  misc_feature (614)..(940): Homolog of NCBI NO: 30103013 NR Description: putative cellulose synthase catalytic subunit
  misc_feature (91)..(547): Homolog of NCBI NO: 9622880 NR Description: cellulose synthase-4 [Zea mays]
  misc_feature (151)..(542): Homolog of NCBI NO: 21954719 NR Description: cellulose synthase catalytic subunit [Mesotaenium
  misc_feature (621)..(949): Homolog of NCBI NO: 21954719 NR Description: cellulose synthase catalytic subunit [Mesotaenium
  misc_feature (614)..(940): Homolog of NCBI NO: 9622880 NR Description: cellulose synthase-4 [Zea mays]
MDKVIDSDVTHPQMAGAKGSSCAMPACDGNVMKDERGKDVMPCECRFKICRDCFMDAQKETGLCPGCKEQYKIGDLDDDTPDYSSGALPLPAPGKDQRGNNNNMSMMKRNQNGEFDHNRWLFETQGTYGYGNAYWPQDEMYGDDMDEGMRGGMVETADKPWRPLSRRIPIPAAIISPYRLLIVIRFVVLCFFLTWRIRNPNEDAIWLWLMSIICELWFGFSWILDQIPKLCPINRSTDLEVLRDKFDMPSPSNPTGRSDLPGIDLFVSTADPEKEPPLVTANTILSILAVDYPVEKVSCYLSDDGGALLSFEAMAEAASFADLWVPFCRKHNIEPRNPDSYFSLKIDPTKNKSRIDFVKDRRKIKREYDEFKVRINDGTHWPGTWAASTREHSKGDHAGILQVMLKPPSNTDTRLPMFVYVSREKRPGYDHNKKAGAMNALVRASAILSNGPFILNLDCDHYIYNCKAVREGMCFMMDRGGEDICYIQFPQRFEGIDPSDRYANNNTVFFDGNMRALDGVQGPVYVGTGTMFRRFALYGFDPPNPDKLLEKKESETEALTTSDFDPDLDVTQLPKRFGNSTLLAESIPIAEFQGRPLADHPAVKYGRPPGALRVPRDPLDATTVAESVSVISCWYEDKTEWGDRVGWIYGSVTEDVVTGYRMHNRGWRSVYCITKRDSFRGSAPINLTDRLHQVLRWATGSVEIFFSRNNAILASKRLKFLQRLAYLNVGIYPFTSLFLILYCFLPAFSLFSGQFIVRTLSISFLVYLLMITICLIGLAVLEVKWSGIGLEEWWRNEQWWLISGTSSHLYAVVQGVLKVIAGIEISFTLTTKSGGDDNEDIYADLYIVKWSSLMIPPIVIAMVNIIAIVVAFIRTIYQAVPQWSKLIGGAFFSFWVLAHLYPFAKGLMGRRGKTPTIVFVWAGLIAITISLLWTAINPNTGPAAAAEGVGGGGFQFP

SEQ ID NO: 88913 - DNA, 651 bp, Arabidopsis thaliana
  misc_feature (1)..(651): Ceres Seq. ID no. 12713807
  misc_feature: MA Experiment ID: 20000314 Result: Down-regulated in Transcription
  misc_feature: MA Experiment 20000314 PARAMETER Experiment Name: At_14day_Shoots-Roots_Sub_P Parameter: Age (day) Value: 14
  misc_feature: MA Experiment 20000314 PARAMETER Experiment Name: At_14day_Shoots-Roots_Sub_P Parameter: Organism Value: A. thaliana
  misc_feature: MA Experiment 20000314 PARAMETER Experiment Name: At_14day_Shoots-Roots_Sub_P Parameter: Plant Line Value: WS
  misc_feature: MA Experiment 20000314 PARAMETER Experiment Name: At_14day_Shoots-Roots_Sub_P Parameter: Tissue Value: Roots vs. Whole Plant
  misc_feature: MA Experiment ID: 20000315 Result: Down-regulated in Transcription
  misc_feature: MA Experiment 20000315 PARAMETER Experiment Name: At_14day_Shoots-Roots_Sub_P Parameter: Age (day) Value: 14
  misc_feature: MA Experiment 20000315 PARAMETER Experiment Name: At_14day_Shoots-Roots_Sub_P Parameter: Organism Value: A. thaliana
  misc_feature: MA Experiment 20000315 PARAMETER Experiment Name: At_14day_Shoots-Roots_Sub_P Parameter: Plant Line Value: WS
  misc_feature: MA Experiment 20000315 PARAMETER Experiment Name: At_14day_Shoots-Roots_Sub_P Parameter: Tissue Value: Shoots vs. Whole Plant
  misc_feature: MA Experiment ID: 20000352 Result: Up-regulated in Transcription
  misc_feature: MA Experiment 20000352 PARAMETER Experiment Name: At_Drought_Sub_P Parameter: Age (day) Value: 7
  misc_feature: MA Experiment 20000352 PARAMETER Experiment Name: At_Drought_Sub_P Parameter: Organism Value: A. thaliana
  misc_feature: MA Experiment 20000352 PARAMETER Experiment Name: At_Drought_Sub_P Parameter: Plant Line Value: WS
  misc_feature: MA Experiment 20000352 PARAMETER Experiment Name: At_Drought_Sub_P Parameter: Timepoint (hr) Value: 6
  misc_feature: MA Experiment 20000352 PARAMETER Experiment Name: At_Drought_Sub_P Parameter: Tissue Value: Whole Plant
  misc_feature: MA Experiment 20000352 PARAMETER Experiment Name: At_Drought_Sub_P Parameter: Treatment Value: Drought vs. No Drought
  misc_feature: MA Experiment ID: 20000355 Result: Down-regulated in Transcription
  misc_feature: MA Experiment 20000355 PARAMETER Experiment Name: At_Siliques_Sub_P Parameter: Age (day) Value: 21
  misc_feature: MA Experiment 20000355 PARAMETER Experiment Name: At_Siliques_Sub_P Parameter: Organism Value: A. thaliana
  misc_feature: MA Experiment 20000355 PARAMETER Experiment Name: At_Siliques_Sub_P Parameter: Plant Line Value: WS
  misc_feature: MA Experiment 20000355 PARAMETER Experiment Name: At_Siliques_Sub_P Parameter: Tissue Value: Less Than 5mm Siliques vs. Whole Plant
  misc_feature: MA Experiment ID: 20000440 Result: Down-regulated in Transcription
  misc_feature: MA Experiment 20000440 PARAMETER Experiment Name: At_Closed-Flower__Sub_P Parameter: Tissue Value: Closed Flower vs. Whole Plant
  misc_feature: MA Experiment ID: 20000634 Result: Up-regulated in Transcription
  misc_feature: MA Experiment 20000634 PARAMETER Experiment Name: At_10percent_PEG_Sub_P Parameter: Age (day) Value: 12
  misc_feature: MA Experiment 20000634 PARAMETER Experiment Name: At_10percent_PEG_Sub_P Parameter: Organism Value: A. thaliana
  misc_feature: MA Experiment 20000634 PARAMETER Experiment Name: At_10percent_PEG_Sub_P Parameter: Plant Line Value: WS
  misc_feature: MA Experiment 20000634 PARAMETER Experiment Name: At_10percent_PEG_Sub_P Parameter: Timepoint (day) Value: 12
  misc_feature: MA Experiment 20000634 PARAMETER Experiment Name: At_10percent_PEG_Sub_P Parameter: Tissue Value: Whole Plant
  misc_feature: MA Experiment 20000634 PARAMETER Experiment Name: At_10percent_PEG_Sub_P Parameter: Treatment Value: 10% PEG vs. No Treatment
atggctaccggtttcttcgccggacacattgctgcggctctgccttccatctacaaagacggctccggctgcggagcttgcttccaggtcagatgcaagaacccgacgctttgcagcagcaaaggaaccacggtgattgtcacagacttgaacaagaccaaccaaaccgatcttgtccttagcagcagagcctttagggccatggctaagcctgttgttggcgccgacagagatcttctcaaacaaggcattgtcgatattgaatacaggagagttccttgcgattacggtaacaagaagatgaacgtgagagttgaagaatcaagcaaaaatccaaactacttggcgataaagctcttgtaccaaggaggccaaactgaagtggtagccatttacattgctcaggttggttcgtcacattggagttacatgaccagaagccacggagccgtgtgggttactgacaaagtacccaacggagctctgcagttcaggttcgtggtgaccgcaggctacgacggcaaaatggtctggtcgcagagggtccttccagctaactgggaagctggaaagtcctatgacgccggcgttcagatcacagacattgctcaggaaggttgtgatccatgcgacgatcacatctggaactga

SEQ ID NO: 88914 - protein, 216 aa, Arabidopsis thaliana; identical to SEQ ID NO: 24745
  peptide (1)..(216): Ceres Seq. ID no. 12713808
  misc_feature (101)..(184): Pfam Name: Pollen allergen Pfam Description: Pollen allergen
  misc_feature (1)..(216): Homolog of NCBI NO: 15233841 NR Description: putative pollen allergen; protein id: supported by cDNA: gi_14190354, supported by cDNA: gi_15215878
  misc_feature (1)..(216): Homolog of NCBI NO: 15231303 NR Description: putative protein; protein id: At3g45970.1, by cDNA: 27534., supported by cDNA: gi_14190436, supported by
  misc_feature (1)..(216): Homolog of NCBI NO: 21555265 NR Description: Expansin-like 1 precursor (At-EXPL1)
  misc_feature (1)..(216): Homolog of NCBI NO: 20138389 NR Description: Expansin-like 3 precursor (At-EXPL3)
  misc_feature (1)..(216): Homolog of NCBI NO: 30692657 NR Description: expansin protein family (EXPL3) [Arabidopsis >gi|26449323|dbj|BAC41789.1| unknown protein [Arabidopsis
  misc_feature (1)..(215): Homolog of NCBI NO: 33111959 NR Description: expansin-like protein [Quercus robur]
  misc_feature (8)..(215): Homolog of NCBI NO: 21654743 NR Description: expansin-like protein 1 [Oryza sativa]
  misc_feature (8)..(215): Homolog of NCBI NO: 25136297 NR Description: expansin-like protein [Oryza sativa (japonica
  misc_feature (1)..(215): Homolog of NCBI NO: 37536544 NR Description: putative pollen allergen [Oryza sativa (japonica group)] >gi|10140765|gb|AAG13596.1| putative pollen allergen sativa] >gi|31433332|gb|AAP54861.1| putative pollen allergen
  misc_feature (8)..(215): Homolog of NCBI NO: 20502989 NR Description: Putative pollen allergen [Oryza sativa (japonica

SEQ ID NO: 88915 - protein, 149 aa, Arabidopsis thaliana; identical to SEQ ID NO: 24746
  peptide (1)..(149): Ceres Seq. ID no. 12713809
  misc_feature (34)..(117): Pfam Name: Pollen allergen Pfam Description: Pollen allergen
  misc_feature (1)..(149): Homolog of NCBI NO: 15233841 NR Description: putative pollen allergen; protein id: supported by cDNA: gi_14190354, supported by cDNA: gi_15215878
  misc_feature (1)..(149): Homolog of NCBI NO: 15231303 NR Description: putative protein; protein id: At3g45970.1, by cDNA: 27534., supported by cDNA: gi_14190436, supported by
  misc_feature (1)..(149): Homolog of NCBI NO: 21555265 NR Description: Expansin-like 1 precursor (At-EXPL1)
  misc_feature (1)..(149): Homolog of NCBI NO: 20138389 NR Description: Expansin-like 3 precursor (At-EXPL3)
  misc_feature (1)..(149): Homolog of NCBI NO: 30692657 NR Description: expansin protein family (EXPL3) [Arabidopsis >gi|26449323|dbj|BAC41789.1| unknown protein [Arabidopsis
  misc_feature (1)..(148): Homolog of NCBI NO: 33111959 NR Description: expansin-like protein [Quercus robur]
  misc_feature (1)..(148): Homolog of NCBI NO: 21654743 NR Description: expansin-like protein 1 [Oryza sativa]
  misc_feature (1)..(148): Homolog of NCBI NO: 25136297 NR Description: expansin-like protein [Oryza sativa (japonica
  misc_feature (1)..(148): Homolog of NCBI NO: 37536544 NR Description: putative pollen allergen [Oryza sativa (japonica group)] >gi|10140765|gb|AAG13596.1| putative pollen allergen sativa] >gi|31433332|gb|AAP54861.1| putative pollen allergen
  misc_feature (1)..(148): Homolog of NCBI NO: 20502989 NR Description: Putative pollen allergen [Oryza sativa (japonica

SEQ ID NO: 88916 - protein, 116 aa, Arabidopsis thaliana
  peptide (1)..(116): Ceres Seq. ID no. 12713810
  misc_feature (1)..(84): Pfam Name: Pollen allergen Pfam Description: Pollen allergen
  misc_feature (1)..(116): Homolog of NCBI NO: 15233841 NR Description: putative pollen allergen; protein id: supported by cDNA: gi_14190354, supported by cDNA: gi_15215878
  misc_feature (1)..(116): Homolog of NCBI NO: 15231303 NR Description: putative protein; protein id: At3g45970.1, by cDNA: 27534., supported by cDNA: gi_14190436, supported by
  misc_feature (1)..(116): Homolog of NCBI NO: 21555265 NR Description: Expansin-like 1 precursor (At-EXPL1)
  misc_feature (1)..(116): Homolog of NCBI NO: 20138389 NR Description: Expansin-like 3 precursor (At-EXPL3)
  misc_feature (1)..(116): Homolog of NCBI NO: 30692657 NR Description: expansin protein family (EXPL3) [Arabidopsis >gi|26449323|dbj|BAC41789.1| unknown protein [Arabidopsis
  misc_feature (1)..(115): Homolog of NCBI NO: 33111959 NR Description: expansin-like protein [Quercus robur]
  misc_feature (1)..(115): Homolog of NCBI NO: 21654743 NR Description: expansin-like protein 1 [Oryza sativa]
  misc_feature (1)..(115): Homolog of NCBI NO: 25136297 NR Description: expansin-like protein [Oryza sativa (japonica
  misc_feature (1)..(115): Homolog of NCBI NO: 37536544 NR Description: putative pollen allergen [Oryza sativa (japonica group)] >gi|10140765|gb|AAG13596.1| putative pollen allergen sativa] >gi|31433332|gb|AAP54861.1| putative pollen allergen
  misc_feature (1)..(115): Homolog of NCBI NO: 20502989 NR Description: Putative pollen allergen [Oryza sativa (japonica
MNVRVEESSKNPNYLAIKLLYQGGQTEVVAIYIAQVGSSHWSYMTRSHGAVWVTDKVPNGALQFRFVVTAGYDGKMVWSQRVLPANWEAGKSYDAGVQITDIAQEGCDPCDDHIWN

SEQ ID NO: 88917 - DNA, 2814 bp, Arabidopsis thaliana
  misc_feature (1)..(2814): Ceres Seq. ID no. 12713826
  misc_feature: MA Experiment ID: 20000179 Result: Down-regulated in Transcription
  misc_feature: MA Experiment 20000179 PARAMETER Experiment Name: At_Germinating_Seeds_P Parameter: Age (hr) Value: 6 vs. 0
  misc_feature: MA Experiment 20000179 PARAMETER Experiment Name: At_Germinating_Seeds_P Parameter: Tissue Value: Germinating Seeds
  misc_feature: MA Experiment ID: 20000180 Result: Down-regulated in Transcription
  misc_feature: MA Experiment 20000180 PARAMETER Experiment Name: At_Germinating_Seeds_P Parameter: Age (hr) Value: 24 vs. 0
  misc_feature: MA Experiment 20000180 PARAMETER Experiment Name: At_Germinating_Seeds_P Parameter: Tissue Value: Germinating Seeds
atgtggcccagtatcattgacaaagctagaattgggggacttaacaccatccaaacttatgttttctggaatgtccatgagcctgaacaaggcaagtatgatttcaaggggagatttgacttggtgaaattcatcaaactaatccacgagaaaggtctctatgtcactctcagactcggaccctttatccaagccgaatggaaccacggagggttgccgtactggctacgcgaggtcccagatgtttacttccgtacaaataatgaaccttttaaggaacatacagagagatatgtgaggaaaatacttgggatgatgaaggaagagaagctgttcgcttcacaaggaggtcccatcatcttgggacagatagagaatgagtacaacgcggttcagctagcctacaaggagaatggagagaagtatataaaatgggcagcaaatttggtggagtcaatgaatctgggaatcccctgggttatgtgcaaacaaaacgatgctcctggcaatctgattaatgcttgtaatggaaggcattgcggagatactttcccaggaccaaacagacacgataagccctccttatggaccgagaattggactactcagtttcgagtttttggggatcctccaacacagagaacagtcgaagatattgcattctcagtcgctagatacttctctaagaacggatcccatgtcaactactacatgtaccatggcggaacaaacttcggacgcacgtctgctcatttcgttaccactcgttactatgacgatgcgccacttgacgaatttggtttggagaaagctccaaaatacggtcacctaaaacatgtgcacagagcacttagattgtgcaagaaggcacttttttggggtcaacttcgcgcccagacacttggtcccgataccgaggttaggtactacgagcagccagggacaaaagtgtgtgcggctttcttatcgaacaataacacaagagatactaatacgattaaattcaaaggtcaagattacgttttaccgtctcgttctatcagcatcttaccggattgtaaaacagtcgtttacaatactgcacagattgtagcccaacacagttggagagattttgtcaagtcagagaagacaagcaaaggtctcaaatttgagatgtttagtgaaaatattccttccttacttgacggtgattctttgattccgggggagctttattacttaactaaagacaaaacagattatgcttggtataccacaagcgtaaagattgacgaagatgactttccagaccaaaaaggtctgaagactatactgagagtagcgagtcttggtcacgcactgatcgtttacgttaacggagagtacgcagggaaagcacatggacgccatgaaatgaagagtttcgagtttgcaaaaccagtgaactttaaaaccggagataatcgcatttcaattttgggtgtactaaccggattaccagacagtggatcatacatggaacacaggtttgctggtccacgtgctatttcaatcatcggtttaaagtcaggaacgcgagatttgaccgagaacaatgaatggggacacttggccggtttggaaggtgaaaagaaagaggtgtacacagaggaaggatctaagaaggtgaaatgggagaaagatggtaaacgtaagcctcttacgtggtacaagacctactttgagacaccagagggagtgaacgcggtcgcgattaggatgaaagcaatggggaagggattgatttgggttaatggaattggcgtagggagatattggatgtctttcctttctccactgggagagccaactcaaacggagtaccatataccgagatctttcatgaagggggagaagaagaagaacatgctggtgattctcgaggaagaaccaggggtgaagttagagtctattgatttcgtgttggtgaatagagacacaatctgtagtaatgtcggggaggattacccagtatcggtgaaatcgtggaagagagaagggccaaagatagtttcgagaagcaaagatatgaggctaaaggcagtgatgaggtgtccaccggagaaacaaatggtggaagtacaatttgcaagcttcggagatccgacaggaacttgtggtaacttcacaatggggaagtgctctgcatctaagtcaaaggaggtggtcgagaaggagtgtttgggtaggaattattgttccatagtagtagcgagggagacttttggggacaaagggtgtccggagatagtgaagacattggcagtgcaagtcaatcttgattccgattctgccctggtgtcggatctaggttttggccctttctctacggtagttgttaatgtccctctaatcggtggagcggctccgcctcagccccgcttcaatttaatgcctccgtcaaactatgtcgctggtttgggtcgtggggctgcagggtttactacccgctccgatattggtcctgctcgtgctaatggcgatggaaacgctgacgtgaatcacaagtttgatgattttgaagggcatgatgccggattgttcgctaatgccgagagtgatgaccaagacaaagaggctgatgctatttgggacgcaattgataggaggatggattcgaggaggaaagacagaagagaagcgaagctcaagcaagaaatcgagaattacagagcctccaaccctaaagtttctgggcagtttgtggatttgacgagaaagttgcatactttgtctgaggatgaatgggatagtattccagagattgggaattactcgcatagattgtattag

SEQ ID NO: 88918 - protein, 937 aa, Arabidopsis thaliana
  peptide (1)..(937): Ceres Seq. ID no. 12713827
  misc_feature (690)..(765): Pfam Name: Galactose binding lectin domain Pfam Description: Galactose binding lectin domain
  misc_feature (1)..(770): Homolog of NCBI NO: 25326168 NR Description: probable beta-galactosidase [imported] -
  misc_feature (1)..(770): Homolog of NCBI NO: 30679742 NR Description: glycosyl hydrolase family 35 (beta-galactosidase)
  misc_feature (1)..(765): Homolog of NCBI NO: 18418558 NR Description: glycosyl hydrolase family 35 protein id: At4g35010.1 [Arabidopsis thaliana]
  misc_feature (123)..(765): Homolog of NCBI NO: 7484826 NR Description: beta-galactosidase homolog M4E13.70 - Arabidopsis
  misc_feature (1)..(89): Homolog of NCBI NO: 7484826 NR Description: beta-galactosidase homolog M4E13.70 - Arabidopsis
  misc_feature (1)..(654): Homolog of NCBI NO: 10862896 NR Description: putative beta-galactosidase [Nicotiana tabacum]
  misc_feature (1)..(764): Homolog of NCBI NO: 30699255 NR Description: glycosyl hydrolase family 35 (beta-galactosidase)
  misc_feature (1)..(750): Homolog of NCBI NO: 26451843 NR Description: unknown protein [Arabidopsis thaliana]
  misc_feature (1)..(603): Homolog of NCBI NO: 15081596 NR Description: putative beta-galactosidase BG1 [Vitis vinifera]
  misc_feature (558)..(764): Homolog of NCBI NO: 15081596 NR Description: putative beta-galactosidase BG1 [Vitis vinifera]
MWPSIIDKARIGGLNTIQTYVFWNVHEPEQGKYDFKGRFDLVKFIKLIHEKGLYVTLRLGPFIQAEWNHGGLPYWLREVPDVYFRTNNEPFKEHTERYVRKILGMMKEEKLFASQGGPIILGQIENEYNAVQLAYKENGEKYIKWAANLVESMNLGIPWVMCKQNDAPGNLINACNGRHCGDTFPGPNRHDKPSLWTENWTTQFRVFGDPPTQRTVEDIAFSVARYFSKNGSHVNYYMYHGGTNFGRTSAHFVTTRYYDDAPLDEFGLEKAPKYGHLKHVHRALRLCKKALFWGQLRAQTLGPDTEVRYYEQPGTKVCAAFLSNNNTRDTNTIKFKGQDYVLPSRSISILPDCKTVVYNTAQIVAQHSWRDFVKSEKTSKGLKFEMFSENIPSLLDGDSLIPGELYYLTKDKTDYAWYTTSVKIDEDDFPDQKGLKTILRVASLGHALIVYVNGEYAGKAHGRHEMKSFEFAKPVNFKTGDNRISILGVLTGLPDSGSYMEHRFAGPRAISIIGLKSGTRDLTENNEWGHLAGLEGEKKEVYTEEGSKKVKWEKDGKRKPLTWYKTYFETPEGVNAVAIRMKAMGKGLIWVNGIGVGRYWMSFLSPLGEPTQTEYHIPRSFMKGEKKKNMLVILEEEPGVKLESIDFVLVNRDTICSNVGEDYPVSVKSWKREGPKIVSRSKDMRLKAVMRCPPEKQMVEVQFASFGDPTGTCGNFTMGKCSASKSKEVVEKECLGRNYCSIVVARETFGDKGCPEIVKTLAVQVNLDSDSALVSDLGFGPFSTVVVNVPLIGGAAPPQPRFNLMPPSNYVAGLGRGAAGFTTRSDIGPARANGDGNADVNHKFDDFEGHDAGLFANAESDDQDKEADAIWDAIDRRMDSRRKDRREAKLKQEIENYRASNPKVSGQFVDLTRKLHTLSEDEWDSIPEIGNYSHRLY

SEQ ID NO: 88919 - protein, 833 aa, Arabidopsis thaliana
  peptide (1)..(833): Ceres Seq. ID no. 12713828
  misc_feature (586)..(661): Pfam Name: Galactose binding lectin domain Pfam Description: Galactose binding lectin domain
  misc_feature (1)..(666): Homolog of NCBI NO: 25326168 NR Description: probable beta-galactosidase [imported] -
  misc_feature (1)..(666): Homolog of NCBI NO: 30679742 NR Description: glycosyl hydrolase family 35 (beta-galactosidase)
  misc_feature (1)..(661): Homolog of NCBI NO: 18418558 NR Description: glycosyl hydrolase family 35 protein id: At4g35010.1 [Arabidopsis thaliana]
  misc_feature (19)..(661): Homolog of NCBI NO: 7484826 NR Description: beta-galactosidase homolog M4E13.70 - Arabidopsis
  misc_feature (1)..(550): Homolog of NCBI NO: 10862896 NR Description: putative beta-galactosidase [Nicotiana tabacum]
  misc_feature (1)..(660): Homolog of NCBI NO: 30699255 NR Description: glycosyl hydrolase family 35 (beta-galactosidase)
  misc_feature (1)..(646): Homolog of NCBI NO: 26451843 NR Description: unknown protein [Arabidopsis thaliana]
  misc_feature (1)..(499): Homolog of NCBI NO: 15081596 NR Description: putative beta-galactosidase BG1 [Vitis vinifera]
  misc_feature (454)..(660): Homolog of NCBI NO: 15081596 NR Description: putative beta-galactosidase BG1 [Vitis vinifera]
  misc_feature (1)..(496): Homolog of NCBI NO: 7939621 NR Description: beta-galactosidase [Lycopersicon esculentum]
MMKEEKLFASQGGPIILGQIENEYNAVQLAYKENGEKYIKWAANLVESMNLGIPWVMCKQNDAPGNLINACNGRHCGDTFPGPNRHDKPSLWTENWTTQFRVFGDPPTQRTVEDIAFSVARYFSKNGSHVNYYMYHGGTNFGRTSAHFVTTRYYDDAPLDEFGLEKAPKYGHLKHVHRALRLCKKALFWGQLRAQTLGPDTEVRYYEQPGTKVCAAFLSNNNTRDTNTIKFKGQDYVLPSRSISILPDCKTVVYNTAQIVAQHSWRDFVKSEKTSKGLKFEMFSENIPSLLDGDSLIPGELYYLTKDKTDYAWYTTSVKIDEDDFPDQKGLKTILRVASLGHALIVYVNGEYAGKAHGRHEMKSFEFAKPVNFKTGDNRISILGVLTGLPDSGSYMEHRFAGPRAISIIGLKSGTRDLTENNEWGHLAGLEGEKKEVYTEEGSKKVKWEKDGKRKPLTWYKTYFETPEGVNAVAIRMKAMGKGLIWVNGIGVGRYWMSFLSPLGEPTQTEYHIPRSFMKGEKKKNMLVILEEEPGVKLESIDFVLVNRDTICSNVGEDYPVSVKSWKREGPKIVSRSKDMRLKAVMRCPPEKQMVEVQFASFGDPTGTCGNFTMGKCSASKSKEVVEKECLGRNYCSIVVARETFGDKGCPEIVKTLAVQVNLDSDSALVSDLGFGPFSTVVVNVPLIGGAAPPQPRFNLMPPSNYVAGLGRGAAGFTTRSDIGPARANGDGNADVNHKFDDFEGHDAGLFANAESDDQDKEADAIWDAIDRRMDSRRKDRREAKLKQEIENYRASNPKVSGQFVDLTRKLHTLSEDEWDSIPEIGNYSHRLY

SEQ ID NO: 88920 - protein, 832 aa, Arabidopsis thaliana
  peptide (1)..(832): Ceres Seq. ID no. 12713829
  misc_feature (585)..(660): Pfam Name: Galactose binding lectin domain Pfam Description: Galactose binding lectin domain
  misc_feature (1)..(665): Homolog of NCBI NO: 25326168 NR Description: probable beta-galactosidase [imported] -
  misc_feature (1)..(665): Homolog of NCBI NO: 30679742 NR Description: glycosyl hydrolase family 35 (beta-galactosidase)
  misc_feature (1)..(660): Homolog of NCBI NO: 18418558 NR Description: glycosyl hydrolase family 35 protein id: At4g35010.1 [Arabidopsis thaliana]
  misc_feature (18)..(660): Homolog of NCBI NO: 7484826 NR Description: beta-galactosidase homolog M4E13.70 - Arabidopsis
  misc_feature (1)..(549): Homolog of NCBI NO: 10862896 NR Description: putative beta-galactosidase [Nicotiana tabacum]
  misc_feature (1)..(659): Homolog of NCBI NO: 30699255 NR Description: glycosyl hydrolase family 35 (beta-galactosidase)
  misc_feature (1)..(645): Homolog of NCBI NO: 26451843 NR Description: unknown protein [Arabidopsis thaliana]
  misc_feature (1)..(498): Homolog of NCBI NO: 15081596 NR Description: putative beta-galactosidase BG1 [Vitis vinifera]
  misc_feature (453)..(659): Homolog of NCBI NO: 15081596 NR Description: putative beta-galactosidase BG1 [Vitis vinifera]
  misc_feature (1)..(495): Homolog of NCBI NO: 7939621 NR Description: beta-galactosidase [Lycopersicon esculentum]
MKEEKLFASQGGPIILGQIENEYNAVQLAYKENGEKYIKWAANLVESMNLGIPWVMCKQNDAPGNLINACNGRHCGDTFPGPNRHDKPSLWTENWTTQFRVFGDPPTQRTVEDIAFSVARYFSKNGSHVNYYMYHGGTNFGRTSAHFVTTRYYDDAPLDEFGLEKAPKYGHLKHVHRALRLCKKALFWGQLRAQTLGPDTEVRYYEQPGTKVCAAFLSNNNTRDTNTIKFKGQDYVLPSRSISILPDCKTVVYNTAQIVAQHSWRDFVKSEKTSKGLKFEMFSENIPSLLDGDSLIPGELYYLTKDKTDYAWYTTSVKIDEDDFPDQKGLKTILRVASLGHALIVYVNGEYAGKAHGRHEMKSFEFAKPVNFKTGDNRISILGVLTGLPDSGSYMEHRFAGPRAISIIGLKSGTRDLTENNEWGHLAGLEGEKKEVYTEEGSKKVKWEKDGKRKPLTWYKTYFETPEGVNAVAIRMKAMGKGLIWVNGIGVGRYWMSFLSPLGEPTQTEYHIPRSFMKGEKKKNMLVILEEEPGVKLESIDFVLVNRDTICSNVGEDYPVSVKSWKREGPKIVSRSKDMRLKAVMRCPPEKQMVEVQFASFGDPTGTCGNFTMGKCSASKSKEVVEKECLGRNYCSIVVARETFGDKGCPEIVKTLAVQVNLDSDSALVSDLGFGPFSTVVVNVPLIGGAAPPQPRFNLMPPSNYVAGLGRGAAGFTTRSDIGPARANGDGNADVNHKFDDFEGHDAGLFANAESDDQDKEADAIWDAIDRRMDSRRKDRREAKLKQEIENYRASNPKVSGQFVDLTRKLHTLSEDEWDSIPEIGNYSHRLY

SEQ ID NO: 88921 - DNA, 3813 bp, Arabidopsis thaliana
  misc_feature (1)..(3813): Ceres Seq. ID no. 12713844
  misc_feature: MA Experiment ID: 20000173 Result: Down-regulated in Transcription
  misc_feature: MA Experiment 20000173 PARAMETER Experiment Name: At_42deg_Heat_P Parameter: Age (day) Value: 14
  misc_feature: MA Experiment 20000173 PARAMETER Experiment Name: At_42deg_Heat_P Parameter: Organism Value: A. thaliana
  misc_feature: MA Experiment 20000173 PARAMETER Experiment Name: At_42deg_Heat_P Parameter: Plant Line Value: WS
  misc_feature: MA Experiment 20000173 PARAMETER Experiment Name: At_42deg_Heat_P Parameter: Temperature (deg C) Value: 42 vs. 22
  misc_feature: MA Experiment 20000173 PARAMETER Experiment Name: At_42deg_Heat_P Parameter: Timepoint (hr) Value: 6
  misc_feature: MA Experiment 20000173 PARAMETER Experiment Name: At_42deg_Heat_P Parameter: Tissue Value: Aerial
  misc_feature: MA Experiment ID: 20000496 Result: Up-regulated in Transcription
  misc_feature: MA Experiment 20000496 PARAMETER Experiment Name: At_Guard_Cells_P Parameter: Harvest Date Value: 7/19/2002
  misc_feature: MA Experiment 20000496 PARAMETER Experiment Name: At_Guard_Cells_P Parameter: Organism Value: Canola
  misc_feature: MA Experiment 20000496 PARAMETER Experiment Name: At_Guard_Cells_P Parameter: Tissue Value: Guard Cells vs. Leaves
atgcaacttgtggaggggggactagagaatgatgtagtttttgctctagttgttttctcgttgcagtatattcttgctagccatgagtattggaaatacaatcatggaaatatgcgttggaaagtgacactaaaagtcatcgagttgatgaaaacgtgtctcagattcagtaaattctccacaaagctgagggatgttctccttgatattttactgaacgatgcctctgttcacagtgctcttttcagaataatttgtacgactacgcaaaatttagagaacctttgttcgagccgttttattgaaccagcagagattgaaggatggcaacttgctatagtctctgttttggatgttttgaacgtcatactctcccaattttctgagagtacacattctggtcttcctgtgtttcatcaagccatgctgtcatctacaacaaaaccaatctcagttgttgcagctatcacatcactgatttcttacttccgcaatcctactatacaggtttgtgctgctcaagtgctgtcaaagttatttgccttggcagaatcatcacaactctatataataagcaatgcaggctttggtctagacaataaacagattacagatttaagaaattcggttacccagatcgtacttgatctatcgggacaaaatgagcatctagtcgttgccaccttgaaactactaactgttgcggcaagatttcagcctgctcttttagtggccatatttgattcagacgaagactcagattctagcaacgtaaaacagtcgcgcaaagatgcctcctcaattcctgactgggcttgtaaatctcgcttactgcacactatcctgcaatatgtagagagagcaaccgattttgtcgatagacacacagatatattactgggtttacttgatttcctgaaaaccctttggcaagaggctggccaatacgcaaatatgctggaaccgtttaaggcgtcaaaaaagttgtggcaggaattttccgacattatatcacaggcttctaagataaaagattcgacggttggaagtttaggcaaggaagaaatctcgaaattgttagtgaaatatcagtgtcaggcttctgttttggaaattatggcttgcaacatgtttttgtacaagaagttgctgtttgcggagtcacttaaaaagccatgtgtggagactaaaaagacagcaagtaatggagtatctccacccaaattaacttggacagctgattcagatcccaaggatatcttttcaaaatggtgtgacatatctgttttggatggcattatccatacttataaagcacaatcagtagagtttcaccacgctttacaccttttgcttaggtgcctccatatttcagaaatagttgctgccgttttacttattgtgcatttgattgtgaaactggaaacatctggcgcaggagcattgtctatggttttagttgagaagatcaaactcatatcagaaactctttgtgctcaacctgctttttctgagttgttggcgcaatattcaaaacttggttataggtttaccactgtttcacattttgcttacaatctattgggttctatttctagtggaggaaaggagttgatgcctatgattttcagcgatctatactgtcatcttcaaggaaaacttgagggtcgtgatatcccaactggtcctttcaaagagcttttccagtttctagtggagacgagcttttgggagaaatataaacagaaaactaataaggatgtaaatatggctttgggggactgtttgtttgacactcagcaaatacagactgaattaggtattgatatttgggatttctctgagtggaagacatctaaaacaacggcagaggaaatgttgaactacatgcagagagcaaactcgatggttttactctcaacttcgcagctctctgttttgcatgcattgatttccgtcttgatactttatgaggataattctcttgaagaaagtgcagctgcggaaaggaaaatcccttctcgagtcactcttttaagcattgataaagtatgccgaaaattttgcaccacggttgattcacttgcctctctctgggatgcacccaagattgtgtttgatattcttacagcacaggcagacttgctatcccgcctattgaaatccgcaaagaaaaatctttcattatctgtatgtgcacttgtcctgagaaatgttgggcctggcctcaagatccttggtagtttgaggcattcaaatgctatattgaagaagacgataaacctcctgcttgaggtgctgctcctggttgtgggttttggttcagacaactcaaactcgagtgggatgggacatatggtgctagccaaagattttgcagaaatatctgatgctacaattggattattaccccttctctgcaacttcatggggaatcccgagtacttgactctctgcctgaccacagtagacttgattctcaggaattttttgacgccagagacatggttccctattatacagagtcaactccgcttgcagcatgttattctacagcttcaggataagaaatccacaacatccgtttcagcaatactaaaatttttcttaactattgctcaagttcatggcggtgctcagatgcttctaaattctggatttttctcgactttaagagctttgttaatggagtttccggatggaatgtctactttggtatctgacaatgaaaagggctcgctgctagaaaagacagaaaaaactcagcatatctggggaatcggtttggctgtggttactgccatggttcattctctaggatctgtttctgcaggggctgatattgtggagagtgtcatatcttactttttcttggagaaaggttacatgatctcatactatctcgctgcaccagatttcccttctgatgatcgtgacaaagtgaggctacgaagtcaacggacgtggacttcccttgcttatctgagagtaaccgagcatactctccttctgctgtgtgcattagctagccattggagatcatgggttaaaattatgaaggatatggattctccattaagagaaatgacaatacatctcttggcctttatcagcaaaggcgctcaacggcttagagagtctcagagccacatatctcatctgttatgccctccagtagcgaaagaagagtttgattcctgcaaaagaccgtctttcatcaataccaaacacggatggttttcgctagcacctttagtttgtgttgggaaacccaagatcactgcagtatctatctcgactgctctagttgttaggggagacacaacagaacatcctgggtctgttcctcaatcgcaattttcagactcagttgcgatacagatatatagagtggcttctctattgttgaaatttctgtgcttacaagcagagggtgttgttacgagggcagaggaagtgggatatgtcgatattgctcatttccctgagcttccagagccggagattttacatggtctacaggaccaagcgacggcgatagtcgctgagctatgtgataattacaaatccaaagagattccagatgaagtaaagaagttgtgccttatgctgatccaaacgacagagatgtcgttatacttggaactctgtgtagttcaggtttgcaggatccatcctgtatttgggcgtgtggataacttctccaaagacttgaaaaaactagtgaaagctgctgaggtgcatacctacttagaaccgtccatagattcactgaagaaaatagctgcgtttctgtatcctggatcactttag

SEQ ID NO: 88922 - protein, 1270 aa, Arabidopsis thaliana
  peptide (1)..(1270): Ceres Seq. ID no. 12713845
  misc_feature (546)..(1255): Homolog of NCBI NO: 21306600 NR Description: Hypothetical protein [Oryza sativa (japonica
  misc_feature (3)..(129): Homolog of NCBI NO: 21306600 NR Description: Hypothetical protein [Oryza sativa (japonica
  misc_feature (417)..(497): Homolog of NCBI NO: 21306600 NR Description: Hypothetical protein [Oryza sativa (japonica
  misc_feature (168)..(449): Homolog of NCBI NO: 37531198 NR Description: hypothetical protein [Oryza sativa (japonica group)] >gi|20177643|gb|AAM14698.1| Hypothetical protein [Oryza
  misc_feature (3)..(129): Homolog of NCBI NO: 37531198 NR Description: hypothetical protein [Oryza sativa (japonica group)] >gi|20177643|gb|AAM14698.1| Hypothetical protein [Oryza
MQLVEGGLENDVVFALVVFSLQYILASHEYWKYNHGNMRWKVTLKVIELMKTCLRFSKFSTKLRDVLLDILLNDASVHSALFRIICTTTQNLENLCSSRFIEPAEIEGWQLAIVSVLDVLNVILSQFSESTHSGLPVFHQAMLSSTTKPISVVAAITSLISYFRNPTIQVCAAQVLSKLFALAESSQLYIISNAGFGLDNKQITDLRNSVTQIVLDLSGQNEHLVVATLKLLTVAARFQPALLVAIFDSDEDSDSSNVKQSRKDASSIPDWACKSRLLHTILQYVERATDFVDRHTDILLGLLDFLKTLWQEAGQYANMLEPFKASKKLWQEFSDIISQASKIKDSTVGSLGKEEISKLLVKYQCQASVLEIMACNMFLYKKLLFAESLKKPCVETKKTASNGVSPPKLTWTADSDPKDIFSKWCDISVLDGIIHTYKAQSVEFHHALHLLLRCLHISEIVAAVLLIVHLIVKLETSGAGALSMVLVEKIKLISETLCAQPAFSELLAQYSKLGYRFTTVSHFAYNLLGSISSGGKELMPMIFSDLYCHLQGKLEGRDIPTGPFKELFQFLVETSFWEKYKQKTNKDVNMALGDCLFDTQQIQTELGIDIWDFSEWKTSKTTAEEMLNYMQRANSMVLLSTSQLSVLHALISVLILYEDNSLEESAAAERKIPSRVTLLSIDKVCRKFCTTVDSLASLWDAPKIVFDILTAQADLLSRLLKSAKKNLSLSVCALVLRNVGPGLKILGSLRHSNAILKKTINLLLEVLLLVVGFGSDNSNSSGMGHMVLAKDFAEISDATIGLLPLLCNFMGNPEYLTLCLTTVDLILRNFLTPETWFPIIQSQLRLQHVILQLQDKKSTTSVSAILKFFLTIAQVHGGAQMLLNSGFFSTLRALLMEFPDGMSTLVSDNEKGSLLEKTEKTQHIWGIGLAVVTAMVHSLGSVSAGADIVESVISYFFLEKGYMISYYLAAPDFPSDDRDKVRLRSQRTWTSLAYLRVTEHTLLLLCALASHWRSWVKIMKDMDSPLREMTIHLLAFISKGAQRLRESQSHISHLLCPPVAKEEFDSCKRPSFINTKHGWFSLAPLVCVGKPKITAVSISTALVVRGDTTEHPGSVPQSQFSDSVAIQIYRVASLLLKFLCLQAEGVVTRAEEVGYVDIAHFPELPEPEILHGLQDQATAIVAELCDNYKSKEIPDEVKKLCLMLIQTTEMSLYLELCVVQVCRIHPVFGRVDNFSKDLKKLVKAAEVHTYLEPSIDSLKKIAAFLYPGSL

SEQ ID NO: 88923 - protein, 1233 aa, Arabidopsis thaliana
  peptide (1)..(1233): Ceres Seq. ID no. 12713846
  misc_feature (509)..(1218): Homolog of NCBI NO: 21306600 NR Description: Hypothetical protein [Oryza sativa (japonica
  misc_feature (1)..(92): Homolog of NCBI NO: 21306600 NR Description: Hypothetical protein [Oryza sativa (japonica
  misc_feature (380)..(460): Homolog of NCBI NO: 21306600 NR Description: Hypothetical protein [Oryza sativa (japonica
  misc_feature (131)..(412): Homolog of NCBI NO: 37531198 NR Description: hypothetical protein [Oryza sativa (japonica group)] >gi|20177643|gb|AAM14698.1| Hypothetical protein [Oryza
  misc_feature (1)..(92): Homolog of NCBI NO: 37531198 NR Description: hypothetical protein [Oryza sativa (japonica group)] >gi|20177643|gb|AAM14698.1| Hypothetical protein [Oryza
MRWKVTLKVIELMKTCLRFSKFSTKLRDVLLDILLNDASVHSALFRIICTTTQNLENLCSSRFIEPAEIEGWQLAIVSVLDVLNVILSQFSESTHSGLPVFHQAMLSSTTKPISVVAAITSLISYFRNPTIQVCAAQVLSKLFALAESSQLYIISNAGFGLDNKQITDLRNSVTQIVLDLSGQNEHLVVATLKLLTVAARFQPALLVAIFDSDEDSDSSNVKQSRKDASSIPDWACKSRLLHTILQYVERATDFVDRHTDILLGLLDFLKTLWQEAGQYANMLEPFKASKKLWQEFSDIISQASKIKDSTVGSLGKEEISKLLVKYQCQASVLEIMACNMFLYKKLLFAESLKKPCVETKKTASNGVSPPKLTWTADSDPKDIFSKWCDISVLDGIIHTYKAQSVEFHHALHLLLRCLHISEIVAAVLLIVHLIVKLETSGAGALSMVLVEKIKLISETLCAQPAFSELLAQYSKLGYRFTTVSHFAYNLLGSISSGGKELMPMIFSDLYCHLQGKLEGRDIPTGPFKELFQFLVETSFWEKYKQKTNKDVNMALGDCLFDTQQIQTELGIDIWDFSEWKTSKTTAEEMLNYMQRANSMVLLSTSQLSVLHALISVLILYEDNSLEESAAAERKIPSRVTLLSIDKVCRKFCTTVDSLASLWDAPKIVFDILTAQADLLSRLLKSAKKNLSLSVCALVLRNVGPGLKILGSLRHSNAILKKTINLLLEVLLLVVGFGSDNSNSSGMGHMVLAKDFAEISDATIGLLPLLCNFMGNPEYLTLCLTTVDLILRNFLTPETWFPIIQSQLRLQHVILQLQDKKSTTSVSAILKFFLTIAQVHGGAQMLLNSGFFSTLRALLMEFPDGMSTLVSDNEKGSLLEKTEKTQHIWGIGLAVVTAMVHSLGSVSAGADIVESVISYFFLEKGYMISYYLAAPDFPSDDRDKVRLRSQRTWTSLAYLRVTEHTLLLLCALASHWRSWVKIMKDMDSPLREMTIHLLAFISKGAQRLRESQSHISHLLCPPVAKEEFDSCKRPSFINTKHGWFSLAPLVCVGKPKITAVSISTALVVRGDTTEHPGSVPQSQFSDSVAIQIYRVASLLLKFLCLQAEGVVTRAEEVGYVDIAHFPELPEPEILHGLQDQATAIVAELCDNYKSKEIPDEVKKLCLMLIQTTEMSLYLELCVVQVCRIHPVFGRVDNFSKDLKKLVKAAEVHTYLEPSIDSLKKIAAFLYPGSL

SEQ ID NO: 88924 - protein, 1221 aa, Arabidopsis thaliana
  peptide (1)..(1221): Ceres Seq. ID no. 12713847
  misc_feature (497)..(1206): Homolog of NCBI NO: 21306600 NR Description: Hypothetical protein [Oryza sativa (japonica
  misc_feature (1)..(80): Homolog of NCBI NO: 21306600 NR Description: Hypothetical protein [Oryza sativa (japonica
  misc_feature (368)..(448): Homolog of NCBI NO: 21306600 NR Description: Hypothetical protein [Oryza sativa (japonica
  misc_feature (119)..(400): Homolog of NCBI NO: 37531198 NR Description: hypothetical protein [Oryza sativa (japonica group)] >gi|20177643|gb|AAM14698.1| Hypothetical protein [Oryza
  misc_feature (1)..(80): Homolog of NCBI NO: 37531198 NR Description: hypothetical protein [Oryza sativa (japonica group)] >gi|20177643|gb|AAM14698.1| Hypothetical protein [Oryza
MKTCLRFSKFSTKLRDVLLDILLNDASVHSALFRIICTTTQNLENLCSSRFIEPAEIEGWQLAIVSVLDVLNVILSQFSESTHSGLPVFHQAMLSSTTKPISVVAAITSLISYFRNPTIQVCAAQVLSKLFALAESSQLYIISNAGFGLDNKQITDLRNSVTQIVLDLSGQNEHLVVATLKLLTVAARFQPALLVAIFDSDEDSDSSNVKQSRKDASSIPDWACKSRLLHTILQYVERATDFVDRHTDILLGLLDFLKTLWQEAGQYANMLEPFKASKKLWQEFSDIISQASKIKDSTVGSLGKEEISKLLVKYQCQASVLEIMACNMFLYKKLLFAESLKKPCVETKKTASNGVSPPKLTWTADSDPKDIFSKWCDISVLDGIIHTYKAQSVEFHHALHLLLRCLHISEIVAAVLLIVHLIVKLETSGAGALSMVLVEKIKLISETLCAQPAFSELLAQYSKLGYRFTTVSHFAYNLLGSISSGGKELMPMIFSDLYCHLQGKLEGRDIPTGPFKELFQFLVETSFWEKYKQKTNKDVNMALGDCLFDTQQIQTELGIDIWDFSEWKTSKTTAEEMLNYMQRANSMVLLSTSQLSVLHALISVLILYEDNSLEESAAAERKIPSRVTLLSIDKVCRKFCTTVDSLASLWDAPKIVFDILTAQADLLSRLLKSAKKNLSLSVCALVLRNVGPGLKILGSLRHSNAILKKTINLLLEVLLLVVGFGSDNSNSSGMGHMVLAKDFAEISDATIGLLPLLCNFMGNPEYLTLCLTTVDLILRNFLTPETWFPIIQSQLRLQHVILQLQDKKSTTSVSAILKFFLTIAQVHGGAQMLLNSGFFSTLRALLMEFPDGMSTLVSDNEKGSLLEKTEKTQHIWGIGLAVVTAMVHSLGSVSAGADIVESVISYFFLEKGYMISYYLAAPDFPSDDRDKVRLRSQRTWTSLAYLRVTEHTLLLLCALASHWRSWVKIMKDMDSPLREMTIHLLAFISKGAQRLRESQSHISHLLCPPVAKEEFDSCKRPSFINTKHGWFSLAPLVCVGKPKITAVSISTALVVRGDTTEHPGSVPQSQFSDSVAIQIYRVASLLLKFLCLQAEGVVTRAEEVGYVDIAHFPELPEPEILHGLQDQATAIVAELCDNYKSKEIPDEVKKLCLMLIQTTEMSLYLELCVVQVCRIHPVFGRVDNFSKDLKKLVKAAEVHTYLEPSIDSLKKIAAFLYPGSL

SEQ ID NO: 88925 - DNA, 930 bp, Arabidopsis thaliana
  misc_feature (1)..(930): Ceres Seq. ID no. 12713863
  misc_feature: MA Experiment ID: 20000315 Result: Down-regulated in Transcription
  misc_feature: MA Experiment 20000315 PARAMETER Experiment Name: At_14day_Shoots-Roots_Sub_P Parameter: Age (day) Value: 14
  misc_feature: MA Experiment 20000315 PARAMETER Experiment Name: At_14day_Shoots-Roots_Sub_P Parameter: Organism Value: A. thaliana
  misc_feature: MA Experiment 20000315 PARAMETER Experiment Name: At_14day_Shoots-Roots_Sub_P Parameter: Plant Line Value: WS
  misc_feature: MA Experiment 20000315 PARAMETER Experiment Name: At_14day_Shoots-Roots_Sub_P Parameter: Tissue Value: Shoots vs. Whole Plant
atgttttacgatggatacgcttatcatggaactacctttgagcagacttaccggtgttatccctcatcctttattgataagcctcaaattgaaagtggtgacaagattataatgccaccatcagcccttgatcgtctagcttctttgcagattgattatccaatgctctttgaacttcgtaatgcttcaacagatagtttttctcactgcggagtccttgagttcatcgcagaagaaggcgtgatttacattccctactggatgatgcagaatttgctgttgcaagaaggagacatggtgagagttagaaatgtcactcttccaaagggaacctacgtgaaactgcaaccccacacaacagactttctcgatatactaacccgaaacttggagaccgcattgaggaactattcatgtctaacggtcggagatagcattatggtcccatacaacaataagaaatacttcatagacatagtggaggcaaagccttctaatggtattagcatcattgaaactgattgcgaggttgatttcgcacctccccttgattacaaggaacccgaacgacctgtagcacctgctccagccaaagctaaggaggttgatgtggctgaagcagaaccaaagtttaaccctttcacgggttcgggaagacgtttggatggacgacctttatcctatgaaccgcaacctggtgctgctaacagtaacggccaatcacatcctgttgcaagtagtagtagtagtgggtcagagaaggctacgcaacaaaatcgagggaaacttgtgttcggttcaaatgtagagcggtctactaaagagacaacaaaggttggagctgggaaagatagaaagcaagaggaagaggctgagaaggaagccaagttccaagcttttagtggtaaaaaatattcattgaggggttga

SEQ ID NO: 88926 - protein, 309 aa, Arabidopsis thaliana
  peptide (1)..(309): Ceres Seq. ID no. 12713864
  misc_feature (10)..(182): Pfam Name: Ubiquitin fusion degradation protein UFD1 Pfam Description: Ubiquitin fusion degradation protein UFD1
  misc_feature (1)..(309): Homolog of NCBI NO: 18420341 NR Description: putative ubiquitin-dependent proteolytic protein; id: At4g38930.1, supported by cDNA: gi_16930496 [Arabidopsis >gi|16930497|gb|AAL31934.1|AF419602_1 AT4g38930/F19H22_30
  misc_feature (1)..(309): Homolog of NCBI NO: 7488221 NR Description: probable ubiquitin-dependent proteolytic protein -
  misc_feature (1)..(309): Homolog of NCBI NO: 18399646 NR Description: putative ubiquitin fusion-degradation protein;
  misc_feature (1)..(309): Homolog of NCBI NO: 21592947 NR Description: putative ubiquitin fusion-degradation protein
  misc_feature (2)..(309): Homolog of NCBI NO: 25347017 NR Description: probable ubiquitin fusion-degradation protein
  misc_feature (1)..(308): Homolog of NCBI NO: 38345534 NR Description: OSJNBa0020J04.9 [Oryza sativa (japonica
  misc_feature (32)..(309): Homolog of NCBI NO: 7488408 NR Description: probable ubiquitin fusion-degradation protein
  misc_feature (38)..(309): Homolog of NCBI NO: 30684115 NR Description: ubiquitin fusion degradation (UFD) protein,
  misc_feature (13)..(232): Homolog of NCBI NO: 16758158 NR Description: ubiquitin fusion degradation 1-like [Rattus
  misc_feature (13)..(232): Homolog of NCBI NO: 20891983 NR Description: ubiquitin fusion degradation 1 like [Mus >gi|13879310|gb|AAH06630.1| Unknown (protein for MGC:11477) [Mus
MFYDGYAYHGTTFEQTYRCYPSSFIDKPQIESGDKIIMPPSALDRLASLQIDYPMLFELRNASTDSFSHCGVLEFIAEEGVIYIPYWMMQNLLLQEGDMVRVRNVTLPKGTYVKLQPHTTDFLDILTRNLETALRNYSCLTVGDSIMVPYNNKKYFIDIVEAKPSNGISIIETDCEVDFAPPLDYKEPERPVAPAPAKAKEVDVAEAEPKFNPFTGSGRRLDGRPLSYEPQPGAANSNGQSHPVASSSSSGSEKATQQNRGKLVFGSNVERSTKETTKVGAGKDRKQEEEAEKEAKFQAFSGKKYSLRG

SEQ ID NO: 88927 - protein, 272 aa, Arabidopsis thaliana
  peptide (1)..(272): Ceres Seq. ID no. 12713865
  misc_feature (1)..(145): Pfam Name: Ubiquitin fusion degradation protein UFD1 Pfam Description: Ubiquitin fusion degradation protein UFD1
  misc_feature (1)..(272): Homolog of NCBI NO: 18420341 NR Description: putative ubiquitin-dependent proteolytic protein; id: At4g38930.1, supported by cDNA: gi_16930496 [Arabidopsis >gi|16930497|gb|AAL31934.1|AF419602_1 AT4g38930/F19H22_30
  misc_feature (1)..(272): Homolog of NCBI NO: 7488221 NR Description: probable ubiquitin-dependent proteolytic protein -
  misc_feature (1)..(272): Homolog of NCBI NO: 18399646 NR Description: putative ubiquitin fusion-degradation protein;
  misc_feature (1)..(272): Homolog of NCBI NO: 21592947 NR Description: putative ubiquitin fusion-degradation protein
  misc_feature (1)..(272): Homolog of NCBI NO: 25347017 NR Description: probable ubiquitin fusion-degradation protein
  misc_feature (1)..(271): Homolog of NCBI NO: 38345534 NR Description: OSJNBa0020J04.9 [Oryza sativa (japonica
  misc_feature (1)..(272): Homolog of NCBI NO: 7488408 NR Description: probable ubiquitin fusion-degradation protein
  misc_feature (1)..(272): Homolog of NCBI NO: 30684115 NR Description: ubiquitin fusion degradation (UFD) protein,
  misc_feature (1)..(195): Homolog of NCBI NO: 16758158 NR Description: ubiquitin fusion degradation 1-like [Rattus
  misc_feature (1)..(195): Homolog of NCBI NO: 20891983 NR Description: ubiquitin fusion degradation 1 like [Mus >gi|13879310|gb|AAH06630.1| Unknown (protein for MGC:11477) [Mus
MPPSALDRLASLQIDYPMLFELRNASTDSFSHCGVLEFIAEEGVIYIPYWMMQNLLLQEGDMVRVRNVTLPKGTYVKLQPHTTDFLDILTRNLETALRNYSCLTVGDSIMVPYNNKKYFIDIVEAKPSNGISIIETDCEVDFAPPLDYKEPERPVAPAPAKAKEVDVAEAEPKFNPFTGSGRRLDGRPLSYEPQPGAANSNGQSHPVASSSSSGSEKATQQNRGKLVFGSNVERSTKETTKVGAGKDRKQEEEAEKEAKFQAFSGKKYSLRG

SEQ ID NO: 88928 - protein, 255 aa, Arabidopsis thaliana
  peptide (1)..(255): Ceres Seq. ID no. 12713866
  misc_feature (1)..(128): Pfam Name: Ubiquitin fusion degradation protein UFD1 Pfam Description: Ubiquitin fusion degradation protein UFD1
  misc_feature (1)..(255): Homolog of NCBI NO: 18420341 NR Description: putative ubiquitin-dependent proteolytic protein; id: At4g38930.1, supported by cDNA: gi_16930496 [Arabidopsis >gi|16930497|gb|AAL31934.1|AF419602_1 AT4g38930/F19H22_30
  misc_feature (1)..(255): Homolog of NCBI NO: 7488221 NR Description: probable ubiquitin-dependent proteolytic protein -
  misc_feature (1)..(255): Homolog of NCBI NO: 18399646 NR Description: putative ubiquitin fusion-degradation protein;
  misc_feature (1)..(255): Homolog of NCBI NO: 21592947 NR Description: putative ubiquitin fusion-degradation protein
  misc_feature (1)..(255): Homolog of NCBI NO: 25347017 NR Description: probable ubiquitin fusion-degradation protein
  misc_feature (1)..(254): Homolog of NCBI NO: 38345534 NR Description: OSJNBa0020J04.9 [Oryza sativa (japonica
  misc_feature (1)..(255): Homolog of NCBI NO: 7488408 NR Description: probable ubiquitin fusion-degradation protein
  misc_feature (1)..(255): Homolog of NCBI NO: 30684115 NR Description: ubiquitin fusion degradation (UFD) protein,
  misc_feature (1)..(178): Homolog of NCBI NO: 16758158 NR Description: ubiquitin fusion degradation 1-like [Rattus
  misc_feature (1)..(178): Homolog of NCBI NO: 20891983 NR Description: ubiquitin fusion degradation 1 like [Mus >gi|13879310|gb|AAH06630.1| Unknown (protein for MGC:11477) [Mus
MLFELRNASTDSFSHCGVLEFIAEEGVIYIPYWMMQNLLLQEGDMVRVRNVTLPKGTYVKLQPHTTDFLDILTRNLETALRNYSCLTVGDSIMVPYNNKKYFIDIVEAKPSNGISIIETDCEVDFAPPLDYKEPERPVAPAPAKAKEVDVAEAEPKFNPFTGSGRRLDGRPLSYEPQPGAANSNGQSHPVASSSSSGSEKATQQNRGKLVFGSNVERSTKETTKVGAGKDRKQEEEAEKEAKFQAFSGKKYSLRG

SEQ ID NO: 88929 - DNA, 2328 bp, Arabidopsis thaliana
  misc_feature (1)..(2328): Ceres Seq. ID no. 12713915
  misc_feature: MA Experiment ID: 20000314 Result: Up-regulated in Transcription
  misc_feature: MA Experiment 20000314 PARAMETER Experiment Name: At_14day_Shoots-Roots_Sub_P Parameter: Age (day) Value: 14
  misc_feature: MA Experiment 20000314 PARAMETER Experiment Name: At_14day_Shoots-Roots_Sub_P Parameter: Organism Value: A. thaliana
  misc_feature: MA Experiment 20000314 PARAMETER Experiment Name: At_14day_Shoots-Roots_Sub_P Parameter: Plant Line Value: WS
  misc_feature: MA Experiment 20000314 PARAMETER Experiment Name: At_14day_Shoots-Roots_Sub_P Parameter: Tissue Value: Roots vs. Whole Plant
  misc_feature: MA Experiment ID: 20000315 Result: Down-regulated in Transcription
  misc_feature: MA Experiment 20000315 PARAMETER Experiment Name: At_14day_Shoots-Roots_Sub_P Parameter: Age (day) Value: 14
  misc_feature: MA Experiment 20000315 PARAMETER Experiment Name: At_14day_Shoots-Roots_Sub_P Parameter: Organism Value: A. thaliana
  misc_feature: MA Experiment 20000315 PARAMETER Experiment Name: At_14day_Shoots-Roots_Sub_P Parameter: Plant Line Value: WS
  misc_feature: MA Experiment 20000315 PARAMETER Experiment Name: At_14day_Shoots-Roots_Sub_P Parameter: Tissue Value: Shoots vs. Whole Plant
  misc_feature: MA Experiment ID: 20000328 Result: Down-regulated in Transcription
  misc_feature: MA Experiment 20000328 PARAMETER Experiment Name: At_42deg_Heat_Sub_P Parameter: Age (day) Value: 14
  misc_feature: MA Experiment 20000328 PARAMETER Experiment Name: At_42deg_Heat_Sub_P Parameter: Organism Value: A. thaliana
  misc_feature: MA Experiment 20000328 PARAMETER Experiment Name: At_42deg_Heat_Sub_P Parameter: Plant Line Value: WS
  misc_feature: MA Experiment 20000328 PARAMETER Experiment Name: At_42deg_Heat_Sub_P Parameter: Temperature (deg C) Value: 42 vs. 22
  misc_feature: MA Experiment 20000328 PARAMETER Experiment Name: At_42deg_Heat_Sub_P Parameter: Timepoint (hr) Value: 6
  misc_feature: MA Experiment 20000328 PARAMETER Experiment Name: At_42deg_Heat_Sub_P Parameter: Tissue Value: Aerial
  misc_feature: MA Experiment ID: 20000347 Result: Up-regulated in Transcription
  misc_feature: MA Experiment 20000347 PARAMETER Experiment Name: At_2mM_SA_Sub_P Parameter: Age (day) Value: 14
  misc_feature: MA Experiment 20000347 PARAMETER Experiment Name: At_2mM_SA_Sub_P Parameter: Organism Value: A. thaliana
  misc_feature: MA Experiment 20000347 PARAMETER Experiment Name: At_2mM_SA_Sub_P Parameter: Plant Line Value: WS
  misc_feature: MA Experiment 20000347 PARAMETER Experiment Name: At_2mM_SA_Sub_P Parameter: Timepoint (hr) Value: 6
  misc_feature: MA Experiment 20000347 PARAMETER Experiment Name: At_2mM_SA_Sub_P Parameter: Tissue Value: Aerial
  misc_feature: MA Experiment 20000347 PARAMETER Experiment Name: At_2mM_SA_Sub_P Parameter: Treatment Value: 2mM SA vs. No Treatment
  misc_feature: MA Experiment ID: 20000355 Result: Down-regulated in Transcription
  misc_feature: MA Experiment 20000355 PARAMETER Experiment Name: At_Siliques_Sub_P Parameter: Age (day) Value: 21
  misc_feature: MA Experiment 20000355 PARAMETER Experiment Name: At_Siliques_Sub_P Parameter: Organism Value: A. thaliana
  misc_feature: MA Experiment 20000355 PARAMETER Experiment Name: At_Siliques_Sub_P Parameter: Plant Line Value: WS
  misc_feature: MA Experiment 20000355 PARAMETER Experiment Name: At_Siliques_Sub_P Parameter: Tissue Value: Less Than 5mm Siliques vs. Whole Plant
  misc_feature: MA Experiment ID: 20000440 Result: Down-regulated in Transcription
  misc_feature: MA Experiment 20000440 PARAMETER Experiment Name: At_Closed-Flower__Sub_P Parameter: Tissue Value: Closed Flower vs. Whole Plant
atggtggttctgaggaagacatccttgttggtcttcttcttattcctcctcttgttgttagagtcaacgtttgagcaacagacaagttctctgaatgagaaatcggcgcttctgctgttaaggtcttctcttgggttacgaagcagagattggcctgtaaaaggcaatccttgtctgaactggaacggcatcaaatgtgatcagaatggtagagtaactaagatcaacatttcagggttcagaaggacaaggattgggaatcaaaacccggaattctcagttggttctctcgtcaatctcacccgtctagcttccttcaacgcctcaaggttctatcttccaggtccaatcccggctttgtttggatcgagtctgttgactttagaggtgttggaccttagctcctgttcaatcacaggaaccatccctgaaagtttgactcggttatcacatctcaaagttcttgatctttcaaagaatgcgatcaatggggatattcctctgtctcttacctctcttcagaatctatcaatccttgatctttcctcaaactcggtgtttggttcgattcctgctaatattggggcactctcaaagctccagcgtctgaatctttcgcgtaacaccttgacttcttcaatacctccatcactcggagacctctctgttttaattgaccttgatctcagcttcaacggaatgtcaggttcggttccatcagatttgaaagggctaaggaacttgcagacattggtaattgcgggaaatcgcctttcaggatccctacctcctgatctgtttagtttgctgagtaaacttcagatcattgacttcagaggcagtggtttcataggcgctttaccgtccaggttatggtcgttaccggagctcaagtttctagatatttctggaaatcacttctctgacatgctgcctaataccactgtcagttttgattctactgtctccatgcttaacatatccgggaacatgttttacgttggagggtctatattgcttatgctcattctcatagtgttaccaataacagtgagtttctgtgtccgtcgaagaaacagatcatcaacaagtaatcatcctagaggaagacacaacggtgttggcccattacctcctgatgaaacacttccctcaagaggaggagtctctataaactttgggagtcttggatcatcatttacctatcagcagttgctcaatgccaccaaggagttcagtgattcaaacctgatcaagaaaggacaatctggggatcttttcaagggagttctagaaaacggagttcagatcgttgtgaaaagaatcagcttggaatctacaaagaacaacgaagcttatctaaccgagttggatttcttcagccggtttgcgcatccgagaataatcccattcgtagggaagagcttagagagcgcaactcataagttcttggtatacaagtacatgctgaatagggatttaccaagctcattgttctataaatccaattccctagttgacaacggattgagatctctcgattggatcaccagactgaaaatagcattgggagtagcagagggacttgcttacctgcaccatgattgctcaccatccgtcgtccacagggatattcaagcaagtagcattctcttggatgataagtttgaagttaggcttggaagctttagcaaagcttgtcatcaagaaaacaatggccgtccacggaaaatagcccgattgctcagactatcccagtcttctcaagaaagtgttcctgggtctgcagctacagcaacatgtgcctacgatgtgtactgcttcggcaagatacttctggagcttatcacagggaaactcggaatcagctcatgtaaagaaacccaattcaaaaaaatcctaaccgagatcatgccttacatttcatcgcaagagaaagaacccgtaatgaacattctagaccaatctcttctggtcgacgaagacctcttagaagaagtctgggcaatggcaatcgtcgctagatcttgtcttaacccaaaaccaacgagacggccgcttatgagacacatagtacaagccttggagaatccactgagagttgtgagagaagacagcagcgaatctgagagattccgtacgactggatcttcgagaggatcttcgagtagcggtcgaatatttggtagttggagacagagcgtgtctgatcctgtcgcagcgggaacaagtagccttctgtctcaggcggagggtttagcgactggatcgtcagcgagaggaagtagccgtggcgcgtcgagtcgacggagtatgaaagatgtatag

SEQ ID NO: 88930 - protein, 775 aa, Arabidopsis thaliana
  peptide (1)..(775): Ceres Seq. ID no. 12713916
  misc_feature (93)..(775): Homolog of NCBI NO: 15235005 NR Description: leucine-rich repeat transmembrane protein kinase, protein id: At4g39270.1, supported by cDNA: gi_20466769
  misc_feature (93)..(775): Homolog of NCBI NO: 20466770 NR Description: receptor protein kinase-like protein [Arabidopsis
  misc_feature (1)..(342): Homolog of NCBI NO: 15235005 NR Description: leucine-rich repeat transmembrane protein kinase, protein id: At4g39270.1, supported by cDNA: gi_20466769
  misc_feature (1)..(342): Homolog of NCBI NO: 20466770 NR Description: receptor protein kinase-like protein [Arabidopsis
  misc_feature (94)..(771): Homolog of NCBI NO: 15226721 NR Description: leucine-rich repeat transmembrane protein kinase, protein id: At2g16250.1 [Arabidopsis thaliana]
  misc_feature (4)..(775): Homolog of NCBI NO: 34394416 NR Description: putative Systemin receptor SR160 precursor [Oryza
  misc_feature (125)..(721): Homolog of NCBI NO: 34915200 NR Description: putative receptor-like protein kinase [Oryza
  misc_feature (17)..(330): Homolog of NCBI NO: 34393421 NR Description: putative OsLRK1(receptor-type protein kinase)
  misc_feature (400)..(695): Homolog of NCBI NO: 34393421 NR Description: putative OsLRK1(receptor-type protein kinase)
  misc_feature (9)..(333): Homolog of NCBI NO: 15229189 NR Description: leucine-rich repeat transmembrane protein kinase, protein id: At3g49670.1 [Arabidopsis thaliana]
MVVLRKTSLLVFFLFLLLLLESTFEQQTSSLNEKSALLLLRSSLGLRSRDWPVKGNPCLNWNGIKCDQNGRVTKINISGFRRTRIGNQNPEFSVGSLVNLTRLASFNASRFYLPGPIPALFGSSLLTLEVLDLSSCSITGTIPESLTRLSHLKVLDLSKNAINGDIPLSLTSLQNLSILDLSSNSVFGSIPANIGALSKLQRLNLSRNTLTSSIPPSLGDLSVLIDLDLSFNGMSGSVPSDLKGLRNLQTLVIAGNRLSGSLPPDLFSLLSKLQIIDFRGSGFIGALPSRLWSLPELKFLDISGNHFSDMLPNTTVSFDSTVSMLNISGNMFYVGGSILLMLILIVLPITVSFCVRRRNRSSTSNHPRGRHNGVGPLPPDETLPSRGGVSINFGSLGSSFTYQQLLNATKEFSDSNLIKKGQSGDLFKGVLENGVQIVVKRISLESTKNNEAYLTELDFFSRFAHPRIIPFVGKSLESATHKFLVYKYMLNRDLPSSLFYKSNSLVDNGLRSLDWITRLKIALGVAEGLAYLHHDCSPSVVHRDIQASSILLDDKFEVRLGSFSKACHQENNGRPRKIARLLRLSQSSQESVPGSAATATCAYDVYCFGKILLELITGKLGISSCKETQFKKILTEIMPYISSQEKEPVMNILDQSLLVDEDLLEEVWAMAIVARSCLNPKPTRRPLMRHIVQALENPLRVVREDSSESERFRTTGSSRGSSSSGRIFGSWRQSVSDPVAAGTSSLLSQAEGLATGSSARGSSRGASSRRSMKDV

SEQ ID NO: 88931 - protein, 542 aa, Arabidopsis thaliana
  peptide (1)..(542): Ceres Seq. ID no. 12713917
  misc_feature (1)..(542): Homolog of NCBI NO: 15235005 NR Description: leucine-rich repeat transmembrane protein kinase, protein id: At4g39270.1, supported by cDNA: gi_20466769
  misc_feature (1)..(542): Homolog of NCBI NO: 20466770 NR Description: receptor protein kinase-like protein [Arabidopsis
  misc_feature (1)..(109): Homolog of NCBI NO: 15235005 NR Description: leucine-rich repeat transmembrane protein kinase, protein id: At4g39270.1, supported by cDNA: gi_20466769
  misc_feature (1)..(109): Homolog of NCBI NO: 20466770 NR Description: receptor protein kinase-like protein [Arabidopsis
  misc_feature (1)..(538): Homolog of NCBI NO: 15226721 NR Description: leucine-rich repeat transmembrane protein kinase, protein id: At2g16250.1 [Arabidopsis thaliana]
  misc_feature (1)..(542): Homolog of NCBI NO: 34394416 NR Description: putative Systemin receptor SR160 precursor [Oryza
  misc_feature (1)..(488): Homolog of NCBI NO: 34915200 NR Description: putative receptor-like protein kinase [Oryza
  misc_feature (1)..(97): Homolog of NCBI NO: 34393421 NR Description: putative OsLRK1(receptor-type protein kinase)
  misc_feature (167)..(462): Homolog of NCBI NO: 34393421 NR Description: putative OsLRK1(receptor-type protein kinase)
  misc_feature (1)..(100): Homolog of NCBI NO: 15229189 NR Description: leucine-rich repeat transmembrane protein kinase, protein id: At3g49670.1 [Arabidopsis thaliana]
MSGSVPSDLKGLRNLQTLVIAGNRLSGSLPPDLFSLLSKLQIIDFRGSGFIGALPSRLWSLPELKFLDISGNHFSDMLPNTTVSFDSTVSMLNISGNMFYVGGSILLMLILIVLPITVSFCVRRRNRSSTSNHPRGRHNGVGPLPPDETLPSRGGVSINFGSLGSSFTYQQLLNATKEFSDSNLIKKGQSGDLFKGVLENGVQIVVKRISLESTKNNEAYLTELDFFSRFAHPRIIPFVGKSLESATHKFLVYKYMLNRDLPSSLFYKSNSLVDNGLRSLDWITRLKIALGVAEGLAYLHHDCSPSVVHRDIQASSILLDDKFEVRLGSFSKACHQENNGRPRKIARLLRLSQSSQESVPGSAATATCAYDVYCFGKILLELITGKLGISSCKETQFKKILTEIMPYISSQEKEPVMNILDQSLLVDEDLLEEVWAMAIVARSCLNPKPTRRPLMRHIVQALENPLRVVREDSSESERFRTTGSSRGSSSSGRIFGSWRQSVSDPVAAGTSSLLSQAEGLATGSSARGSSRGASSRRSMKDV

SEQ ID NO: 88932 - protein, 466 aa, Arabidopsis thaliana
  peptide (1)..(466): Ceres Seq. ID no. 12713918
  misc_feature (1)..(466): Homolog of NCBI NO: 15235005 NR Description: leucine-rich repeat transmembrane protein kinase, protein id: At4g39270.1, supported by cDNA: gi_20466769
  misc_feature (1)..(466): Homolog of NCBI NO: 20466770 NR Description: receptor protein kinase-like protein [Arabidopsis
  misc_feature (1)..(33): Homolog of NCBI NO: 15235005 NR Description: leucine-rich repeat transmembrane protein kinase, protein id: At4g39270.1, supported by cDNA: gi_20466769
  misc_feature (1)..(33): Homolog of NCBI NO: 20466770 NR Description: receptor protein kinase-like protein [Arabidopsis
  misc_feature (1)..(462): Homolog of NCBI NO: 15226721 NR Description: leucine-rich repeat transmembrane protein kinase, protein id: At2g16250.1 [Arabidopsis thaliana]
  misc_feature (1)..(466): Homolog of NCBI NO: 34394416 NR Description: putative Systemin receptor SR160 precursor [Oryza
  misc_feature (1)..(412): Homolog of NCBI NO: 34915200 NR Description: putative receptor-like protein kinase [Oryza
  misc_feature (1)..(21): Homolog of NCBI NO: 34393421 NR Description: putative OsLRK1(receptor-type protein kinase)
  misc_feature (91)..(386): Homolog of NCBI NO: 34393421 NR Description: putative OsLRK1(receptor-type protein kinase)
  misc_feature (1)..(24): Homolog of NCBI NO: 15229189 NR Description: leucine-rich repeat transmembrane protein kinase, protein id: At3g49670.1 [Arabidopsis thaliana]
MLPNTTVSFDSTVSMLNISGNMFYVGGSILLMLILIVLPITVSFCVRRRNRSSTSNHPRGRHNGVGPLPPDETLPSRGGVSINFGSLGSSFTYQQLLNATKEFSDSNLIKKGQSGDLFKGVLENGVQIVVKRISLESTKNNEAYLTELDFFSRFAHPRIIPFVGKSLESATHKFLVYKYMLNRDLPSSLFYKSNSLVDNGLRSLDWITRLKIALGVAEGLAYLHHDCSPSVVHRDIQASSILLDDKFEVRLGSFSKACHQENNGRPRKIARLLRLSQSSQESVPGSAATATCAYDVYCFGKILLELITGKLGISSCKETQFKKILTEIMPYISSQEKEPVMNILDQSLLVDEDLLEEVWAMAIVARSCLNPKPTRRPLMRHIVQALENPLRVVREDSSESERFRTTGSSRGSSSSGRIFGSWRQSVSDPVAAGTSSLLSQAEGLATGSSARGSSRGASSRRSMKDV

SEQ ID NO: 88933 - DNA, 1724 bp, Arabidopsis thaliana
  misc_feature (1)..(1724): Ceres Seq. ID no. 12713945
  misc_feature: MA Experiment ID: 108461 Result: Up-regulated in Transcription
  misc_feature: MA Experiment 108461 PARAMETER Experiment Name: At_Germinating_Seeds_cDNA_P Parameter: Age (day) Value: 1 vs. 0
  misc_feature: MA Experiment 108461 PARAMETER Experiment Name: At_Germinating_Seeds_cDNA_P Parameter: Tissue Value: Germinating Seeds
  misc_feature: MA Experiment ID: 108462 Result: Up-regulated in Transcription
  misc_feature: MA Experiment 108462 PARAMETER Experiment Name: At_Germinating_Seeds_cDNA_P Parameter: Age (day) Value: 2 vs. 0
  misc_feature: MA Experiment 108462 PARAMETER Experiment Name: At_Germinating_Seeds_cDNA_P Parameter: Tissue Value: Germinating Seeds
  misc_feature: MA Experiment ID: 108463 Result: Up-regulated in Transcription
  misc_feature: MA Experiment 108463 PARAMETER Experiment Name: At_Germinating_Seeds_cDNA_P Parameter: Age (day) Value: 3 vs. 0
  misc_feature: MA Experiment 108463 PARAMETER Experiment Name: At_Germinating_Seeds_cDNA_P Parameter: Tissue Value: Germinating Seeds
  misc_feature: MA Experiment ID: 108464 Result: Up-regulated in Transcription
  misc_feature: MA Experiment 108464 PARAMETER Experiment Name: At_Germinating_Seeds_cDNA_P Parameter: Age (day) Value: 4 vs. 0
  misc_feature: MA Experiment 108464 PARAMETER Experiment Name: At_Germinating_Seeds_cDNA_P Parameter: Tissue Value: Germinating Seeds
  misc_feature: MA Experiment ID: 108474 Result: Down-regulated in Transcription
  misc_feature: MA Experiment 108474 PARAMETER Experiment Name: At_Drought_Flowers_cDNA_P Parameter: Timepoint (hr) Value: null
  misc_feature: MA Experiment 108474 PARAMETER Experiment Name: At_Drought_Flowers_cDNA_P Parameter: Treatment Value: Drought vs. No Drought
  misc_feature: MA Experiment ID: 108501 Result: Up-regulated in Transcription
  misc_feature: MA Experiment 108501 PARAMETER Experiment Name: At_ap2_floral_buds_cDNA_P Parameter: Plant Line Value: ap2 (Ler.)
  misc_feature: MA Experiment 108501 PARAMETER Experiment Name: At_ap2_floral_buds_cDNA_P Parameter: Tissue Value: Closed Flower
  misc_feature: MA Experiment ID: 108595 Result: Up-regulated in Transcription
  misc_feature: MA Experiment 108595 PARAMETER Experiment Name: At_Ler-pi_Ovule_cDNA_P Parameter: Plant Line Value: null
  misc_feature: MA Experiment ID: 20000184 Result: Down-regulated in Transcription
  misc_feature: MA Experiment 20000184 PARAMETER Experiment Name: At_Shoots__P Parameter: Age (day) Value: 7
  misc_feature: MA Experiment 20000184 PARAMETER Experiment Name: At_Shoots__P Parameter: Tissue Value: Shoots vs. Whole Plant
  misc_feature: MA Experiment ID: 20000234 Result: Up-regulated in Transcription
  misc_feature: MA Experiment 20000234 PARAMETER Experiment Name: At_Siliques_P Parameter: Age (day) Value: 21
  misc_feature: MA Experiment 20000234 PARAMETER Experiment Name: At_Siliques_P Parameter: Organism Value: A. thaliana
  misc_feature: MA Experiment 20000234 PARAMETER Experiment Name: At_Siliques_P Parameter: Plant Line Value: WS
  misc_feature: MA Experiment 20000234 PARAMETER Experiment Name: At_Siliques_P Parameter: Tissue Value: Less Than 5mm Siliques vs. Whole Plant
  misc_feature: MA Experiment ID: 20000264 Result: Up-regulated in Transcription
  misc_feature: MA Experiment 20000264 PARAMETER Experiment Name: At_Open_Flower_P Parameter: Age (day) Value: 21
  misc_feature: MA Experiment 20000264 PARAMETER Experiment Name: At_Open_Flower_P Parameter: Plant Line Value: WS
  misc_feature: MA Experiment 20000264 PARAMETER Experiment Name: At_Open_Flower_P Parameter: Tissue Value: Open Flower vs. Whole Plant
  misc_feature: MA Experiment ID: 20000265 Result: Up-regulated in Transcription
  misc_feature: MA Experiment 20000265 PARAMETER Experiment Name: At_Open_Flower_P Parameter: Age (day) Value: 21
  misc_feature: MA Experiment 20000265 PARAMETER Experiment Name: At_Open_Flower_P Parameter: Plant Line Value: WS
  misc_feature: MA Experiment 20000265 PARAMETER Experiment Name: At_Open_Flower_P Parameter: Tissue Value: Closed Flower vs. Whole Plant
  misc_feature: MA Experiment ID: 20000286 Result: Up-regulated in Transcription
  misc_feature: MA Experiment 20000286 PARAMETER Experiment Name: At_Open_Flower_P Parameter: Age (day) Value: 21
  misc_feature: MA Experiment 20000286 PARAMETER Experiment Name: At_Open_Flower_P Parameter: Plant Line Value: WS
  misc_feature: MA Experiment 20000286 PARAMETER Experiment Name: At_Open_Flower_P Parameter: Tissue Value: Half Open vs. Whole Plant
  misc_feature: MA Experiment ID: 20000438 Result: Down-regulated in Transcription
  misc_feature: MA Experiment 20000438 PARAMETER Experiment Name: At_Shoots__P Parameter: Age (day) Value: 14
  misc_feature: MA Experiment 20000438 PARAMETER Experiment Name: At_Shoots__P Parameter: Tissue Value: Shoots vs. Whole Plant
  misc_feature: MA Experiment ID: 20000709 Result: Down-regulated in Transcription
  misc_feature: MA Experiment 20000709 PARAMETER Experiment Name: At_15mM_NH4NO3_L-to-H_P Parameter: Age (hr) Value: 14
  misc_feature: MA Experiment 20000709 PARAMETER Experiment Name: At_15mM_NH4NO3_L-to-H_P Parameter: Organism Value: A. thaliana
  misc_feature: MA Experiment 20000709 PARAMETER Experiment Name: At_15mM_NH4NO3_L-to-H_P Parameter: Plant Line Value: WS
  misc_feature: MA Experiment 20000709 PARAMETER Experiment Name: At_15mM_NH4NO3_L-to-H_P Parameter: Timepoint (hr) Value: 4
  misc_feature: MA Experiment 20000709 PARAMETER Experiment Name: At_15mM_NH4NO3_L-to-H_P Parameter: Tissue Value: Aerial
  misc_feature: MA Experiment 20000709 PARAMETER Experiment Name: At_15mM_NH4NO3_L-to-H_P Parameter: Treatment Value: 15mM NH4NO3 vs. 30mM Mannitol
  misc_feature: MA Experiment ID: 20000794 Result: Up-regulated in Transcription
  misc_feature: MA Experiment 20000794 PARAMETER Experiment Name: At_Petals_P Parameter: Age (day) Value: 23-25 days
  misc_feature: MA Experiment 20000794 PARAMETER Experiment Name: At_Petals_P Parameter: Plant Line Value: WS
  misc_feature: MA Experiment 20000794 PARAMETER Experiment Name: At_Petals_P Parameter: Tissue Value: Petals vs. Whole plant
  misc_feature: MA Experiment ID: 20001768 Result: Up-regulated in Transcription
  misc_feature: MA Experiment 20001768 PARAMETER Experiment Name: At_Far-red-enriched-adult_P Parameter: Age (day) Value: 28
  misc_feature: MA Experiment 20001768 PARAMETER Experiment Name: At_Far-red-enriched-adult_P Parameter: Light Value: Far-red enriched vs. White
  misc_feature: MA Experiment 20001768 PARAMETER Experiment Name: At_Far-red-enriched-adult_P Parameter: Organism Value: A. thaliana
  misc_feature: MA Experiment 20001768 PARAMETER Experiment Name: At_Far-red-enriched-adult_P Parameter: Plant Line Value: Columbia
  misc_feature: MA Experiment 20001768 PARAMETER Experiment Name: At_Far-red-enriched-adult_P Parameter: Timepoint (hr) Value: 1
  misc_feature: MA Experiment 20001768 PARAMETER Experiment Name: At_Far-red-enriched-adult_P Parameter: Tissue Value: Aerial
  misc_feature: MA Experiment ID: 20001771 Result: Up-regulated in Transcription
  misc_feature: MA Experiment 20001771 PARAMETER Experiment Name: At_Far-red-enriched-adult_P Parameter: Age (day) Value: 28
  misc_feature: MA Experiment 20001771 PARAMETER Experiment Name: At_Far-red-enriched-adult_P Parameter: Light Value: Far-red enriched vs. White
  misc_feature: MA Experiment 20001771 PARAMETER Experiment Name: At_Far-red-enriched-adult_P Parameter: Organism Value: A. thaliana
  misc_feature: MA Experiment 20001771 PARAMETER Experiment Name: At_Far-red-enriched-adult_P Parameter: Plant Line Value: Columbia
  misc_feature: MA Experiment 20001771 PARAMETER Experiment Name: At_Far-red-enriched-adult_P Parameter: Timepoint (hr) Value: 16
  misc_feature: MA Experiment 20001771 PARAMETER Experiment Name: At_Far-red-enriched-adult_P Parameter: Tissue Value: Aerial
  misc_feature: MA Experiment ID: 20001773 Result: Up-regulated in Transcription
  misc_feature: MA Experiment 20001773 PARAMETER Experiment Name: At_Far-red-enriched-adult_P Parameter: Age (day) Value: 30
  misc_feature: MA Experiment 20001773 PARAMETER Experiment Name: At_Far-red-enriched-adult_P Parameter: Light Value: Far-red enriched vs. White
  misc_feature: MA Experiment 20001773 PARAMETER Experiment Name: At_Far-red-enriched-adult_P Parameter: Organism Value: A. thaliana
  misc_feature: MA Experiment 20001773 PARAMETER Experiment Name: At_Far-red-enriched-adult_P Parameter: Plant Line Value: Columbia
  misc_feature: MA Experiment 20001773 PARAMETER Experiment Name: At_Far-red-enriched-adult_P Parameter: Timepoint (hr) Value: 48
  misc_feature: MA Experiment 20001773 PARAMETER Experiment Name: At_Far-red-enriched-adult_P Parameter: Tissue Value: Aerial
atggctttggtcagcttacttgaaatctccattgctttcttttgtttccttatctttcgaattttcctgatcagcaagaaaccacaccgttcatttctcacaaactggccgctcctgggcatgcttccgggtttacttaccgtgctccctcgagtttacgactttataaccgaggttcttgaggacggcaacttaaactatcttttcataggcccttttttagggggcatcgacatgttgttcaccgttgatcctgctaatatccatcacatcatgagctcaaactttgcgaattacccgaaaggaaccgaattcaagaagttatttgacgttttgggagatgggattttcaacgcggattcagatttgtggaaggatctaaggaaatcttctcaaagcatgatgaatcatcccgattttcaaaggttttcattagctacaagcttgagtaagctagagaaagggcttgtgccacttcttgatcatgttgctaaagagaaactcgtcgtggacttacaagatgttttccaaagattcacgtttgacactacctttgttttagcaaccgggtatgatccaggttgtctctcggtggaaatgccggaaatcgagtttgcaagagccttagacgatgcagaggaagctattttctacagacatttcaagccggaggtggtgtggaagatgcaaagattgattggggttggagctgagttgaagctgaaaagagctcacgcgattttcgatcgtgtttgctctaagtgcatagcttctaagagagatgagatcagccaagggattgattcttcttcttctaaagatttgttgatgtcttctataaatgttgacacgactaagtacaagttgttgaatccaagtgatgacagattccttagagacacaatcttgtccttcatgttagctggtagagacacaacaggctcagcgctcacttggttcttctggcttctatgcaataaccaagaagccatgaccaagattcgtcaagaaatcaacacaaatctatttccaagaaacaagaccgacgacggttctgtttcttatgattctgattcattcaatccccaagaggtaaagaagttggtgtatttacacggcgcggtttgtgaagccctcaggctctatccacctgttccctttaaccacaagtctcctgctaaacccgacgtgcttccaagcggccacaaagtcaaggccaattcgaggattttgttctgtctttactcattagggagaatgaaatcggtttggggagaagatgcaatggaatttaaaccggagagatggatttctgagagtggaagatcggtacatgagccatcttataagttcctatcgtttaacgccggtccaagaacttgtttggggaaagaagtggctatgacgcaaatgaagacagtggctgtgaaaatcatacaaaattatgacattaatgtcgttgaagggcacaagatcaagccagctccttcggttattctccacatgaagcatggtcttaaagtcactgtctctaaaagatgtttgtcttgaatgttttaactagaatgtagaaactgtggcagttgacgaagatgatttctatgatatgaagacatctcaaatcatgcatcctgaaatataatgttattgttaaacataatttctaaaatttaagtaaaatatataaatgttggtaagaaaattaataatttcctttttatttt

SEQ ID NO: 88934 - protein, 516 aa, Arabidopsis thaliana
  peptide (1)..(516): Ceres Seq. ID no. 12713946
  misc_feature (1)..(516): Homolog of NCBI NO: 7430717 NR Description: cytochrome P450 homolog F23K16.110 - Arabidopsis
  misc_feature (1)..(515): Homolog of NCBI NO: 30692374 NR Description: cytochrome P450 family [Arabidopsis thaliana]
  misc_feature (1)..(513): Homolog of NCBI NO: 15227788 NR Description: cytochrome P450, putative; protein id: supported by cDNA: gi_13877660 [Arabidopsis thaliana]
  misc_feature (45)..(515): Homolog of NCBI NO: 30692374 NR Description: cytochrome P450 family [Arabidopsis thaliana]
  misc_feature (1)..(514): Homolog of NCBI NO: 15236695 NR Description: cytochrome P450, putative; protein id: [Arabidopsis thaliana] >gi|7430714|pir||T04628 cytochrome P450
  misc_feature (1)..(512): Homolog of NCBI NO: 15218645 NR Description: cytochrome P450, putative; protein id: At1g65340.1
  misc_feature (1)..(514): Homolog of NCBI NO: 15235108 NR Description: cytochrome p450 family; protein id: At4g39510.1, by cDNA: 120342., supported by cDNA: gi_16604437 [Arabidopsis
  misc_feature (3)..(512): Homolog of NCBI NO: 15242968 NR Description: cytochrome P450, putative; protein id: [Arabidopsis thaliana] >gi|10177398|dbj|BAB10529.1| cytochrome
  misc_feature (3)..(512): Homolog of NCBI NO: 26451485 NR Description: putative cytochrome P450 [Arabidopsis thaliana]
  misc_feature (1)..(516): Homolog of NCBI NO: 15220272 NR Description: cytochrome P450, putative; protein id: [Arabidopsis thaliana] >gi|25282626|pir||B96517 hypothetical
MALVSLLEISIAFFCFLIFRIFLISKKPHRSFLTNWPLLGMLPGLLTVLPRVYDFITEVLEDGNLNYLFIGPFLGGIDMLFTVDPANIHHIMSSNFANYPKGTEFKKLFDVLGDGIFNADSDLWKDLRKSSQSMMNHPDFQRFSLATSLSKLEKGLVPLLDHVAKEKLVVDLQDVFQRFTFDTTFVLATGYDPGCLSVEMPEIEFARALDDAEEAIFYRHFKPEVVWKMQRLIGVGAELKLKRAHAIFDRVCSKCIASKRDEISQGIDSSSSKDLLMSSINVDTTKYKLLNPSDDRFLRDTILSFMLAGRDTTGSALTWFFWLLCNNQEAMTKIRQEINTNLFPRNKTDDGSVSYDSDSFNPQEVKKLVYLHGAVCEALRLYPPVPFNHKSPAKPDVLPSGHKVKANSRILFCLYSLGRMKSVWGEDAMEFKPERWISESGRSVHEPSYKFLSFNAGPRTCLGKEVAMTQMKTVAVKIIQNYDINVVEGHKIKPAPSVILHMKHGLKVTVSKRCLS

SEQ ID NO: 88935 - protein, 476 aa, Arabidopsis thaliana
  peptide (1)..(476): Ceres Seq. ID no. 12713947
  misc_feature (1)..(476): Homolog of NCBI NO: 7430717 NR Description: cytochrome P450 homolog F23K16.110 - Arabidopsis
  misc_feature (1)..(475): Homolog of NCBI NO: 30692374 NR Description: cytochrome P450 family [Arabidopsis thaliana]
  misc_feature (1)..(473): Homolog of NCBI NO: 15227788 NR Description: cytochrome P450, putative; protein id: supported by cDNA: gi_13877660 [Arabidopsis thaliana]
  misc_feature (5)..(475): Homolog of NCBI NO: 30692374 NR Description: cytochrome P450 family [Arabidopsis thaliana]
  misc_feature (1)..(474): Homolog of NCBI NO: 15236695 NR Description: cytochrome P450, putative; protein id: [Arabidopsis thaliana] >gi|7430714|pir||T04628 cytochrome P450
  misc_feature (1)..(472): Homolog of NCBI NO: 15218645 NR Description: cytochrome P450, putative; protein id: At1g65340.1
  misc_feature (1)..(474): Homolog of NCBI NO: 15235108 NR Description: cytochrome p450 family; protein id: At4g39510.1, by cDNA: 120342., supported by cDNA: gi_16604437 [Arabidopsis
  misc_feature (1)..(472): Homolog of NCBI NO: 15242968 NR Description: cytochrome P450, putative; protein id: [Arabidopsis thaliana] >gi|10177398|dbj|BAB10529.1| cytochrome
  misc_feature (1)..(472): Homolog of NCBI NO: 26451485 NR Description: putative cytochrome P450 [Arabidopsis thaliana]
  misc_feature (1)..(476): Homolog of NCBI NO: 15220272 NR Description: cytochrome P450, putative; protein id: [Arabidopsis thaliana] >gi|25282626|pir||B96517 hypothetical
MLPGLLTVLPRVYDFITEVLEDGNLNYLFIGPFLGGIDMLFTVDPANIHHIMSSNFANYPKGTEFKKLFDVLGDGIFNADSDLWKDLRKSSQSMMNHPDFQRFSLATSLSKLEKGLVPLLDHVAKEKLVVDLQDVFQRFTFDTTFVLATGYDPGCLSVEMPEIEFARALDDAEEAIFYRHFKPEVVWKMQRLIGVGAELKLKRAHAIFDRVCSKCIASKRDEISQGIDSSSSKDLLMSSINVDTTKYKLLNPSDDRFLRDTILSFMLAGRDTTGSALTWFFWLLCNNQEAMTKIRQEINTNLFPRNKTDDGSVSYDSDSFNPQEVKKLVYLHGAVCEALRLYPPVPFNHKSPAKPDVLPSGHKVKANSRILFCLYSLGRMKSVWGEDAMEFKPERWISESGRSVHEPSYKFLSFNAGPRTCLGKEVAMTQMKTVAVKIIQNYDINVVEGHKIKPAPSVILHMKHGLKVTVSKRCLS

SEQ ID NO: 88936 - protein, 438 aa, Arabidopsis thaliana
  peptide (1)..(438): Ceres Seq. ID no. 12713948
  misc_feature (1)..(438): Homolog of NCBI NO: 7430717 NR Description: cytochrome P450 homolog F23K16.110 - Arabidopsis
  misc_feature (1)..(437): Homolog of NCBI NO: 30692374 NR Description: cytochrome P450 family [Arabidopsis thaliana]
  misc_feature (1)..(435): Homolog of NCBI NO: 15227788 NR Description: cytochrome P450, putative; protein id: supported by cDNA: gi_13877660 [Arabidopsis thaliana]
  misc_feature (1)..(437): Homolog of NCBI NO: 30692374 NR Description: cytochrome P450 family [Arabidopsis thaliana]
  misc_feature (1)..(436): Homolog of NCBI NO: 15236695 NR Description: cytochrome P450, putative; protein id: [Arabidopsis thaliana] >gi|7430714|pir||T04628 cytochrome P450
  misc_feature (1)..(434): Homolog of NCBI NO: 15218645 NR Description: cytochrome P450, putative; protein id: At1g65340.1
  misc_feature (1)..(436): Homolog of NCBI NO: 15235108 NR Description: cytochrome p450 family; protein id: At4g39510.1, by cDNA: 120342., supported by cDNA: gi_16604437 [Arabidopsis
  misc_feature (1)..(434): Homolog of NCBI NO: 15242968 NR Description: cytochrome P450, putative; protein id: [Arabidopsis thaliana] >gi|10177398|dbj|BAB10529.1| cytochrome
  misc_feature (1)..(434): Homolog of NCBI NO: 26451485 NR Description: putative cytochrome P450 [Arabidopsis thaliana]
  misc_feature (1)..(438): Homolog of NCBI NO: 15220272 NR Description: cytochrome P450, putative; protein id: [Arabidopsis thaliana] >gi|25282626|pir||B96517 hypothetical
MLFTVDPANIHHIMSSNFANYPKGTEFKKLFDVLGDGIFNADSDLWKDLRKSSQSMMNHPDFQRFSLATSLSKLEKGLVPLLDHVAKEKLVVDLQDVFQRFTFDTTFVLATGYDPGCLSVEMPEIEFARALDDAEEAIFYRHFKPEVVWKMQRLIGVGAELKLKRAHAIFDRVCSKCIASKRDEISQGIDSSSSKDLLMSSINVDTTKYKLLNPSDDRFLRDTILSFMLAGRDTTGSALTWFFWLLCNNQEAMTKIRQEINTNLFPRNKTDDGSVSYDSDSFNPQEVKKLVYLHGAVCEALRLYPPVPFNHKSPAKPDVLPSGHKVKANSRILFCLYSLGRMKSVWGEDAMEFKPERWISESGRSVHEPSYKFLSFNAGPRTCLGKEVAMTQMKTVAVKIIQNYDINVVEGHKIKPAPSVILHMKHGLKVTVSKRCLS

SEQ ID NO: 88937 - DNA, 1437 bp, Arabidopsis thaliana
  misc_feature (1)..(1437): Ceres Seq. ID no. 12714053
  misc_feature: MA Experiment ID: 20000180 Result: Up-regulated in Transcription
  misc_feature: MA Experiment 20000180 PARAMETER Experiment Name: At_Germinating_Seeds_P Parameter: Age (hr) Value: 24 vs. 0
  misc_feature: MA Experiment 20000180 PARAMETER Experiment Name: At_Germinating_Seeds_P Parameter: Tissue Value: Germinating Seeds
  misc_feature: MA Experiment ID: 20000286 Result: Up-regulated in Transcription
  misc_feature: MA Experiment 20000286 PARAMETER Experiment Name: At_Open_Flower_P Parameter: Age (day) Value: 21
  misc_feature: MA Experiment 20000286 PARAMETER Experiment Name: At_Open_Flower_P Parameter: Plant Line Value: WS
  misc_feature: MA Experiment 20000286 PARAMETER Experiment Name: At_Open_Flower_P Parameter: Tissue Value: Half Open vs. Whole Plant
atgggcaaactcttggttgtaatgttaattgggatgttcttggctttcgaaagcttggaagctcttgactatggagatgcactgaacaaatcaattttgttctttgaaggccaaagatctggtaaactcccgactaatcaaagggttaaatggcgagctgattctggcctgtctgacggtgcatcagctaatgtgaatttgattggaggatattacgatgctggtgacaatgtaaaatttgtgtggccaatgtcatttaccacaaccttgttgagttgggctgcacttgaataccagaatgagattactttcgttaaccagcttggttatctccggtctactatcaaatggggaactaattttatcctccgtgctcatacgtcgaccaacatgctatatacacaggtaggagatggaaattcagatcatagttgttgggagagaccagaagatatggacacacctagaactctctatagtatctcttcctcttcccccggttccgaagccgcaggtgaagccgcagccgctcttgccgcggcctcacttgttttcaaactggttgattctacatattcatccaaattactaaacaatgctaaatccctatttgaatttgctgataagtacagaggttcttaccaagcttcttgccccttctactgctcacactcaggctaccaggatgaacttttgtgggctgcggcttggttatacaaagcaacaggggaaaagagttacttaaattatgttataagcaacaaagattggagcaaagccatcaatgaatttagttgggacaacaaattcgccggcgttcaagctttactcgcatcggagttttacaacggggcaaatgacttggaaaaatttaagaccgatgttgaatcattcgtctgtgcattgatgccaggaagtagctctcaacaaattaagccaactcctggtggcattttgtttattagagacagtagcaacttacagtatgtaacaacggctacaactatattattctattactcaaaaactctaaccaaagccggggttggttcaatccagtgtgggtcgactcagttcaccgtatctcaaattcgaaattttgccaagtcacaggttgattacattcttggaaataatccattgaaaatgtcttacatggttggatttggaacaaagtatcctacacaacctcatcatagaggctcgtcattaccgtcaatccaatctaaaccagagaaaatcgactgtaatggaggattttcatactacaattttgatacaccaaacccgaatgtgcataccggcgcaattgtgggcggaccaaattcatccgaccagtatagcgacaaaagaacagattattctcatgcagagcccacaacttacatcaatgccgcctttattgggtcagtcgctgctctgatcagttcttcctaa

SEQ ID NO: 88938 - protein, 478 aa, Arabidopsis thaliana
  peptide (1)..(478): Ceres Seq. ID no. 12714054
  misc_feature (23)..(474): Pfam Name: Glycosyl hydrolase family 9 Pfam Description: Glycosyl hydrolase family 9
  misc_feature (1)..(478): Homolog of NCBI NO: 30681176 NR Description: glycosyl hydrolase family 9 [Arabidopsis thaliana]
  misc_feature (1)..(478): Homolog of NCBI NO: 7484848 NR Description: cellulase (EC 3.2.1.4) F17A8.90 - Arabidopsis
  misc_feature (1)..(478): Homolog of NCBI NO: 15236526 NR Description: glycosyl hydrolase family 9; protein id:
  misc_feature (7)..(478): Homolog of NCBI NO: 1363496 NR Description: cellulase (EC 3.2.1.4) 3D precursor - pepper
  misc_feature (7)..(478): Homolog of NCBI NO: 1655543 NR Description: cellulase; endo-beta-1,4-glucanase [Capsicum
  misc_feature (23)..(478): Homolog of NCBI NO: 1039431 NR Description: cellulase [Phaseolus vulgaris]
  misc_feature (23)..(478): Homolog of NCBI NO: 1346225 NR Description: Endoglucanase precursor (Endo-1,4-beta-glucanase) cellulase) >gi|7488761|pir||T11783 cellulase (EC 3.2.1.4)
  misc_feature (18)..(478): Homolog of NCBI NO: 575404 NR Description: cellulase [Sambucus nigra]
  misc_feature (6)..(478): Homolog of NCBI NO: 7488977 NR Description: cellulase (EC 3.2.1.4) Cel1 precursor - tomato
  misc_feature (18)..(478): Homolog of NCBI NO: 1076692 NR Description: cellulase (EC 3.2.1.4) - European elder (fragment)
MGKLLVVMLIGMFLAFESLEALDYGDALNKSILFFEGQRSGKLPTNQRVKWRADSGLSDGASANVNLIGGYYDAGDNVKFVWPMSFTTTLLSWAALEYQNEITFVNQLGYLRSTIKWGTNFILRAHTSTNMLYTQVGDGNSDHSCWERPEDMDTPRTLYSISSSSPGSEAAGEAAAALAAASLVFKLVDSTYSSKLLNNAKSLFEFADKYRGSYQASCPFYCSHSGYQDELLWAAAWLYKATGEKSYLNYVISNKDWSKAINEFSWDNKFAGVQALLASEFYNGANDLEKFKTDVESFVCALMPGSSSQQIKPTPGGILFIRDSSNLQYVTTATTILFYYSKTLTKAGVGSIQCGSTQFTVSQIRNFAKSQVDYILGNNPLKMSYMVGFGTKYPTQPHHRGSSLPSIQSKPEKIDCNGGFSYYNFDTPNPNVHTGAIVGGPNSSDQYSDKRTDYSHAEPTTYINAAFIGSVAALISSS

SEQ ID NO: 88939 - protein, 471 aa, Arabidopsis thaliana
  peptide (1)..(471): Ceres Seq. ID no. 12714055
  misc_feature (16)..(467): Pfam Name: Glycosyl hydrolase family 9 Pfam Description: Glycosyl hydrolase family 9
  misc_feature (1)..(471): Homolog of NCBI NO: 30681176 NR Description: glycosyl hydrolase family 9 [Arabidopsis thaliana]
  misc_feature (1)..(471): Homolog of NCBI NO: 7484848 NR Description: cellulase (EC 3.2.1.4) F17A8.90 - Arabidopsis
  misc_feature (1)..(471): Homolog of NCBI NO: 15236526 NR Description: glycosyl hydrolase family 9; protein id:
  misc_feature (1)..(471): Homolog of NCBI NO: 1363496 NR Description: cellulase (EC 3.2.1.4) 3D precursor - pepper
  misc_feature (1)..(471): Homolog of NCBI NO: 1655543 NR Description: cellulase; endo-beta-1,4-glucanase [Capsicum
  misc_feature (16)..(471): Homolog of NCBI NO: 1039431 NR Description: cellulase [Phaseolus vulgaris]
  misc_feature (16)..(471): Homolog of NCBI NO: 1346225 NR Description: Endoglucanase precursor (Endo-1,4-beta-glucanase) cellulase) >gi|7488761|pir||T11783 cellulase (EC 3.2.1.4)
  misc_feature (11)..(471): Homolog of NCBI NO: 575404 NR Description: cellulase [Sambucus nigra]
  misc_feature (1)..(471): Homolog of NCBI NO: 7488977 NR Description: cellulase (EC 3.2.1.4) Cel1 precursor - tomato
  misc_feature (11)..(471): Homolog of NCBI NO: 1076692 NR Description: cellulase (EC 3.2.1.4) - European elder (fragment)
MLIGMFLAFESLEALDYGDALNKSILFFEGQRSGKLPTNQRVKWRADSGLSDGASANVNLIGGYYDAGDNVKFVWPMSFTTTLLSWAALEYQNEITFVNQLGYLRSTIKWGTNFILRAHTSTNMLYTQVGDGNSDHSCWERPEDMDTPRTLYSISSSSPGSEAAGEAAAALAAASLVFKLVDSTYSSKLLNNAKSLFEFADKYRGSYQASCPFYCSHSGYQDELLWAAAWLYKATGEKSYLNYVISNKDWSKAINEFSWDNKFAGVQALLASEFYNGANDLEKFKTDVESFVCALMPGSSSQQIKPTPGGILFIRDSSNLQYVTTATTILFYYSKTLTKAGVGSIQCGSTQFTVSQIRNFAKSQVDYILGNNPLKMSYMVGFGTKYPTQPHHRGSSLPSIQSKPEKIDCNGGFSYYNFDTPNPNVHTGAIVGGPNSSDQYSDKRTDYSHAEPTTYINAAFIGSVAALISSS

SEQ ID NO: 88940 - protein, 467 aa, Arabidopsis thaliana
  peptide (1)..(467): Ceres Seq. ID no. 12714056
  misc_feature (12)..(463): Pfam Name: Glycosyl hydrolase family 9 Pfam Description: Glycosyl hydrolase family 9
  misc_feature (1)..(467): Homolog of NCBI NO: 30681176 NR Description: glycosyl hydrolase family 9 [Arabidopsis thaliana]
  misc_feature (1)..(467): Homolog of NCBI NO: 7484848 NR Description: cellulase (EC 3.2.1.4) F17A8.90 - Arabidopsis
  misc_feature (1)..(467): Homolog of NCBI NO: 15236526 NR Description: glycosyl hydrolase family 9; protein id:
  misc_feature (1)..(467): Homolog of NCBI NO: 1363496 NR Description: cellulase (EC 3.2.1.4) 3D precursor - pepper
  misc_feature (1)..(467): Homolog of NCBI NO: 1655543 NR Description: cellulase; endo-beta-1,4-glucanase [Capsicum
  misc_feature (12)..(467): Homolog of NCBI NO: 1039431 NR Description: cellulase [Phaseolus vulgaris]
  misc_feature (12)..(467): Homolog of NCBI NO: 1346225 NR Description: Endoglucanase precursor (Endo-1,4-beta-glucanase) cellulase) >gi|7488761|pir||T11783 cellulase (EC 3.2.1.4)
  misc_feature (7)..(467): Homolog of NCBI NO: 575404 NR Description: cellulase [Sambucus nigra]
  misc_feature (1)..(467): Homolog of NCBI NO: 7488977 NR Description: cellulase (EC 3.2.1.4) Cel1 precursor - tomato
  misc_feature (7)..(467): Homolog of NCBI NO: 1076692 NR Description: cellulase (EC 3.2.1.4) - European elder (fragment)
MFLAFESLEALDYGDALNKSILFFEGQRSGKLPTNQRVKWRADSGLSDGASANVNLIGGYYDAGDNVKFVWPMSFTTTLLSWAALEYQNEITFVNQLGYLRSTIKWGTNFILRAHTSTNMLYTQVGDGNSDHSCWERPEDMDTPRTLYSISSSSPGSEAAGEAAAALAAASLVFKLVDSTYSSKLLNNAKSLFEFADKYRGSYQASCPFYCSHSGYQDELLWAAAWLYKATGEKSYLNYVISNKDWSKAINEFSWDNKFAGVQALLASEFYNGANDLEKFKTDVESFVCALMPGSSSQQIKPTPGGILFIRDSSNLQYVTTATTILFYYSKTLTKAGVGSIQCGSTQFTVSQIRNFAKSQVDYILGNNPLKMSYMVGFGTKYPTQPHHRGSSLPSIQSKPEKIDCNGGFSYYNFDTPNPNVHTGAIVGGPNSSDQYSDKRTDYSHAEPTTYINAAFIGSVAALISSS

SEQ ID NO: 88941 - DNA, 1361 bp, Arabidopsis thaliana
  misc_feature (1)..(1361): Ceres Seq. ID no. 12714097
  misc_feature: MA Experiment ID: 20000173 Result: Down-regulated in Transcription
  misc_feature: MA Experiment 20000173 PARAMETER Experiment Name: At_42deg_Heat_P Parameter: Age (day) Value: 14
  misc_feature: MA Experiment 20000173 PARAMETER Experiment Name: At_42deg_Heat_P Parameter: Organism Value: A. thaliana
  misc_feature: MA Experiment 20000173 PARAMETER Experiment Name: At_42deg_Heat_P Parameter: Plant Line Value: WS
  misc_feature: MA Experiment 20000173 PARAMETER Experiment Name: At_42deg_Heat_P Parameter: Temperature (deg C) Value: 42 vs. 22
  misc_feature: MA Experiment 20000173 PARAMETER Experiment Name: At_42deg_Heat_P Parameter: Timepoint (hr) Value: 6
  misc_feature: MA Experiment 20000173 PARAMETER Experiment Name: At_42deg_Heat_P Parameter: Tissue Value: Aerial
  misc_feature: MA Experiment ID: 20000179 Result: Up-regulated in Transcription
  misc_feature: MA Experiment 20000179 PARAMETER Experiment Name: At_Germinating_Seeds_P Parameter: Age (hr) Value: 6 vs. 0
  misc_feature: MA Experiment 20000179 PARAMETER Experiment Name: At_Germinating_Seeds_P Parameter: Tissue Value: Germinating Seeds
  misc_feature: MA Experiment ID: 20000439 Result: Down-regulated in Transcription
  misc_feature: MA Experiment 20000439 PARAMETER Experiment Name: At_Roots__P Parameter: Age (day) Value: 14 vs. 21
  misc_feature: MA Experiment 20000439 PARAMETER Experiment Name: At_Roots__P Parameter: Organism Value: A. thaliana
  misc_feature: MA Experiment 20000439 PARAMETER Experiment Name: At_Roots__P Parameter: Tissue Value: Roots vs. Whole Plant
  misc_feature: MA Experiment ID: 20000451 Result: Up-regulated in Transcription
  misc_feature: MA Experiment 20000451 PARAMETER Experiment Name: At_CS6879_Shoots-Roots_P Parameter: Age (day) Value: 14
  misc_feature: MA Experiment 20000451 PARAMETER Experiment Name: At_CS6879_Shoots-Roots_P Parameter: Organism Value: A. thaliana
  misc_feature: MA Experiment 20000451 PARAMETER Experiment Name: At_CS6879_Shoots-Roots_P Parameter: Plant Line Value: CS6879 vs. WS
  misc_feature: MA Experiment 20000451 PARAMETER Experiment Name: At_CS6879_Shoots-Roots_P Parameter: Tissue Value: Roots
  misc_feature: MA Experiment ID: 20001905 Result: Down-regulated in Transcription
  misc_feature: MA Experiment 20001905 PARAMETER Experiment Name: At_Drought_Reproduction_P Parameter: Age (day) Value: 40
  misc_feature: MA Experiment 20001905 PARAMETER Experiment Name: At_Drought_Reproduction_P Parameter: Organism Value: A. thaliana
  misc_feature: MA Experiment 20001905 PARAMETER Experiment Name: At_Drought_Reproduction_P Parameter: Plant Line Value: WS
  misc_feature: MA Experiment 20001905 PARAMETER Experiment Name: At_Drought_Reproduction_P Parameter: Timepoint (day) Value: 10
  misc_feature: MA Experiment 20001905 PARAMETER Experiment Name: At_Drought_Reproduction_P Parameter: Tissue Value: Rosettes
  misc_feature: MA Experiment 20001905 PARAMETER Experiment Name: At_Drought_Reproduction_P Parameter: Treatment Value: Drought vs. No Drought
aaacaattaacaaactttggctgctttgtcttaaatctgaatcgtccttattcatcctaatcaatgacaccgttttacttcttcttcttcttctctctatcatcaagtcaagatttttttcaattaatggaccttaataaattttgagaattttcttgagtttccattaaagtccacttctttgggctaaattcagggttttgtgaagaatgggtaacagagtaatctgcatgaagaagaaagatgttgttatcagaagtggaggagatgggtccagaagcaagagagtgaatcgttcacagaggaagttgcttgctgatgaagagaatttgcatcgaagagctttgtctatggctattcatcaagctcaagtttctcagagatttgatggatccatgtctagacgaatcgggtctactagctctagaagaggaacactctctgactcattttctaataacaagcaggttcctgagtttttggagagcttgaaggttaagaaattcgttttggtgcatggtgaagggtttggggcatggtgttggtacaaaactattgcgtcattggaggagtctggactgtctcctgttacggttgacctcgctggatctggatttaatatgacagacgcaaatagtgtttccaccttagaagaatattcaaaaccgttgatcgagctcattcaaaatcttcctgctgaagaaaaggtgattctggtaggtcacagtactggaggggcatgtgtttcatatgcgttagagcggtttccagagaaaatctcaaaagctatattcatttgtgcaactatggttactgatggacaaagacccttcgatgtcttcgctgatgagcttggttctgcagaacggttcatgaaagagtcacagttcttgatctatggaaacggcaaggacaaccccgcgacagggttcatgttcgagaaacaacacatgaaaggcttgtacttcaatcagtcaccaaataaggacattgcattgtcaatgatctcgatgcggcctgtaccattaggtcccatgatggagaagttgtcacttagtgcagaaagatatgggaaaggtcggagattctatgtccagacgctcgatgacttggctctttcaccggacgttcaagagaaactggttcgagagaatagtcccgaagcagtttttaagatcaaaggaagtgatcattgcccattcttctctaaacctcagtctcttcacaagatccttcttgaaatagcacagattccttaaaaatagaaaatcttgaattcagaatgtataatatactttcagtttttttcctaaacatttgcatattcttatttacgtcaatatacaaacaagattcttgtt

SEQ ID NO: 88942 - protein, 349 aa, Arabidopsis thaliana
  peptide (1)..(349): Ceres Seq. ID no. 12714098
  misc_feature (1)..(349): Homolog of NCBI NO: 30681236 NR Description: hydrolase family [Arabidopsis thaliana] Unknown protein [Arabidopsis thaliana]
  misc_feature (1)..(349): Homolog of NCBI NO: 21595837 NR Description: polyneuridine aldehyde esterase, putative
  misc_feature (1)..(349): Homolog of NCBI NO: 15218463 NR Description: polyneuridine aldehyde esterase, putative; id: At1g33990.1, supported by cDNA: 8327., supported by cDNA: [Arabidopsis thaliana] >gi|10092445|gb|AAG12848.1|AC079286_5
  misc_feature (96)..(349): Homolog of NCBI NO: 7485010 NR Description: host response protein homolog T5L19.30 - thaliana >gi|4538993|emb|CAB39614.1| putative host response [Arabidopsis thaliana] >gi|7267686|emb|CAB78113.1| putative host
  misc_feature (96)..(349): Homolog of NCBI NO: 25518661 NR Description: hypothetical protein F12G12.19 - Arabidopsis >gi|10086476|gb|AAG12536.1|AC015446_17 Unknown protein
  misc_feature (56)..(348): Homolog of NCBI NO: 15230077 NR Description: alpha/beta hydrolase, putative; protein id: [Arabidopsis thaliana] >gi|10092202|gb|AAG12619.1|AC074284_5
  misc_feature (67)..(349): Homolog of NCBI NO: 15222699 NR Description: hypothetical protein; protein id: At1g26360.1
  misc_feature (61)..(349): Homolog of NCBI NO: 25404802 NR Description: probable alpha/beta hydrolase F23O10.18 - Arabidopsis thaliana >gi|12325081|gb|AAG52490.1|AC018364_8
  misc_feature (82)..(349): Homolog of NCBI NO: 15222256 NR Description: polyneuridine aldehyde esterase, putative; id: At1g69240.1 [Arabidopsis thaliana]
  misc_feature (140)..(330): Homolog of NCBI NO: 25518436 NR Description: hypothetical protein T1K7.26 - Arabidopsis >gi|9797761|gb|AAF98579.1|AC013427_22 Contains similarity to protein from Oryza sativa gb|Z34271 and contains an alpha/beta
MGNRVICMKKKDVVIRSGGDGSRSKRVNRSQRKLLADEENLHRRALSMAIHQAQVSQRFDGSMSRRIGSTSSRRGTLSDSFSNNKQVPEFLESLKVKKFVLVHGEGFGAWCWYKTIASLEESGLSPVTVDLAGSGFNMTDANSVSTLEEYSKPLIELIQNLPAEEKVILVGHSTGGACVSYALERFPEKISKAIFICATMVTDGQRPFDVFADELGSAERFMKESQFLIYGNGKDNPATGFMFEKQHMKGLYFNQSPNKDIALSMISMRPVPLGPMMEKLSLSAERYGKGRRFYVQTLDDLALSPDVQEKLVRENSPEAVFKIKGSDHCPFFSKPQSLHKILLEIAQIP

SEQ ID NO: 88943 - protein, 342 aa, Arabidopsis thaliana
  peptide (1)..(342): Ceres Seq. ID no. 12714099
  misc_feature (1)..(342): Homolog of NCBI NO: 30681236 NR Description: hydrolase family [Arabidopsis thaliana] Unknown protein [Arabidopsis thaliana]
  misc_feature (1)..(342): Homolog of NCBI NO: 21595837 NR Description: polyneuridine aldehyde esterase, putative
  misc_feature (1)..(342): Homolog of NCBI NO: 15218463 NR Description: polyneuridine aldehyde esterase, putative; id: At1g33990.1, supported by cDNA: 8327., supported by cDNA: [Arabidopsis thaliana] >gi|10092445|gb|AAG12848.1|AC079286_5
  misc_feature (89)..(342): Homolog of NCBI NO: 7485010 NR Description: host response protein homolog T5L19.30 - thaliana >gi|4538993|emb|CAB39614.1| putative host response [Arabidopsis thaliana] >gi|7267686|emb|CAB78113.1| putative host
  misc_feature (89)..(342): Homolog of NCBI NO: 25518661 NR Description: hypothetical protein F12G12.19 - Arabidopsis >gi|10086476|gb|AAG12536.1|AC015446_17 Unknown protein
  misc_feature (49)..(341): Homolog of NCBI NO: 15230077 NR Description: alpha/beta hydrolase, putative; protein id: [Arabidopsis thaliana] >gi|10092202|gb|AAG12619.1|AC074284_5
  misc_feature (60)..(342): Homolog of NCBI NO: 15222699 NR Description: hypothetical protein; protein id: At1g26360.1
  misc_feature (54)..(342): Homolog of NCBI NO: 25404802 NR Description: probable alpha/beta hydrolase F23O10.18 - Arabidopsis thaliana >gi|12325081|gb|AAG52490.1|AC018364_8
  misc_feature (75)..(342): Homolog of NCBI NO: 15222256 NR Description: polyneuridine aldehyde esterase, putative; id: At1g69240.1 [Arabidopsis thaliana]
  misc_feature (133)..(323): Homolog of NCBI NO: 25518436 NR Description: hypothetical protein T1K7.26 - Arabidopsis >gi|9797761|gb|AAF98579.1|AC013427_22 Contains similarity to protein from Oryza sativa gb|Z34271 and contains an alpha/beta
MKKKDVVIRSGGDGSRSKRVNRSQRKLLADEENLHRRALSMAIHQAQVSQRFDGSMSRRIGSTSSRRGTLSDSFSNNKQVPEFLESLKVKKFVLVHGEGFGAWCWYKTIASLEESGLSPVTVDLAGSGFNMTDANSVSTLEEYSKPLIELIQNLPAEEKVILVGHSTGGACVSYALERFPEKISKAIFICATMVTDGQRPFDVFADELGSAERFMKESQFLIYGNGKDNPATGFMFEKQHMKGLYFNQSPNKDIALSMISMRPVPLGPMMEKLSLSAERYGKGRRFYVQTLDDLALSPDVQEKLVRENSPEAVFKIKGSDHCPFFSKPQSLHKILLEIAQIP

SEQ ID NO: 88944 - protein, 302 aa, Arabidopsis thaliana
  peptide (1)..(302): Ceres Seq. ID no. 12714100
  misc_feature (1)..(302): Homolog of NCBI NO: 30681236 NR Description: hydrolase family [Arabidopsis thaliana] Unknown protein [Arabidopsis thaliana]
  misc_feature (1)..(302): Homolog of NCBI NO: 21595837 NR Description: polyneuridine aldehyde esterase, putative
  misc_feature (1)..(302): Homolog of NCBI NO: 15218463 NR Description: polyneuridine aldehyde esterase, putative; id: At1g33990.1, supported by cDNA: 8327., supported by cDNA: [Arabidopsis thaliana] >gi|10092445|gb|AAG12848.1|AC079286_5
  misc_feature (49)..(302): Homolog of NCBI NO: 7485010 NR Description: host response protein homolog T5L19.30 - thaliana >gi|4538993|emb|CAB39614.1| putative host response [Arabidopsis thaliana] >gi|7267686|emb|CAB78113.1| putative host
  misc_feature (49)..(302): Homolog of NCBI NO: 25518661 NR Description: hypothetical protein F12G12.19 - Arabidopsis >gi|10086476|gb|AAG12536.1|AC015446_17 Unknown protein
  misc_feature (9)..(301): Homolog of NCBI NO: 15230077 NR Description: alpha/beta hydrolase, putative; protein id: [Arabidopsis thaliana] >gi|10092202|gb|AAG12619.1|AC074284_5
  misc_feature (20)..(302): Homolog of NCBI NO: 15222699 NR Description: hypothetical protein; protein id: At1g26360.1
  misc_feature (14)..(302): Homolog of NCBI NO: 25404802 NR Description: probable alpha/beta hydrolase F23O10.18 - Arabidopsis thaliana >gi|12325081|gb|AAG52490.1|AC018364_8
  misc_feature (35)..(302): Homolog of NCBI NO: 15222256 NR Description: polyneuridine aldehyde esterase, putative; id: At1g69240.1 [Arabidopsis thaliana]
  misc_feature (93)..(283): Homolog of NCBI NO: 25518436 NR Description: hypothetical protein T1K7.26 - Arabidopsis >gi|9797761|gb|AAF98579.1|AC013427_22 Contains similarity to protein from Oryza sativa gb|Z34271 and contains an alpha/beta
MAIHQAQVSQRFDGSMSRRIGSTSSRRGTLSDSFSNNKQVPEFLESLKVKKFVLVHGEGFGAWCWYKTIASLEESGLSPVTVDLAGSGFNMTDANSVSTLEEYSKPLIELIQNLPAEEKVILVGHSTGGACVSYALERFPEKISKAIFICATMVTDGQRPFDVFADELGSAERFMKESQFLIYGNGKDNPATGFMFEKQHMKGLYFNQSPNKDIALSMISMRPVPLGPMMEKLSLSAERYGKGRRFYVQTLDDLALSPDVQEKLVRENSPEAVFKIKGSDHCPFFSKPQSLHKILLEIAQIP

SEQ ID NO: 88945 - DNA, 876 bp, Arabidopsis thaliana
  misc_feature (1)..(876): Ceres Seq. ID no. 12714246
atgggttgcgtctcatctaacctcctaaaccacgacgaagacttctctcaaatcggcggtggaagctccgccttcggtcaccacatcgtcaaactaacctccaccacttatggtcttctcacactcgatcctcctcctcctccttctcctcctatgacgccgccggagaaattcacagtcgatacaaaatctaagtcaatatggtctgagccaagggtgataaagtcggaaccggagattattaactcttgggagttaatgtctggtctcgacggagagagtttccgattcacagaggattcggattctaattcgagaagccctagaaaatcgtttaaaccgttagatttgaaattggatgagaaatttgagaggatttgtccaccaggaggagagaatcgtgtggtgatgtacacgacgtcgttgcgaggtgttcgtcaaacgtttgaggcgtgtaacgctgtgagagcggcggtggagagttttggtgttgtggtttgcgagagagatgtgtcgatggatagaaggtttagagaagagcttgtgagtctaatggcgaagagagttggggatgagggagtggctgcattgccgcctcgggtttttgtgaagggaaggtacattggtggaggagaggaagtgttgagactagttgaggaaggttctttcggagagctgatcagcgggattccgagaaagaaagcgggaggatgcgagagcggcgcgtgtgatggttgcggcggtttgtttttcttgccgtgttttcggtgtaatggaagctgtaagatggtgaaaggatggggtagtgcttcggtggttgtgagatgtaatgagtgtaatgagaatggtcttgttccatgtcctatttgcagttga

SEQ ID NO: 88946 - protein, 291 aa, Arabidopsis thaliana
  peptide (1)..(291): Ceres Seq. ID no. 12714247
  misc_feature (134)..(227): Pfam Name: Glutaredoxin Pfam Description: Glutaredoxin
  misc_feature (99)..(291): Homolog of NCBI NO: 15235179 NR Description: putative protein; protein id: At4g10630.1
  misc_feature (1)..(98): Homolog of NCBI NO: 15235179 NR Description: putative protein; protein id: At4g10630.1
  misc_feature (51)..(291): Homolog of NCBI NO: 15223291 NR Description: unknown protein; protein id: At1g32760.1 thaliana] >gi|6714276|gb|AAF25972.1|AC017118_9 F6N18.14
  misc_feature (77)..(291): Homolog of NCBI NO: 15237554 NR Description: putative protein; protein id: At5g03870.1
  misc_feature (127)..(291): Homolog of NCBI NO: 38346321 NR Description: OJ000126_13.3 [Oryza sativa (japonica
  misc_feature (102)..(290): Homolog of NCBI NO: 15217659 NR Description: peptide transporter, putative; protein id: supported by cDNA: gi_15810442, supported by cDNA: gi_17381051
  misc_feature (102)..(290): Homolog of NCBI NO: 17381052 NR Description: putative peptide transporter protein [Arabidopsis
  misc_feature (44)..(290): Homolog of NCBI NO: 34899868 NR Description: OJ1714_H10.16 [Oryza sativa (japonica
  misc_feature (122)..(291): Homolog of NCBI NO: 15240974 NR Description: putative protein; protein id: At5g01420.1
  misc_feature (122)..(291): Homolog of NCBI NO: 26451045 NR Description: unknown protein [Arabidopsis thaliana]
MGCVSSNLLNHDEDFSQIGGGSSAFGHHIVKLTSTTYGLLTLDPPPPPSPPMTPPEKFTVDTKSKSIWSEPRVIKSEPEIINSWELMSGLDGESFRFTEDSDSNSRSPRKSFKPLDLKLDEKFERICPPGGENRVVMYTTSLRGVRQTFEACNAVRAAVESFGVVVCERDVSMDRRFREELVSLMAKRVGDEGVAALPPRVFVKGRYIGGGEEVLRLVEEGSFGELISGIPRKKAGGCESGACDGCGGLFFLPCFRCNGSCKMVKGWGSASVVVRCNECNENGLVPCPICS

SEQ ID NO: 88947 - protein, 240 aa, Arabidopsis thaliana
  peptide (1)..(240): Ceres Seq. ID no. 12714248
  misc_feature (83)..(176): Pfam Name: Glutaredoxin Pfam Description: Glutaredoxin
  misc_feature (48)..(240): Homolog of NCBI NO: 15235179 NR Description: putative protein; protein id: At4g10630.1
  misc_feature (1)..(47): Homolog of NCBI NO: 15235179 NR Description: putative protein; protein id: At4g10630.1
  misc_feature (1)..(240): Homolog of NCBI NO: 15223291 NR Description: unknown protein; protein id: At1g32760.1 thaliana] >gi|6714276|gb|AAF25972.1|AC017118_9 F6N18.14
  misc_feature (26)..(240): Homolog of NCBI NO: 15237554 NR Description: putative protein; protein id: At5g03870.1
  misc_feature (76)..(240): Homolog of NCBI NO: 38346321 NR Description: OJ000126_13.3 [Oryza sativa (japonica
  misc_feature (51)..(239): Homolog of NCBI NO: 15217659 NR Description: peptide transporter, putative; protein id: supported by cDNA: gi_15810442, supported by cDNA: gi_17381051
  misc_feature (51)..(239): Homolog of NCBI NO: 17381052 NR Description: putative peptide transporter protein [Arabidopsis
  misc_feature (1)..(239): Homolog of NCBI NO: 34899868 NR Description: OJ1714_H10.16 [Oryza sativa (japonica
  misc_feature (71)..(240): Homolog of NCBI NO: 15240974 NR Description: putative protein; protein id: At5g01420.1
  misc_feature (71)..(240): Homolog of NCBI NO: 26451045 NR Description: unknown protein [Arabidopsis thaliana]
MTPPEKFTVDTKSKSIWSEPRVIKSEPEIINSWELMSGLDGESFRFTEDSDSNSRSPRKSFKPLDLKLDEKFERICPPGGENRVVMYTTSLRGVRQTFEACNAVRAAVESFGVVVCERDVSMDRRFREELVSLMAKRVGDEGVAALPPRVFVKGRYIGGGEEVLRLVEEGSFGELISGIPRKKAGGCESGACDGCGGLFFLPCFRCNGSCKMVKGWGSASVVVRCNECNENGLVPCPICS

SEQ ID NO: 88948 - protein, 205 aa, Arabidopsis thaliana
  peptide (1)..(205): Ceres Seq. ID no. 12714249
  misc_feature (48)..(141): Pfam Name: Glutaredoxin Pfam Description: Glutaredoxin
  misc_feature (13)..(205): Homolog of NCBI NO: 15235179 NR Description: putative protein; protein id: At4g10630.1
  misc_feature (1)..(12): Homolog of NCBI NO: 15235179 NR Description: putative protein; protein id: At4g10630.1
  misc_feature (1)..(205): Homolog of NCBI NO: 15223291 NR Description: unknown protein; protein id: At1g32760.1 thaliana] >gi|6714276|gb|AAF25972.1|AC017118_9 F6N18.14
  misc_feature (1)..(205): Homolog of NCBI NO: 15237554 NR Description: putative protein; protein id: At5g03870.1
  misc_feature (41)..(205): Homolog of NCBI NO: 38346321 NR Description: OJ000126_13.3 [Oryza sativa (japonica
  misc_feature (16)..(204): Homolog of NCBI NO: 15217659 NR Description: peptide transporter, putative; protein id: supported by cDNA: gi_15810442, supported by cDNA: gi_17381051
  misc_feature (16)..(204): Homolog of NCBI NO: 17381052 NR Description: putative peptide transporter protein [Arabidopsis
  misc_feature (1)..(204): Homolog of NCBI NO: 34899868 NR Description: OJ1714_H10.16 [Oryza sativa (japonica
  misc_feature (36)..(205): Homolog of NCBI NO: 15240974 NR Description: putative protein; protein id: At5g01420.1
  misc_feature (36)..(205): Homolog of NCBI NO: 26451045 NR Description: unknown protein [Arabidopsis thaliana]
MSGLDGESFRFTEDSDSNSRSPRKSFKPLDLKLDEKFERICPPGGENRVVMYTTSLRGVRQTFEACNAVRAAVESFGVVVCERDVSMDRRFREELVSLMAKRVGDEGVAALPPRVFVKGRYIGGGEEVLRLVEEGSFGELISGIPRKKAGGCESGACDGCGGLFFLPCFRCNGSCKMVKGWGSASVVVRCNECNENGLVPCPICS

SEQ ID NO: 88949 - DNA, 522 bp, Arabidopsis thaliana
  misc_feature (1)..(522): Ceres Seq. ID no. 12714298
  misc_feature: MA Experiment ID: 20000314 Result: Down-regulated in Transcription
  misc_feature: MA Experiment 20000314 PARAMETER Experiment Name: At_14day_Shoots-Roots_Sub_P Parameter: Age (day) Value: 14
  misc_feature: MA Experiment 20000314 PARAMETER Experiment Name: At_14day_Shoots-Roots_Sub_P Parameter: Organism Value: A. thaliana
  misc_feature: MA Experiment 20000314 PARAMETER Experiment Name: At_14day_Shoots-Roots_Sub_P Parameter: Plant Line Value: WS
  misc_feature: MA Experiment 20000314 PARAMETER Experiment Name: At_14day_Shoots-Roots_Sub_P Parameter: Tissue Value: Roots vs. Whole Plant
  misc_feature: MA Experiment ID: 20000315 Result: Down-regulated in Transcription
  misc_feature: MA Experiment 20000315 PARAMETER Experiment Name: At_14day_Shoots-Roots_Sub_P Parameter: Age (day) Value: 14
  misc_feature: MA Experiment 20000315 PARAMETER Experiment Name: At_14day_Shoots-Roots_Sub_P Parameter: Organism Value: A. thaliana
  misc_feature: MA Experiment 20000315 PARAMETER Experiment Name: At_14day_Shoots-Roots_Sub_P Parameter: Plant Line Value: WS
  misc_feature: MA Experiment 20000315 PARAMETER Experiment Name: At_14day_Shoots-Roots_Sub_P Parameter: Tissue Value: Shoots vs. Whole Plant
  misc_feature: MA Experiment ID: 20000328 Result: Down-regulated in Transcription
  misc_feature: MA Experiment 20000328 PARAMETER Experiment Name: At_42deg_Heat_Sub_P Parameter: Age (day) Value: 14
  misc_feature: MA Experiment 20000328 PARAMETER Experiment Name: At_42deg_Heat_Sub_P Parameter: Organism Value: A. thaliana
  misc_feature: MA Experiment 20000328 PARAMETER Experiment Name: At_42deg_Heat_Sub_P Parameter: Plant Line Value: WS
  misc_feature: MA Experiment 20000328 PARAMETER Experiment Name: At_42deg_Heat_Sub_P Parameter: Temperature (deg C) Value: 42 vs. 22
  misc_feature: MA Experiment 20000328 PARAMETER Experiment Name: At_42deg_Heat_Sub_P Parameter: Timepoint (hr) Value: 6
  misc_feature: MA Experiment 20000328 PARAMETER Experiment Name: At_42deg_Heat_Sub_P Parameter: Tissue Value: Aerial
atggaggtggtggcggaaatggaagaggcgctagtggttacgagaaacatagcagaggttacagatctggtggaggttgtggtggccgtgagggaggtggctaaggaggaggtgacgctggaagttacggaggaagcggagtggggtttggtagtcaacacgaatgtagttaaaaagaagaatggaaaagatagggtgtgcatcgacatcacgggcctaaataaggcatgccccaaggacagttttccacttccacttatacaccggctcgtggaatccaccgcggcgaatgagctactaacactcatagatgccttctcgggttataatcaaataatgatgaattctgaggatcaagaaaaaacttcattcatcacggatacaggtatttattgttataaggtaatgccttttggtttaaaaaatgcaggagcaacttaccaacgactagtgaacaagatgtttcacaaacaccttggcaaaacgatggaagtaaacatagacaatatgttggtgaaataa

SEQ ID NO: 88950 - protein, 173 aa, Arabidopsis thaliana
  peptide (1)..(173): Ceres Seq. ID no. 12714299
  misc_feature (47)..(173): Pfam Name: Reverse transcriptase (RNA-dependent DNA polymerase) Pfam Description: Reverse transcriptase (RNA-dependent DNA
  misc_feature (24)..(173): Homolog of NCBI NO: 15225653 NR Description: putative retroelement pol polyprotein; protein At2g14400.1 [Arabidopsis thaliana] >gi|25411562|pir||G84516
  misc_feature (47)..(173): Homolog of NCBI NO: 15225651 NR Description: putative retroelement pol polyprotein; protein At2g14380.1 [Arabidopsis thaliana] >gi|25411560|pir||E84516
  misc_feature (47)..(173): Homolog of NCBI NO: 30693475 NR Description: GAG-POL precursor (gypsy_Ty3-element) [Oryza
  misc_feature (30)..(173): Homolog of NCBI NO: 30686804 NR Description: retrotransposon gag protein family [Arabidopsis
  misc_feature (53)..(173): Homolog of NCBI NO: 15226511 NR Description: putative retroelement pol polyprotein; protein At2g15410.1 [Arabidopsis thaliana] >gi|25411637|pir||F84528
  misc_feature (48)..(173): Homolog of NCBI NO: 15225007 NR Description: putative retroelement pol polyprotein; protein At2g13330.1 [Arabidopsis thaliana] >gi|25411489|pir||H84506
  misc_feature (47)..(173): Homolog of NCBI NO: 18412374 NR Description: hypothetical protein; protein id: At4g03800.1
  misc_feature (28)..(173): Homolog of NCBI NO: 20161451 NR Description: putative polyprotein [Oryza sativa (japonica
  misc_feature (30)..(173): Homolog of NCBI NO: 27552545 NR Description: putative polyprotein [Oryza sativa (japonica
  misc_feature (65)..(173): Homolog of NCBI NO: 13559346 NR Description: reverse transcriptase [Spinacia oleracea]
MEVVAEMEEALVVTRNIAEVTDLVEVVVAVREVAKEEVTLEVTEEAEWGLVVNTNVVKKKNGKDRVCIDITGLNKACPKDSFPLPLIHRLVESTAANELLTLIDAFSGYNQIMMNSEDQEKTSFITDTGIYCYKVMPFGLKNAGATYQRLVNKMFHKHLGKTMEVNIDNMLVK

SEQ ID NO: 88951 - protein, 167 aa, Arabidopsis thaliana
  peptide (1)..(167): Ceres Seq. ID no. 12714300
  misc_feature (41)..(167): Pfam Name: Reverse transcriptase (RNA-dependent DNA polymerase) Pfam Description: Reverse transcriptase (RNA-dependent DNA
  misc_feature (18)..(167): Homolog of NCBI NO: 15225653 NR Description: putative retroelement pol polyprotein; protein At2g14400.1 [Arabidopsis thaliana] >gi|25411562|pir||G84516
  misc_feature (41)..(167): Homolog of NCBI NO: 15225651 NR Description: putative retroelement pol polyprotein; protein At2g14380.1 [Arabidopsis thaliana] >gi|25411560|pir||E84516
  misc_feature (41)..(167): Homolog of NCBI NO: 30693475 NR Description: GAG-POL precursor (gypsy_Ty3-element) [Oryza
  misc_feature (24)..(167): Homolog of NCBI NO: 30686804 NR Description: retrotransposon gag protein family [Arabidopsis
  misc_feature (47)..(167): Homolog of NCBI NO: 15226511 NR Description: putative retroelement pol polyprotein; protein At2g15410.1 [Arabidopsis thaliana] >gi|25411637|pir||F84528
  misc_feature (42)..(167): Homolog of NCBI NO: 15225007 NR Description: putative retroelement pol polyprotein; protein At2g13330.1 [Arabidopsis thaliana] >gi|25411489|pir||H84506
  misc_feature (41)..(167): Homolog of NCBI NO: 18412374 NR Description: hypothetical protein; protein id: At4g03800.1
  misc_feature (22)..(167): Homolog of NCBI NO: 20161451 NR Description: putative polyprotein [Oryza sativa (japonica
  misc_feature (24)..(167): Homolog of NCBI NO: 27552545 NR Description: putative polyprotein [Oryza sativa (japonica
  misc_feature (59)..(167): Homolog of NCBI NO: 13559346 NR Description: reverse transcriptase [Spinacia oleracea]
MEEALVVTRNIAEVTDLVEVVVAVREVAKEEVTLEVTEEAEWGLVVNTNVVKKKNGKDRVCIDITGLNKACPKDSFPLPLIHRLVESTAANELLTLIDAFSGYNQIMMNSEDQEKTSFITDTGIYCYKVMPFGLKNAGATYQRLVNKMFHKHLGKTMEVNIDNMLVK

SEQ ID NO: 88952 - DNA, 1287 bp, Arabidopsis thaliana
  misc_feature (1)..(1287): Ceres Seq. ID no. 12714383
  misc_feature: MA Experiment ID: 20000179 Result: Up-regulated in Transcription
  misc_feature: MA Experiment 20000179 PARAMETER Experiment Name: At_Germinating_Seeds_P Parameter: Age (hr) Value: 6 vs. 0
  misc_feature: MA Experiment 20000179 PARAMETER Experiment Name: At_Germinating_Seeds_P Parameter: Tissue Value: Germinating Seeds
  misc_feature: MA Experiment ID: 20000180 Result: Up-regulated in Transcription
  misc_feature: MA Experiment 20000180 PARAMETER Experiment Name: At_Germinating_Seeds_P Parameter: Age (hr) Value: 24 vs. 0
  misc_feature: MA Experiment 20000180 PARAMETER Experiment Name: At_Germinating_Seeds_P Parameter: Tissue Value: Germinating Seeds
  misc_feature: MA Experiment ID: 20000265 Result: Down-regulated in Transcription
  misc_feature: MA Experiment 20000265 PARAMETER Experiment Name: At_Open_Flower_P Parameter: Age (day) Value: 21
  misc_feature: MA Experiment 20000265 PARAMETER Experiment Name: At_Open_Flower_P Parameter: Plant Line Value: WS
  misc_feature: MA Experiment 20000265 PARAMETER Experiment Name: At_Open_Flower_P Parameter: Tissue Value: Closed Flower vs. Whole Plant
  misc_feature: MA Experiment ID: 20000495 Result: Down-regulated in Transcription
  misc_feature: MA Experiment 20000495 PARAMETER Experiment Name: At_Guard_Cells_P Parameter: Harvest Date Value: 8/2/2002
  misc_feature: MA Experiment 20000495 PARAMETER Experiment Name: At_Guard_Cells_P Parameter: Organism Value: A. thaliana
  misc_feature: MA Experiment 20000495 PARAMETER Experiment Name: At_Guard_Cells_P Parameter: Tissue Value: Guard Cells vs. Leaves
atgacgaaaaaggcggtgcttattgggatcaattacccaggaaccaaggcggagttacggggatgcgtcaacgatgttcgtcgtatgtacaaatgtctcgttgaacggtacggcttctccgaggagaacatcaccgttctcatcgacaccgatgaatcctctactcagcctactggcaagaacatccgccgcgcgcttgctgatctcgtcgaatctgccgattccggcgacgttcttgtcgttcattacagtggacacggtacgaggttgccggctgagactggtgaagacgatgacactggtttcgacgagtgtattgttccttgcgacatgaatctgattactgatgatgattttagagatcttgtggacaaggttcctccaggttgcagaatgacaatcatttcagactcttgtcacagtggtggcctaatcgacgaagccaaggagcagattggagagagcactaagaaagaagccgaggacgaagatgaatctgaagaatcttcttcaagattcgggtttaggaagttcttgcgcagcaaagtggaaggcgccatcgagtctcgagggtttcacattggagggaacaagaaggatgaagatgaggcggaagaaatcgagactaaggagattgagcttgaagacggagaaacgatccatgccaaagacaaatctcttcctctgcagaccttgattgatattctcaagcagcaaacagggaatgataatatcgaagttgggaaaatcaggccaagcctttttgatgcgtttggtgatgattcgagcccgaaagtgaagaagtttatgaaagtgatcttaggtaagcttcaggctggaaatggagaagaaggtggattaatgggaatgcttggcaaattggcttcagggtttcttgagggtaaactaaacgatgaagactatgtgaaacccgctatgcagacacacgttgggagtaaagaagaggtttatgctggtggatcaagaggttcggttccgcttccagacagcgggatactgatcagcggttgccaaaccgatcagacctctgctgatgcgactccagcggggaaaccaactgaggcttatggagcgatgagcaattcgatacagacgatattggaggagacagacggtgagatatcaaacagagaaatggttacaagggctaggaaggcattgaagaagcaagggtttactcagcagccaggtttgtattgccatgatggttatgccaacgctcctttcatctgttgaaaacagaggttttattgaatgttttttact

SEQ ID NO: 88953 - protein, 418 aa, Arabidopsis thaliana; identical to SEQ ID NO: 41313
  peptide (1)..(418): Ceres Seq. ID no. 12714384
  misc_feature (3)..(418): Pfam Name: Caspase domain Pfam Description: Caspase domain
  misc_feature (1)..(418): Homolog of NCBI NO: 15219345 NR Description: hypothetical protein common family; protein id: supported by cDNA: gi_19347868 [Arabidopsis thaliana]
  misc_feature (1)..(418): Homolog of NCBI NO: 33304380 NR Description: metacaspase 7 [Arabidopsis thaliana]
  misc_feature (1)..(418): Homolog of NCBI NO: 15219342 NR Description: hypothetical protein common family; protein id:
  misc_feature (8)..(418): Homolog of NCBI NO: 23343885 NR Description: metacaspase 1 [Lycopersicon esculentum]
  misc_feature (1)..(418): Homolog of NCBI NO: 4235430 NR Description: latex-abundant protein [Hevea brasiliensis]
  misc_feature (1)..(418): Homolog of NCBI NO: 40644374 NR Description: metacaspase type II [Picea abies]
  misc_feature (185)..(418): Homolog of NCBI NO: 15219340 NR Description: hypothetical protein common family; protein id:
  misc_feature (1)..(166): Homolog of NCBI NO: 15219340 NR Description: hypothetical protein common family; protein id:
  misc_feature (3)..(418): Homolog of NCBI NO: 34908928 NR Description: putative latex-abundant protein [Oryza sativa
  misc_feature (1)..(418): Homolog of NCBI NO: 32482818 NR Description: metacaspase 4 [Arabidopsis thaliana]

SEQ ID NO: 88954 - protein, 390 aa, Arabidopsis thaliana; identical to SEQ ID NO: 41314
  peptide (1)..(390): Ceres Seq. ID no. 12714385
  misc_feature (1)..(390): Pfam Name: Caspase domain Pfam Description: Caspase domain
  misc_feature (1)..(390): Homolog of NCBI NO: 15219345 NR Description: hypothetical protein common family; protein id: supported by cDNA: gi_19347868 [Arabidopsis thaliana]
  misc_feature (1)..(390): Homolog of NCBI NO: 33304380 NR Description: metacaspase 7 [Arabidopsis thaliana]
  misc_feature (1)..(390): Homolog of NCBI NO: 15219342 NR Description: hypothetical protein common family; protein id:
  misc_feature (1)..(390): Homolog of NCBI NO: 23343885 NR Description: metacaspase 1 [Lycopersicon esculentum]
  misc_feature (1)..(390): Homolog of NCBI NO: 4235430 NR Description: latex-abundant protein [Hevea brasiliensis]
  misc_feature (1)..(390): Homolog of NCBI NO: 40644374 NR Description: metacaspase type II [Picea abies]
  misc_feature (157)..(390): Homolog of NCBI NO: 15219340 NR Description: hypothetical protein common family; protein id:
  misc_feature (1)..(138): Homolog of NCBI NO: 15219340 NR Description: hypothetical protein common family; protein id:
  misc_feature (1)..(390): Homolog of NCBI NO: 34908928 NR Description: putative latex-abundant protein [Oryza sativa
  misc_feature (1)..(390): Homolog of NCBI NO: 32482818 NR Description: metacaspase 4 [Arabidopsis thaliana]

SEQ ID NO: 88955 - protein, 308 aa, Arabidopsis thaliana
  peptide (1)..(308): Ceres Seq. ID no. 12714386
  misc_feature (1)..(308): Pfam Name: Caspase domain Pfam Description: Caspase domain
  misc_feature (1)..(308): Homolog of NCBI NO: 15219345 NR Description: hypothetical protein common family; protein id: supported by cDNA: gi_19347868 [Arabidopsis thaliana]
  misc_feature (1)..(308): Homolog of NCBI NO: 33304380 NR Description: metacaspase 7 [Arabidopsis thaliana]
  misc_feature (1)..(308): Homolog of NCBI NO: 15219342 NR Description: hypothetical protein common family; protein id:
  misc_feature (1)..(308): Homolog of NCBI NO: 23343885 NR Description: metacaspase 1 [Lycopersicon esculentum]
  misc_feature (1)..(308): Homolog of NCBI NO: 4235430 NR Description: latex-abundant protein [Hevea brasiliensis]
  misc_feature (1)..(308): Homolog of NCBI NO: 40644374 NR Description: metacaspase type II [Picea abies]
  misc_feature (75)..(308): Homolog of NCBI NO: 15219340 NR Description: hypothetical protein common family; protein id:
  misc_feature (1)..(56): Homolog of NCBI NO: 15219340 NR Description: hypothetical protein common family; protein id:
  misc_feature (1)..(308): Homolog of NCBI NO: 34908928 NR Description: putative latex-abundant protein [Oryza sativa
  misc_feature (1)..(308): Homolog of NCBI NO: 32482818 NR Description: metacaspase 4 [Arabidopsis thaliana]
MNLITDDDFRDLVDKVPPGCRMTIISDSCHSGGLIDEAKEQIGESTKKEAEDEDESEESSSRFGFRKFLRSKVEGAIESRGFHIGGNKKDEDEAEEIETKEIELEDGETIHAKDKSLPLQTLIDILKQQTGNDNIEVGKIRPSLFDAFGDDSSPKVKKFMKVILGKLQAGNGEEGGLMGMLGKLASGFLEGKLNDEDYVKPAMQTHVGSKEEVYAGGSRGSVPLPDSGILISGCQTDQTSADATPAGKPTEAYGAMSNSIQTILEETDGEISNREMVTRARKALKKQGFTQQPGLYCHDGYANAPFIC

SEQ ID NO: 88956 - DNA, 1599 bp, Arabidopsis thaliana
  misc_feature (1)..(1599): Ceres Seq. ID no. 12714405
  misc_feature: MA Experiment ID: 108434 Result: Up-regulated in Transcription
  misc_feature: MA Experiment 108434 PARAMETER Experiment Name: At_Root_Tips_cDNA_P Parameter: Tissue Value: Root Tips
  misc_feature: MA Experiment ID: 108435 Result: Up-regulated in Transcription
  misc_feature: MA Experiment 108435 PARAMETER Experiment Name: At_stm_Mutants_cDNA_P Parameter: Plant Line Value: wt Landsburg vs stm
  misc_feature: MA Experiment 108435 PARAMETER Experiment Name: At_stm_Mutants_cDNA_P Parameter: Tissue Value: Shoot Apical Meristem Region
  misc_feature: MA Experiment ID: 20000184 Result: Up-regulated in Transcription
  misc_feature: MA Experiment 20000184 PARAMETER Experiment Name: At_Shoots__P Parameter: Age (day) Value: 7
  misc_feature: MA Experiment 20000184 PARAMETER Experiment Name: At_Shoots__P Parameter: Tissue Value: Shoots vs. Whole Plant
  misc_feature: MA Experiment ID: 20000185 Result: Up-regulated in Transcription
  misc_feature: MA Experiment 20000185 PARAMETER Experiment Name: At_Roots__P Parameter: Age (day) Value: 7 vs. 21
  misc_feature: MA Experiment 20000185 PARAMETER Experiment Name: At_Roots__P Parameter: Organism Value: A. thaliana
  misc_feature: MA Experiment 20000185 PARAMETER Experiment Name: At_Roots__P Parameter: Tissue Value: Roots vs. Whole Plant
  misc_feature: MA Experiment ID: 20000234 Result: Up-regulated in Transcription
  misc_feature: MA Experiment 20000234 PARAMETER Experiment Name: At_Siliques_P Parameter: Age (day) Value: 21
  misc_feature: MA Experiment 20000234 PARAMETER Experiment Name: At_Siliques_P Parameter: Organism Value: A. thaliana
  misc_feature: MA Experiment 20000234 PARAMETER Experiment Name: At_Siliques_P Parameter: Plant Line Value: WS
  misc_feature: MA Experiment 20000234 PARAMETER Experiment Name: At_Siliques_P Parameter: Tissue Value: Less Than 5mm Siliques vs. Whole Plant
  misc_feature: MA Experiment ID: 20000235 Result: Up-regulated in Transcription
  misc_feature: MA Experiment 20000235 PARAMETER Experiment Name: At_Siliques_P Parameter: Age (day) Value: 21
  misc_feature: MA Experiment 20000235 PARAMETER Experiment Name: At_Siliques_P Parameter: Organism Value: A. thaliana
  misc_feature: MA Experiment 20000235 PARAMETER Experiment Name: At_Siliques_P Parameter: Plant Line Value: WS
  misc_feature: MA Experiment 20000235 PARAMETER Experiment Name: At_Siliques_P Parameter: Tissue Value: 5-10mm Siliques vs. Whole Plant
  misc_feature: MA Experiment ID: 20000264 Result: Up-regulated in Transcription
  misc_feature: MA Experiment 20000264 PARAMETER Experiment Name: At_Open_Flower_P Parameter: Age (day) Value: 21
  misc_feature: MA Experiment 20000264 PARAMETER Experiment Name: At_Open_Flower_P Parameter: Plant Line Value: WS
  misc_feature: MA Experiment 20000264 PARAMETER Experiment Name: At_Open_Flower_P Parameter: Tissue Value: Open Flower vs. Whole Plant
  misc_feature: MA Experiment ID: 20000265 Result: Up-regulated in Transcription
  misc_feature: MA Experiment 20000265 PARAMETER Experiment Name: At_Open_Flower_P Parameter: Age (day) Value: 21
  misc_feature: MA Experiment 20000265 PARAMETER Experiment Name: At_Open_Flower_P Parameter: Plant Line Value: WS
  misc_feature: MA Experiment 20000265 PARAMETER Experiment Name: At_Open_Flower_P Parameter: Tissue Value: Closed Flower vs. Whole Plant
  misc_feature: MA Experiment ID: 20000286 Result: Up-regulated in Transcription
  misc_feature: MA Experiment 20000286 PARAMETER Experiment Name: At_Open_Flower_P Parameter: Age (day) Value: 21
  misc_feature: MA Experiment 20000286 PARAMETER Experiment Name: At_Open_Flower_P Parameter: Plant Line Value: WS
  misc_feature: MA Experiment 20000286 PARAMETER Experiment Name: At_Open_Flower_P Parameter: Tissue Value: Half Open vs. Whole Plant
  misc_feature: MA Experiment ID: 20000439 Result: Up-regulated in Transcription
  misc_feature: MA Experiment 20000439 PARAMETER Experiment Name: At_Roots__P Parameter: Age (day) Value: 14 vs. 21
  misc_feature: MA Experiment 20000439 PARAMETER Experiment Name: At_Roots__P Parameter: Organism Value: A. thaliana
  misc_feature: MA Experiment 20000439 PARAMETER Experiment Name: At_Roots__P Parameter: Tissue Value: Roots vs. Whole Plant
  misc_feature: MA Experiment ID: 20000495 Result: Up-regulated in Transcription
  misc_feature: MA Experiment 20000495 PARAMETER Experiment Name: At_Guard_Cells_P Parameter: Harvest Date Value: 8/2/2002
  misc_feature: MA Experiment 20000495 PARAMETER Experiment Name: At_Guard_Cells_P Parameter: Organism Value: A. thaliana
  misc_feature: MA Experiment 20000495 PARAMETER Experiment Name: At_Guard_Cells_P Parameter: Tissue Value: Guard Cells vs. Leaves
ataagccaagcaaagggggttttagggtttttgaccgcgagccagatctctttcttttgtttctcccacttccgaatcaatggccttctcttctctcctcagatctgccgcctcctacacggttgccgctcctcgccctgactttttctcgtcgccggcgtctgatcattctaaggtgttgtcaagtcttggatttagtcgcaacctgaagccatcaagattttcttctgggatatcttcatctctacaaaatggcaatgcaagaagtgtgcaacccatcaaggccacggctacagaagtgccatctgcagttcgaaggtcaagtagcagtggaaagacaaaggttgggatcaacggttttggtcggattggaaggttggtcctccgcattgcaacatcaagggatgatattgaggttgtagcagtgaatgacccattcattgatgccaagtacatggcttacatgttgaagtatgattctactcatggaaatttcaagggaagcatcaatgtcattgatgattctactttggagatcaatgggaagaaggtcaatgttgtcagcaagagagatccatctgagatcccatgggctgatcttggagctgattatgttgttgagtcttccggtgtattcaccaccctgtcaaaggctgcatcccatttgaagggcggtgccaagaaagttataatttctgccccttctgctgacgcacctatgtttgttgttggagtaaacgagcacacataccaaccaaacatggatatagtctccaatgcaagttgtaccaccaattgtcttgcccctcttgccaaggtggtgcatgaggaatttggtattcttgaaggcttgatgacaactgtccacgcaactacagctactcagaaaactgttgatgggccatcaatgaaggactggagaggaggtcggggcgctagtcaaaacatcattcctagctcaaccggcgccgcgaaggctgtaggtaaagttcttccagaactgaatgggaaacttacgggaatggccttccgtgtaccaacatcgaatgtttctgtggtggatttaacttgtcgacttgagaagggtgcctcttacgaagatgttaaggcagccattaagcatgcctcagaaggacctcttaaaggcattctcgggtacacagatgaagatgtcgtctccaatgatttcgtcggtgattcaaggtccagtatctttgacgccaatgctggtattggattgagcaagtcctttgtgaaacttgtctcttggtacgacaacgaatggggttacagcaaccgagttcttgaccttatagagcacatggctttggtagctgccagccactaaatacacacaccagttcttgcagaagcttgagtctttctgctttttgcgtaacctgctctacaaagccggtttggatttgttcggttcaattaggtgccactgtgctaggtgttttgaaatatttggcttgaatctcgagcctttactctatttttgttctgttccagtatcagcaaccatgatttggtccaaaagactgaaaaactgtgcgacttacatctatgaataaggggctaagctagttgtacttt

SEQ ID NO: 88957 - protein, 422 aa, Arabidopsis thaliana; identical to SEQ ID NO: 28404
  peptide (1)..(422): Ceres Seq. ID no. 12714406
  misc_feature (237)..(398): Pfam Name: Glyceraldehyde 3-phosphate dehydrogenase, Pfam Description: Glyceraldehyde 3-phosphate dehydrogenase,
  misc_feature (1)..(422): Homolog of NCBI NO: 15219406 NR Description: glyceraldehyde-3-phosphate dehydrogenase, protein id: At1g79530.1, supported by cDNA: gi_13194783
  misc_feature (1)..(421): Homolog of NCBI NO: 15219206 NR Description: putative glyceraldehyde-3-phosphate protein id: At1g16300.1, supported by cDNA: 94597. [Arabidopsis
  misc_feature (1)..(421): Homolog of NCBI NO: 21618027 NR Description: putative glyceraldehyde-3-phosphate dehydrogenase
  misc_feature (1)..(421): Homolog of NCBI NO: 27754473 NR Description: putative glyceraldehyde-3-phosphate dehydrogenase
  misc_feature (1)..(421): Homolog of NCBI NO: 25284351 NR Description: hypothetical protein F3O9.10 - Arabidopsis
  misc_feature (1)..(421): Homolog of NCBI NO: 18072805 NR Description: glyceraldehyde-3-phosphate dehydrogenase
  misc_feature (1)..(420): Homolog of NCBI NO: 2129471 NR Description: glyceraldehyde-3-phosphate dehydrogenase
  misc_feature (1)..(420): Homolog of NCBI NO: 2129472 NR Description: glyceraldehyde-3-phosphate dehydrogenase
  misc_feature (60)..(420): Homolog of NCBI NO: 3059140 NR Description: NAD-dependent glyceraldehyde-3-phosphate
  misc_feature (67)..(422): Homolog of NCBI NO: 3059122 NR Description: glyeraldehyde-3-phosphate dehydrogenase [Marsilea

SEQ ID NO: 88958 - protein, 297 aa, Arabidopsis thaliana; identical to SEQ ID NO: 28405
  peptide (1)..(297): Ceres Seq. ID no. 12714407
  misc_feature (112)..(273): Pfam Name: Glyceraldehyde 3-phosphate dehydrogenase, Pfam Description: Glyceraldehyde 3-phosphate dehydrogenase,
  misc_feature (1)..(297): Homolog of NCBI NO: 15219406 NR Description: glyceraldehyde-3-phosphate dehydrogenase, protein id: At1g79530.1, supported by cDNA: gi_13194783
  misc_feature (1)..(296): Homolog of NCBI NO: 15219206 NR Description: putative glyceraldehyde-3-phosphate protein id: At1g16300.1, supported by cDNA: 94597. [Arabidopsis
  misc_feature (1)..(296): Homolog of NCBI NO: 21618027 NR Description: putative glyceraldehyde-3-phosphate dehydrogenase
  misc_feature (1)..(296): Homolog of NCBI NO: 27754473 NR Description: putative glyceraldehyde-3-phosphate dehydrogenase
  misc_feature (1)..(296): Homolog of NCBI NO: 25284351 NR Description: hypothetical protein F3O9.10 - Arabidopsis
  misc_feature (1)..(296): Homolog of NCBI NO: 18072805 NR Description: glyceraldehyde-3-phosphate dehydrogenase
  misc_feature (1)..(295): Homolog of NCBI NO: 2129471 NR Description: glyceraldehyde-3-phosphate dehydrogenase
  misc_feature (1)..(295): Homolog of NCBI NO: 2129472 NR Description: glyceraldehyde-3-phosphate dehydrogenase
  misc_feature (1)..(295): Homolog of NCBI NO: 3059140 NR Description: NAD-dependent glyceraldehyde-3-phosphate
  misc_feature (1)..(297): Homolog of NCBI NO: 3059122 NR Description: glyeraldehyde-3-phosphate dehydrogenase [Marsilea

SEQ ID NO: 88959 - protein, 294 aa, Arabidopsis thaliana; identical to SEQ ID NO: 28406
  peptide (1)..(294): Ceres Seq. ID no. 12714408
  misc_feature (109)..(270): Pfam Name: Glyceraldehyde 3-phosphate dehydrogenase, Pfam Description: Glyceraldehyde 3-phosphate dehydrogenase,
  misc_feature (1)..(294): Homolog of NCBI NO: 15219406 NR Description: glyceraldehyde-3-phosphate dehydrogenase, protein id: At1g79530.1, supported by cDNA: gi_13194783
  misc_feature (1)..(293): Homolog of NCBI NO: 15219206 NR Description: putative glyceraldehyde-3-phosphate protein id: At1g16300.1, supported by cDNA: 94597. [Arabidopsis
  misc_feature (1)..(293): Homolog of NCBI NO: 21618027 NR Description: putative glyceraldehyde-3-phosphate dehydrogenase
  misc_feature (1)..(293): Homolog of NCBI NO: 27754473 NR Description: putative glyceraldehyde-3-phosphate dehydrogenase
  misc_feature (1)..(293): Homolog of NCBI NO: 25284351 NR Description: hypothetical protein F3O9.10 - Arabidopsis
  misc_feature (1)..(293): Homolog of NCBI NO: 18072805 NR Description: glyceraldehyde-3-phosphate dehydrogenase
  misc_feature (1)..(292): Homolog of NCBI NO: 2129471 NR Description: glyceraldehyde-3-phosphate dehydrogenase
  misc_feature (1)..(292): Homolog of NCBI NO: 2129472 NR Description: glyceraldehyde-3-phosphate dehydrogenase
  misc_feature (1)..(292): Homolog of NCBI NO: 3059140 NR Description: NAD-dependent glyceraldehyde-3-phosphate
  misc_feature (1)..(294): Homolog of NCBI NO: 3059122 NR Description: glyeraldehyde-3-phosphate dehydrogenase [Marsilea

SEQ ID NO: 88960 - DNA, 1887 bp, Arabidopsis thaliana
  misc_feature (1)..(1887): Ceres Seq. ID no. 12714409
  misc_feature: MA Experiment ID: 20001451 Result: Down-regulated in Transcription
  misc_feature: MA Experiment 20001451 PARAMETER Experiment Name: At_Far-red-induction_P Parameter: Age (day) Value: 7
  misc_feature: MA Experiment 20001451 PARAMETER Experiment Name: At_Far-red-induction_P Parameter: Light Value: Far-red vs. White
  misc_feature: MA Experiment 20001451 PARAMETER Experiment Name: At_Far-red-induction_P Parameter: Organism Value: A. thaliana
  misc_feature: MA Experiment 20001451 PARAMETER Experiment Name: At_Far-red-induction_P Parameter: Plant Line Value: Columbia
  misc_feature: MA Experiment 20001451 PARAMETER Experiment Name: At_Far-red-induction_P Parameter: Timepoint (hr) Value: 24
  misc_feature: MA Experiment 20001451 PARAMETER Experiment Name: At_Far-red-induction_P Parameter: Tissue Value: Whole Plant
atgaaggagtttgattgcagacccgatgtgttcacgtacaacgtgatattgcgagtcatgatgcgagaggaggtcttctttatgctggcttttgctgtgtacaatgaaatgctcaagtgcaattgttccccaaatctatacacgtttggtatcttgatggatggattgtataagaaagggagaacgagtgatgcacagaagatgttcgacgatatgaccggtagaggaatttcgcctaacagagttacctataccattctcatttcaggtttgtgtcagaggggaagtgctgacgatgcacgaaagctattctacgagatgcaaacgagcggtaactatcctgattccgtcgcacacaatgctttgcttgatgggttttgtaaattgggtcggatggttgaagcatttgagctgttgcggctttttgagaaagatggttttgtgcttggtcttcgaggttatagcagtttaatcgatggattgttcagagctaggagatacactcaggcatttgagctgtatgcaaatatgctgaagaagaatattaaacctgacatcattttgtacacgatattgattcaagggttatctaaagccggtaagattgaggatgcattgaagctgttaagcagcatgccaagtaagggcattagcccagatacctactgttacaatgctgttataaaggctctatgtgggaggggacttttggaagagggtcggtccctccaactcgaaatgtcagaaacggaatccttccctgatgcgtgcacacacacaattcttatctgtagtatgtgcaggaatgggctggttagggaagctgaagaaatttttacggagattgagaagagtggttgttctccttcggttgctacgttcaatgctttaattgatggactgtgcaagtccggtgagctcaaggaagccaggttattgttgcataaaatggaggtcgggagacctgcttccttgtttcttaggctttcgcacagtggaaaccggagttttgacaccatggttgaatccggttcgattctcaaggcatacagggatcttgcacattttgctgataccgggagttcgccagacattgtttcttacaatgttcttataaatgggttctgcagagcaggagacattgacggtgctctcaagcttctcaatgtgcttcaactaaagggattatcccctgatagcgtcacttacaacactctcatcaatggacttcatagagtcggcagagaagaagaagcttttaaactcttttacgctaaagatgattttagacacagtcccgcggtttacagatcgctcatgacatggtcatgtcggaaaagaaaagtcttggtggcttttaatctatggatgaaataccttaagaagatatcttgtctggatgatgaaacagctaatgagattgaacaatgtttcaaggaaggggaaaccgagagagctttaagacgacttattgaattagataccagaaaagacgagttaactttagggccttacacgatatggcttatcgggttatgccaatcagggagatttcacgaggccttgatggtgttttcggttttaagggagaagaagatccttgtaacacctccgagctgtgtcaaactgattcatggactctgcaaaagagaacaacttgatgctgcaatagaggtgttcttatacactctagataacaacttcaagctgatgcctagagtttgcaactacctcctaagctccctcctggaatcaacagaaaagatggagattgtttcgcaacttacaaacagaatggaacgtgcagggtacaatgttgactcgatgcttcgattcgagattttgaaatatcatagacatagaaagcaggtgctgatagatctttag

SEQ ID NO: 88961 - protein, 628 aa, Arabidopsis thaliana
  peptide (1)..(628): Ceres Seq. ID no. 12714410
  misc_feature (11)..(46): Pfam Name: PPR repeat Pfam Description: PPR repeat
  misc_feature (1)..(493): Homolog of NCBI NO: 15231863 NR Description: putative protein; protein id: At3g53700.1, by cDNA: gi_15982930 [Arabidopsis thaliana]
  misc_feature (1)..(587): Homolog of NCBI NO: 33859440 NR Description: PPR protein [Oryza sativa (indica cultivar-group)]
  misc_feature (1)..(584): Homolog of NCBI NO: 37535708 NR Description: putative membrane-associated protein [Oryza
  misc_feature (1)..(584): Homolog of NCBI NO: 37535672 NR Description: putative chloroplast RNA processing protein
  misc_feature (8)..(410): Homolog of NCBI NO: 15235288 NR Description: membrane-associated salt-inducible-like protein; id: At4g20090.1 [Arabidopsis thaliana] >gi|7485730|pir||T04893
  misc_feature (17)..(493): Homolog of NCBI NO: 15218325 NR Description: hypothetical protein; protein id: At1g09900.1
  misc_feature (8)..(440): Homolog of NCBI NO: 15242446 NR Description: putative protein; protein id: At5g39710.1
  misc_feature (1)..(607): Homolog of NCBI NO: 15227371 NR Description: hypothetical protein; protein id: At2g17140.1
  misc_feature (1)..(428): Homolog of NCBI NO: 15221549 NR Description: PPR-repeat protein; protein id: At1g62670.1
  misc_feature (1)..(503): Homolog of NCBI NO: 30840221 NR Description: fertility restorer [Raphanus sativus]
MKEFDCRPDVFTYNVILRVMMREEVFFMLAFAVYNEMLKCNCSPNLYTFGILMDGLYKKGRTSDAQKMFDDMTGRGISPNRVTYTILISGLCQRGSADDARKLFYEMQTSGNYPDSVAHNALLDGFCKLGRMVEAFELLRLFEKDGFVLGLRGYSSLIDGLFRARRYTQAFELYANMLKKNIKPDIILYTILIQGLSKAGKIEDALKLLSSMPSKGISPDTYCYNAVIKALCGRGLLEEGRSLQLEMSETESFPDACTHTILICSMCRNGLVREAEEIFTEIEKSGCSPSVATFNALIDGLCKSGELKEARLLLHKMEVGRPASLFLRLSHSGNRSFDTMVESGSILKAYRDLAHFADTGSSPDIVSYNVLINGFCRAGDIDGALKLLNVLQLKGLSPDSVTYNTLINGLHRVGREEEAFKLFYAKDDFRHSPAVYRSLMTWSCRKRKVLVAFNLWMKYLKKISCLDDETANEIEQCFKEGETERALRRLIELDTRKDELTLGPYTIWLIGLCQSGRFHEALMVFSVLREKKILVTPPSCVKLIHGLCKREQLDAAIEVFLYTLDNNFKLMPRVCNYLLSSLLESTEKMEIVSQLTNRMERAGYNVDSMLRFEILKYHRHRKQVLIDL

SEQ ID NO: 88962 - protein, 609 aa, Arabidopsis thaliana
  peptide (1)..(609): Ceres Seq. ID no. 12714411
  misc_feature (1)..(27): Pfam Name: PPR repeat Pfam Description: PPR repeat
  misc_feature (1)..(474): Homolog of NCBI NO: 15231863 NR Description: putative protein; protein id: At3g53700.1, by cDNA: gi_15982930 [Arabidopsis thaliana]
  misc_feature (1)..(568): Homolog of NCBI NO: 33859440 NR Description: PPR protein [Oryza sativa (indica cultivar-group)]
  misc_feature (1)..(565): Homolog of NCBI NO: 37535708 NR Description: putative membrane-associated protein [Oryza
  misc_feature (1)..(565): Homolog of NCBI NO: 37535672 NR Description: putative chloroplast RNA processing protein
  misc_feature (1)..(391): Homolog of NCBI NO: 15235288 NR Description: membrane-associated salt-inducible-like protein; id: At4g20090.1 [Arabidopsis thaliana] >gi|7485730|pir||T04893
  misc_feature (1)..(474): Homolog of NCBI NO: 15218325 NR Description: hypothetical protein; protein id: At1g09900.1
  misc_feature (1)..(421): Homolog of NCBI NO: 15242446 NR Description: putative protein; protein id: At5g39710.1
  misc_feature (1)..(588): Homolog of NCBI NO: 15227371 NR Description: hypothetical protein; protein id: At2g17140.1
  misc_feature (1)..(409): Homolog of NCBI NO: 15221549 NR Description: PPR-repeat protein; protein id: At1g62670.1
  misc_feature (1)..(484): Homolog of NCBI NO: 30840221 NR Description: fertility restorer [Raphanus sativus]
MMREEVFFMLAFAVYNEMLKCNCSPNLYTFGILMDGLYKKGRTSDAQKMFDDMTGRGISPNRVTYTILISGLCQRGSADDARKLFYEMQTSGNYPDSVAHNALLDGFCKLGRMVEAFELLRLFEKDGFVLGLRGYSSLIDGLFRARRYTQAFELYANMLKKNIKPDIILYTILIQGLSKAGKIEDALKLLSSMPSKGISPDTYCYNAVIKALCGRGLLEEGRSLQLEMSETESFPDACTHTILICSMCRNGLVREAEEIFTEIEKSGCSPSVATFNALIDGLCKSGELKEARLLLHKMEVGRPASLFLRLSHSGNRSFDTMVESGSILKAYRDLAHFADTGSSPDIVSYNVLINGFCRAGDIDGALKLLNVLQLKGLSPDSVTYNTLINGLHRVGREEEAFKLFYAKDDFRHSPAVYRSLMTWSCRKRKVLVAFNLWMKYLKKISCLDDETANEIEQCFKEGETERALRRLIELDTRKDELTLGPYTIWLIGLCQSGRFHEALMVFSVLREKKILVTPPSCVKLIHGLCKREQLDAAIEVFLYTLDNNFKLMPRVCNYLLSSLLESTEKMEIVSQLTNRMERAGYNVDSMLRFEILKYHRHRKQVLIDL

SEQ ID NO: 88963 - protein, 608 aa, Arabidopsis thaliana
  peptide (1)..(608): Ceres Seq. ID no. 12714412
  misc_feature (1)..(26): Pfam Name: PPR repeat Pfam Description: PPR repeat
  misc_feature (1)..(473): Homolog of NCBI NO: 15231863 NR Description: putative protein; protein id: At3g53700.1, by cDNA: gi_15982930 [Arabidopsis thaliana]
  misc_feature (1)..(567): Homolog of NCBI NO: 33859440 NR Description: PPR protein [Oryza sativa (indica cultivar-group)]
  misc_feature (1)..(564): Homolog of NCBI NO: 37535708 NR Description: putative membrane-associated protein [Oryza
  misc_feature (1)..(564): Homolog of NCBI NO: 37535672 NR Description: putative chloroplast RNA processing protein
  misc_feature (1)..(390): Homolog of NCBI NO: 15235288 NR Description: membrane-associated salt-inducible-like protein; id: At4g20090.1 [Arabidopsis thaliana] >gi|7485730|pir||T04893
  misc_feature (1)..(473): Homolog of NCBI NO: 15218325 NR Description: hypothetical protein; protein id: At1g09900.1
  misc_feature (1)..(420): Homolog of NCBI NO: 15242446 NR Description: putative protein; protein id: At5g39710.1
  misc_feature (1)..(587): Homolog of NCBI NO: 15227371 NR Description: hypothetical protein; protein id: At2g17140.1
  misc_feature (1)..(408): Homolog of NCBI NO: 15221549 NR Description: PPR-repeat protein; protein id: At1g62670.1
  misc_feature (1)..(483): Homolog of NCBI NO: 30840221 NR Description: fertility restorer [Raphanus sativus]
MREEVFFMLAFAVYNEMLKCNCSPNLYTFGILMDGLYKKGRTSDAQKMFDDMTGRGISPNRVTYTILISGLCQRGSADDARKLFYEMQTSGNYPDSVAHNALLDGFCKLGRMVEAFELLRLFEKDGFVLGLRGYSSLIDGLFRARRYTQAFELYANMLKKNIKPDIILYTILIQGLSKAGKIEDALKLLSSMPSKGISPDTYCYNAVIKALCGRGLLEEGRSLQLEMSETESFPDACTHTILICSMCRNGLVREAEEIFTEIEKSGCSPSVATFNALIDGLCKSGELKEARLLLHKMEVGRPASLFLRLSHSGNRSFDTMVESGSILKAYRDLAHFADTGSSPDIVSYNVLINGFCRAGDIDGALKLLNVLQLKGLSPDSVTYNTLINGLHRVGREEEAFKLFYAKDDFRHSPAVYRSLMTWSCRKRKVLVAFNLWMKYLKKISCLDDETANEIEQCFKEGETERALRRLIELDTRKDELTLGPYTIWLIGLCQSGRFHEALMVFSVLREKKILVTPPSCVKLIHGLCKREQLDAAIEVFLYTLDNNFKLMPRVCNYLLSSLLESTEKMEIVSQLTNRMERAGYNVDSMLRFEILKYHRHRKQVLIDL

SEQ ID NO: 88964 - DNA, 4464 bp, Arabidopsis thaliana
  misc_feature (1)..(4464): Ceres Seq. ID no. 12714439
  misc_feature: MA Experiment ID: 20000347 Result: Up-regulated in Transcription
  misc_feature: MA Experiment 20000347 PARAMETER Experiment Name: At_2mM_SA_Sub_P Parameter: Age (day) Value: 14
  misc_feature: MA Experiment 20000347 PARAMETER Experiment Name: At_2mM_SA_Sub_P Parameter: Organism Value: A. thaliana
  misc_feature: MA Experiment 20000347 PARAMETER Experiment Name: At_2mM_SA_Sub_P Parameter: Plant Line Value: WS
  misc_feature: MA Experiment 20000347 PARAMETER Experiment Name: At_2mM_SA_Sub_P Parameter: Timepoint (hr) Value: 6
  misc_feature: MA Experiment 20000347 PARAMETER Experiment Name: At_2mM_SA_Sub_P Parameter: Tissue Value: Aerial
  misc_feature: MA Experiment 20000347 PARAMETER Experiment Name: At_2mM_SA_Sub_P Parameter: Treatment Value: 2mM SA vs. No Treatment
  misc_feature: MA Experiment ID: 20000355 Result: Down-regulated in Transcription
  misc_feature: MA Experiment 20000355 PARAMETER Experiment Name: At_Siliques_Sub_P Parameter: Age (day) Value: 21
  misc_feature: MA Experiment 20000355 PARAMETER Experiment Name: At_Siliques_Sub_P Parameter: Organism Value: A. thaliana
  misc_feature: MA Experiment 20000355 PARAMETER Experiment Name: At_Siliques_Sub_P Parameter: Plant Line Value: WS
  misc_feature: MA Experiment 20000355 PARAMETER Experiment Name: At_Siliques_Sub_P Parameter: Tissue Value: Less Than 5mm Siliques vs. Whole Plant
atgagctctaattgtagttgttctcttttgagtctcttctctctccttctgatcattgatctcaccgttgctagctcttgtcctaagacatgtggaggaatcgacatcccgtacccgtttggaatcggaacgggttgctatctcgagaaatggtacgagattatttgtgtcaacaactctgttccttttctttccatcattaacagggaagttgtgagtatctctttttcggatatgtatcgccggttctttaacgtaggctacgggtcaattcgcataagaaacccaatagcttcaaagggatgctcaagtggcggacaagagtttggatcacttttaaatatgacaggttaccctttttaccttggcgacaacaatatgctcatagcggttggctgcaacaacacggcgtcgttgacaaatgtcgagccaagtattgtgggatgcgagtctacttgcagcacaaatcaagatatacctataaatgattatctcggggtactctactgtaatgctaggtatggcgattccgagtattgtaaaaatatttccattatgaatgatacaagctgcaacggtattggatgctgcaaggcaagtttgcccgctaggtatcaacagattattggtgtggaaatagatgatagtaacacagaatccaagggatgcaaagttgccttcataacagacgaggaatactttttgtcaaatggatctgacccggagaggcttcatgctaatggatatgatacggttgacctaagatggttcatccatacggcgaatcattccttcataggctctctaggatgcaaaagtatagacgagtacacaattctaagaagagacaatcgtgaatacggaataggttgcctttgcgactataactctacaactacaggctatgcaacatgttcatgcgctagtggtttcgaaggcaacccatatattcctggcgaatgcaaagatattaatgaatgcgtaagaggcattgatggaaacccagtctgtacggcaggcaagtgtgtcaatttgctgggcggttatacgtgtgagtacacaaatcatcgaccacttgttatagggcttagcactagtttcagcacattggtattcattggtggaatatactggttatacaaatttattagaagacaaaggaggttaaaccaaaagaagaaattctttaagcgtaatgggggtttattgttgcaacaacaattgactacaactgaaggcaacgtggacagtacaagagtgttcaactcaagagagttggagaaagccaccgaaaactttagcttaaccagaatactaggcgaaggaggtcaaggtacagtgtacaagggaatgcttgtagacggtagaatagtagcagtaaagaagtccaaagtcgtagacgaagacaagctagaagagttcatcaacgaagtcgtcattctctcacaaatcaaccataggaacatcgtaaaactcttggggtgttgcctagagacagatgtccctattctagtctacgaattcattcctaatggtaacctttttgagcatcttcatgatgattccgatgattatacgatgactacttgggaagtgcgtcttcgtattgctgtagatattgcaggagcgctttcatatttgcactcggctgcatcatctccaatctatcacagagacatcaagtctacaaacataatgttagatgagaaacatcgagccaaagtgtccgattttggtacttcaagaacggtgaccgtggatcatacccacctcactacagtagtttcaggcacggtgggatatatggatccagagtatttccagtcgagccaattcacagacaaaagtgatgtttatagctttggagtcgtgctagcggagctaatcactggagaaaaatcagtctcttttctgcgatctcaggaatataggacattggcaacttatttcactcttgcaatgaaagagaacagactctccgacattattgatgctcgaataagagatggttgtaagttgaatcaagtgacagcagccgcaaaaattgcaaggaaatgtttgaatatgaagggaaggaaacgaccaagtatgagacaagtatcgatggaattggagaagattcgttcatattctgaagatatgcagccgtatgagtatgctagcgaaaacgaagaagaaaaaaaagaaacattagtggacgttaacgtagagtcgagaaactacgtgagtgttaccgccgcatcatctcaatacagcattgctacaacatcttcgtcgcgagactgttttctcaacgactggtacgaggttgtctgtaacagcaccacctccggtaaatccttagctccgttcctctataagatcaacagagaattagttagcatcactcttcgaagcagcatcgacagttcctacggagttgttcacattaaatctccggtgacttcctccggctgttctcaacgacccgtaaagcctcttcctttaaacctcaccggtaaaggaagtccctttttcatcaccgactcgaatcgtctcgtctcagttggttgtgacaacagagcattgattacagacatcgaatctcagatcacaggatgcgaatcgagctgcgacggagataagagtcgtttagacaagatctgcggtggttacacatgttgtcaggcgaagattccggcggatagaccgcaagtaatcggcgttgaccttgaaagctccggtggtaacacaactcaaggaggaaactgtaaagttgctttcttgacgaatgagacttactctccggcgaatgttacagagccggaacaattttatactaatgggtttacggtgattgagcttggttggtactttgatacatcagattctcggttaacgaatcctgtgggttgtgtgaatttgacggaaacagggatttacacgagcgcaccgagctgtgtttgtgagtatggtaacttctctggctttggttacagtaactgttactgcaatcagattggttacagagggaatccttatcttcctggtggatgcattgacattgacgaatgtgaggaaggaaaaggactaagcagctgtggagaactaacttgtgtgaatgttcctggatcgtggaggtgcgagctgaatggagtagggaagatcaagcctctgtttccaggtgaatcaatggagttcttttccagattccaaagtcatatcacagagcaaaaaagagtgatgatctttatagttttctttcgtccttgtgcaggtcttgttctaggttttccactgttgttcttggtacttgggatatggggattgatcaagttcgttaagaagagaaggaagattatccgaaagagaatgttctttaaacgtaatggaggcttgttgttgaaacaacagttaactacaagaggaggtaatgtgcagtcatcgaagatattcagttcgaaagagctggagaaagcgacggataacttcaatatgaacagggttcttgggcaaggaggtcaaggcactgtctacaaaggaatgttggtagatgggcgaattgttgctgtgaaaagatctaaagttttagatgaagataaagttgaggagtttatcaatgaagttggtgttctctcgcagattaaccatagaaatattgtcaaactcatggggtgttgtctcgagacagaggttcctatcttggtttatgaacatattccaaatggagacctattcaagcggcttcaccatgattctgatgattacactatgacttgggatgtgcgattgcgcatctctgttgagattgcaggagcacttgcttacttgcactcggctgcatcaactccggtctatcatagagatgtcaagaccacaaacatacttttggatgagaagtatagagccaaggtatcggatttcgggacctcgagatccataaacgtagatcaaactcacttgactactctagttgcaggtacttttggatacttggatccagagtactttcaaactagccagtttacggataaaagtgatgtttatagttttggggtcgtcttggttgagctcataactggagaaaagccgttttctgtaatgcggcccgaagaaaacagaggacttgtgtctcatttcaatgaggctatgaaacagaacagagttcttgatattgttgattctcggatcaaagaaggttgcacgttggaacaagtgttggctgtggcgaaacttgccagaaggtgtttaagtctaaaagggaagaaacgaccaaatatgagagaggtttcagttgagcttgagaggatccgttcatcacccgaagatttggagttacatattgaagaggaggacgaagaagaatgcgccatggaaatcaacatggatgattcttggagcgtcgacatgactgctccagcttccctctttgatttatcgcccaagttagacgttgaaccgctggttcctcaacgaacatggtga

SEQ ID NO: 88965 - protein, 1487 aa, Arabidopsis thaliana
  peptide (1)..(1487): Ceres Seq. ID no. 12714440
  misc_feature (1086)..(1487): Homolog of NCBI NO: 30699443 NR Description: WAK-like kinase (WLK) [Arabidopsis thaliana]
  misc_feature (846)..(1060): Homolog of NCBI NO: 30699443 NR Description: WAK-like kinase (WLK) [Arabidopsis thaliana]
  misc_feature (760)..(1042): Homolog of NCBI NO: 25518691 NR Description: hypothetical protein T24D18.19 - Arabidopsis >gi|6587815|gb|AAF18506.1|AC010924_19 Similar to gb|U44028 thaliana transcription factor CKC and contains a PF|00069
  misc_feature (1086)..(1362): Homolog of NCBI NO: 25518691 NR Description: hypothetical protein T24D18.19 - Arabidopsis >gi|6587815|gb|AAF18506.1|AC010924_19 Similar to gb|U44028 thaliana transcription factor CKC and contains a PF|00069
  misc_feature (8)..(153): Homolog of NCBI NO: 25518691 NR Description: hypothetical protein T24D18.19 - Arabidopsis >gi|6587815|gb|AAF18506.1|AC010924_19 Similar to gb|U44028 thaliana transcription factor CKC and contains a PF|00069
  misc_feature (361)..(432): Homolog of NCBI NO: 25518691 NR Description: hypothetical protein T24D18.19 - Arabidopsis >gi|6587815|gb|AAF18506.1|AC010924_19 Similar to gb|U44028 thaliana transcription factor CKC and contains a PF|00069
  misc_feature (190)..(258): Homolog of NCBI NO: 25518691 NR Description: hypothetical protein T24D18.19 - Arabidopsis >gi|6587815|gb|AAF18506.1|AC010924_19 Similar to gb|U44028 thaliana transcription factor CKC and contains a PF|00069
  misc_feature (1)..(759): Homolog of NCBI NO: 15222427 NR Description: WAK-like kinase (WLK); protein id: At1g69730.1
  misc_feature (760)..(873): Homolog of NCBI NO: 30699443 NR Description: WAK-like kinase (WLK) [Arabidopsis thaliana]
  misc_feature (1082)..(1487): Homolog of NCBI NO: 15219134 NR Description: WAK-like kinase (WLK); protein id: At1g16130.1
MSSNCSCSLLSLFSLLLIIDLTVASSCPKTCGGIDIPYPFGIGTGCYLEKWYEIICVNNSVPFLSIINREVVSISFSDMYRRFFNVGYGSIRIRNPIASKGCSSGGQEFGSLLNMTGYPFYLGDNNMLIAVGCNNTASLTNVEPSIVGCESTCSTNQDIPINDYLGVLYCNARYGDSEYCKNISIMNDTSCNGIGCCKASLPARYQQIIGVEIDDSNTESKGCKVAFITDEEYFLSNGSDPERLHANGYDTVDLRWFIHTANHSFIGSLGCKSIDEYTILRRDNREYGIGCLCDYNSTTTGYATCSCASGFEGNPYIPGECKDINECVRGIDGNPVCTAGKCVNLLGGYTCEYTNHRPLVIGLSTSFSTLVFIGGIYWLYKFIRRQRRLNQKKKFFKRNGGLLLQQQLTTTEGNVDSTRVFNSRELEKATENFSLTRILGEGGQGTVYKGMLVDGRIVAVKKSKVVDEDKLEEFINEVVILSQINHRNIVKLLGCCLETDVPILVYEFIPNGNLFEHLHDDSDDYTMTTWEVRLRIAVDIAGALSYLHSAASSPIYHRDIKSTNIMLDEKHRAKVSDFGTSRTVTVDHTHLTTVVSGTVGYMDPEYFQSSQFTDKSDVYSFGVVLAELITGEKSVSFLRSQEYRTLATYFTLAMKENRLSDIIDARIRDGCKLNQVTAAAKIARKCLNMKGRKRPSMRQVSMELEKIRSYSEDMQPYEYASENEEEKKETLVDVNVESRNYVSVTAASSQYSIATTSSSRDCFLNDWYEVVCNSTTSGKSLAPFLYKINRELVSITLRSSIDSSYGVVHIKSPVTSSGCSQRPVKPLPLNLTGKGSPFFITDSNRLVSVGCDNRALITDIESQITGCESSCDGDKSRLDKICGGYTCCQAKIPADRPQVIGVDLESSGGNTTQGGNCKVAFLTNETYSPANVTEPEQFYTNGFTVIELGWYFDTSDSRLTNPVGCVNLTETGIYTSAPSCVCEYGNFSGFGYSNCYCNQIGYRGNPYLPGGCIDIDECEEGKGLSSCGELTCVNVPGSWRCELNGVGKIKPLFPGESMEFFSRFQSHITEQKRVMIFIVFFRPCAGLVLGFPLLFLVLGIWGLIKFVKKRRKIIRKRMFFKRNGGLLLKQQLTTRGGNVQSSKIFSSKELEKATDNFNMNRVLGQGGQGTVYKGMLVDGRIVAVKRSKVLDEDKVEEFINEVGVLSQINHRNIVKLMGCCLETEVPILVYEHIPNGDLFKRLHHDSDDYTMTWDVRLRISVEIAGALAYLHSAASTPVYHRDVKTTNILLDEKYRAKVSDFGTSRSINVDQTHLTTLVAGTFGYLDPEYFQTSQFTDKSDVYSFGVVLVELITGEKPFSVMRPEENRGLVSHFNEAMKQNRVLDIVDSRIKEGCTLEQVLAVAKLARRCLSLKGKKRPNMREVSVELERIRSSPEDLELHIEEEDEEECAMEINMDDSWSVDMTAPASLFDLSPKLDVEPLVPQRTW

SEQ ID NO: 88966 - protein, 1409 aa, Arabidopsis thaliana
  peptide (1)..(1409): Ceres Seq. ID no. 12714441
  misc_feature (1008)..(1409): Homolog of NCBI NO: 30699443 NR Description: WAK-like kinase (WLK) [Arabidopsis thaliana]
  misc_feature (768)..(982): Homolog of NCBI NO: 30699443 NR Description: WAK-like kinase (WLK) [Arabidopsis thaliana]
  misc_feature (682)..(964): Homolog of NCBI NO: 25518691 NR Description: hypothetical protein T24D18.19 - Arabidopsis >gi|6587815|gb|AAF18506.1|AC010924_19 Similar to gb|U44028 thaliana transcription factor CKC and contains a PF|00069
  misc_feature (1008)..(1284): Homolog of NCBI NO: 25518691 NR Description: hypothetical protein T24D18.19 - Arabidopsis >gi|6587815|gb|AAF18506.1|AC010924_19 Similar to gb|U44028 thaliana transcription factor CKC and contains a PF|00069
  misc_feature (1)..(75): Homolog of NCBI NO: 25518691 NR Description: hypothetical protein T24D18.19 - Arabidopsis >gi|6587815|gb|AAF18506.1|AC010924_19 Similar to gb|U44028 thaliana transcription factor CKC and contains a PF|00069
  misc_feature (283)..(354): Homolog of NCBI NO: 25518691 NR Description: hypothetical protein T24D18.19 - Arabidopsis >gi|6587815|gb|AAF18506.1|AC010924_19 Similar to gb|U44028 thaliana transcription factor CKC and contains a PF|00069
  misc_feature (112)..(180): Homolog of NCBI NO: 25518691 NR Description: hypothetical protein T24D18.19 - Arabidopsis >gi|6587815|gb|AAF18506.1|AC010924_19 Similar to gb|U44028 thaliana transcription factor CKC and contains a PF|00069
  misc_feature (1)..(681): Homolog of NCBI NO: 15222427 NR Description: WAK-like kinase (WLK); protein id: At1g69730.1
  misc_feature (682)..(795): Homolog of NCBI NO: 30699443 NR Description: WAK-like kinase (WLK) [Arabidopsis thaliana]
  misc_feature (1004)..(1409): Homolog of NCBI NO: 15219134 NR Description: WAK-like kinase (WLK); protein id: At1g16130.1
MYRRFFNVGYGSIRIRNPIASKGCSSGGQEFGSLLNMTGYPFYLGDNNMLIAVGCNNTASLTNVEPSIVGCESTCSTNQDIPINDYLGVLYCNARYGDSEYCKNISIMNDTSCNGIGCCKASLPARYQQIIGVEIDDSNTESKGCKVAFITDEEYFLSNGSDPERLHANGYDTVDLRWFIHTANHSFIGSLGCKSIDEYTILRRDNREYGIGCLCDYNSTTTGYATCSCASGFEGNPYIPGECKDINECVRGIDGNPVCTAGKCVNLLGGYTCEYTNHRPLVIGLSTSFSTLVFIGGIYWLYKFIRRQRRLNQKKKFFKRNGGLLLQQQLTTTEGNVDSTRVFNSRELEKATENFSLTRILGEGGQGTVYKGMLVDGRIVAVKKSKVVDEDKLEEFINEVVILSQINHRNIVKLLGCCLETDVPILVYEFIPNGNLFEHLHDDSDDYTMTTWEVRLRIAVDIAGALSYLHSAASSPIYHRDIKSTNIMLDEKHRAKVSDFGTSRTVTVDHTHLTTVVSGTVGYMDPEYFQSSQFTDKSDVYSFGVVLAELITGEKSVSFLRSQEYRTLATYFTLAMKENRLSDIIDARIRDGCKLNQVTAAAKIARKCLNMKGRKRPSMRQVSMELEKIRSYSEDMQPYEYASENEEEKKETLVDVNVESRNYVSVTAASSQYSIATTSSSRDCFLNDWYEVVCNSTTSGKSLAPFLYKINRELVSITLRSSIDSSYGVVHIKSPVTSSGCSQRPVKPLPLNLTGKGSPFFITDSNRLVSVGCDNRALITDIESQITGCESSCDGDKSRLDKICGGYTCCQAKIPADRPQVIGVDLESSGGNTTQGGNCKVAFLTNETYSPANVTEPEQFYTNGFTVIELGWYFDTSDSRLTNPVGCVNLTETGIYTSAPSCVCEYGNFSGFGYSNCYCNQIGYRGNPYLPGGCIDIDECEEGKGLSSCGELTCVNVPGSWRCELNGVGKIKPLFPGESMEFFSRFQSHITEQKRVMIFIVFFRPCAGLVLGFPLLFLVLGIWGLIKFVKKRRKIIRKRMFFKRNGGLLLKQQLTTRGGNVQSSKIFSSKELEKATDNFNMNRVLGQGGQGTVYKGMLVDGRIVAVKRSKVLDEDKVEEFINEVGVLSQINHRNIVKLMGCCLETEVPILVYEHIPNGDLFKRLHHDSDDYTMTWDVRLRISVEIAGALAYLHSAASTPVYHRDVKTTNILLDEKYRAKVSDFGTSRSINVDQTHLTTLVAGTFGYLDPEYFQTSQFTDKSDVYSFGVVLVELITGEKPFSVMRPEENRGLVSHFNEAMKQNRVLDIVDSRIKEGCTLEQVLAVAKLARRCLSLKGKKRPNMREVSVELERIRSSPEDLELHIEEEDEEECAMEINMDDSWSVDMTAPASLFDLSPKLDVEPLVPQRTW

SEQ ID NO: 88967 - protein, 1373 aa, Arabidopsis thaliana
  peptide (1)..(1373): Ceres Seq. ID no. 12714442
  misc_feature (972)..(1373): Homolog of NCBI NO: 30699443 NR Description: WAK-like kinase (WLK) [Arabidopsis thaliana]
  misc_feature (732)..(946): Homolog of NCBI NO: 30699443 NR Description: WAK-like kinase (WLK) [Arabidopsis thaliana]
  misc_feature (646)..(928): Homolog of NCBI NO: 25518691 NR Description: hypothetical protein T24D18.19 - Arabidopsis >gi|6587815|gb|AAF18506.1|AC010924_19 Similar to gb|U44028 thaliana transcription factor CKC and contains a PF|00069
  misc_feature (972)..(1248): Homolog of NCBI NO: 25518691 NR Description: hypothetical protein T24D18.19 - Arabidopsis >gi|6587815|gb|AAF18506.1|AC010924_19 Similar to gb|U44028 thaliana transcription factor CKC and contains a PF|00069
  misc_feature (1)..(39): Homolog of NCBI NO: 25518691 NR Description: hypothetical protein T24D18.19 - Arabidopsis >gi|6587815|gb|AAF18506.1|AC010924_19 Similar to gb|U44028 thaliana transcription factor CKC and contains a PF|00069
  misc_feature (247)..(318): Homolog of NCBI NO: 25518691 NR Description: hypothetical protein T24D18.19 - Arabidopsis >gi|6587815|gb|AAF18506.1|AC010924_19 Similar to gb|U44028 thaliana transcription factor CKC and contains a PF|00069
  misc_feature (76)..(144): Homolog of NCBI NO: 25518691 NR Description: hypothetical protein T24D18.19 - Arabidopsis >gi|6587815|gb|AAF18506.1|AC010924_19 Similar to gb|U44028 thaliana transcription factor CKC and contains a PF|00069
  misc_feature (1)..(645): Homolog of NCBI NO: 15222427 NR Description: WAK-like kinase (WLK); protein id: At1g69730.1
  misc_feature (646)..(759): Homolog of NCBI NO: 30699443 NR Description: WAK-like kinase (WLK) [Arabidopsis thaliana]
  misc_feature (968)..(1373): Homolog of NCBI NO: 15219134 NR Description: WAK-like kinase (WLK); protein id: At1g16130.1
MTGYPFYLGDNNMLIAVGCNNTASLTNVEPSIVGCESTCSTNQDIPINDYLGVLYCNARYGDSEYCKNISIMNDTSCNGIGCCKASLPARYQQIIGVEIDDSNTESKGCKVAFITDEEYFLSNGSDPERLHANGYDTVDLRWFIHTANHSFIGSLGCKSIDEYTILRRDNREYGIGCLCDYNSTTTGYATCSCASGFEGNPYIPGECKDINECVRGIDGNPVCTAGKCVNLLGGYTCEYTNHRPLVIGLSTSFSTLVFIGGIYWLYKFIRRQRRLNQKKKFFKRNGGLLLQQQLTTTEGNVDSTRVFNSRELEKATENFSLTRILGEGGQGTVYKGMLVDGRIVAVKKSKVVDEDKLEEFINEVVILSQINHRNIVKLLGCCLETDVPILVYEFIPNGNLFEHLHDDSDDYTMTTWEVRLRIAVDIAGALSYLHSAASSPIYHRDIKSTNIMLDEKHRAKVSDFGTSRTVTVDHTHLTTVVSGTVGYMDPEYFQSSQFTDKSDVYSFGVVLAELITGEKSVSFLRSQEYRTLATYFTLAMKENRLSDIIDARIRDGCKLNQVTAAAKIARKCLNMKGRKRPSMRQVSMELEKIRSYSEDMQPYEYASENEEEKKETLVDVNVESRNYVSVTAASSQYSIATTSSSRDCFLNDWYEVVCNSTTSGKSLAPFLYKINRELVSITLRSSIDSSYGVVHIKSPVTSSGCSQRPVKPLPLNLTGKGSPFFITDSNRLVSVGCDNRALITDIESQITGCESSCDGDKSRLDKICGGYTCCQAKIPADRPQVIGVDLESSGGNTTQGGNCKVAFLTNETYSPANVTEPEQFYTNGFTVIELGWYFDTSDSRLTNPVGCVNLTETGIYTSAPSCVCEYGNFSGFGYSNCYCNQIGYRGNPYLPGGCIDIDECEEGKGLSSCGELTCVNVPGSWRCELNGVGKIKPLFPGESMEFFSRFQSHITEQKRVMIFIVFFRPCAGLVLGFPLLFLVLGIWGLIKFVKKRRKIIRKRMFFKRNGGLLLKQQLTTRGGNVQSSKIFSSKELEKATDNFNMNRVLGQGGQGTVYKGMLVDGRIVAVKRSKVLDEDKVEEFINEVGVLSQINHRNIVKLMGCCLETEVPILVYEHIPNGDLFKRLHHDSDDYTMTWDVRLRISVEIAGALAYLHSAASTPVYHRDVKTTNILLDEKYRAKVSDFGTSRSINVDQTHLTTLVAGTFGYLDPEYFQTSQFTDKSDVYSFGVVLVELITGEKPFSVMRPEENRGLVSHFNEAMKQNRVLDIVDSRIKEGCTLEQVLAVAKLARRCLSLKGKKRPNMREVSVELERIRSSPEDLELHIEEEDEEECAMEINMDDSWSVDMTAPASLFDLSPKLDVEPLVPQRTW

SEQ ID NO: 88968 - DNA, 933 bp, Arabidopsis thaliana
  misc_feature (1)..(933): Ceres Seq. ID no. 12714443
  misc_feature: MA Experiment ID: 20000173 Result: Down-regulated in Transcription
  misc_feature: MA Experiment 20000173 PARAMETER Experiment Name: At_42deg_Heat_P Parameter: Age (day) Value: 14
  misc_feature: MA Experiment 20000173 PARAMETER Experiment Name: At_42deg_Heat_P Parameter: Organism Value: A. thaliana
  misc_feature: MA Experiment 20000173 PARAMETER Experiment Name: At_42deg_Heat_P Parameter: Plant Line Value: WS
  misc_feature: MA Experiment 20000173 PARAMETER Experiment Name: At_42deg_Heat_P Parameter: Temperature (deg C) Value: 42 vs. 22
  misc_feature: MA Experiment 20000173 PARAMETER Experiment Name: At_42deg_Heat_P Parameter: Timepoint (hr) Value: 6
  misc_feature: MA Experiment 20000173 PARAMETER Experiment Name: At_42deg_Heat_P Parameter: Tissue Value: Aerial
  misc_feature: MA Experiment ID: 20000214 Result: Down-regulated in Transcription
  misc_feature: MA Experiment 20000214 PARAMETER Experiment Name: At_4deg_Cold_P Parameter: Timepoint (hr) Value: 6
  misc_feature: MA Experiment ID: 20000227 Result: Down-regulated in Transcription
  misc_feature: MA Experiment 20000227 PARAMETER Experiment Name: At_Root-Tips-vs-Tops_P Parameter: Tissue Value: Root Tips vs. Root Tops
  misc_feature: MA Experiment ID: 20000234 Result: Down-regulated in Transcription
  misc_feature: MA Experiment 20000234 PARAMETER Experiment Name: At_Siliques_P Parameter: Age (day) Value: 21
  misc_feature: MA Experiment 20000234 PARAMETER Experiment Name: At_Siliques_P Parameter: Organism Value: A. thaliana
  misc_feature: MA Experiment 20000234 PARAMETER Experiment Name: At_Siliques_P Parameter: Plant Line Value: WS
  misc_feature: MA Experiment 20000234 PARAMETER Experiment Name: At_Siliques_P Parameter: Tissue Value: Less Than 5mm Siliques vs. Whole Plant
  misc_feature: MA Experiment ID: 20000264 Result: Down-regulated in Transcription
  misc_feature: MA Experiment 20000264 PARAMETER Experiment Name: At_Open_Flower_P Parameter: Age (day) Value: 21
  misc_feature: MA Experiment 20000264 PARAMETER Experiment Name: At_Open_Flower_P Parameter: Plant Line Value: WS
  misc_feature: MA Experiment 20000264 PARAMETER Experiment Name: At_Open_Flower_P Parameter: Tissue Value: Open Flower vs. Whole Plant
  misc_feature: MA Experiment ID: 20000439 Result: Down-regulated in Transcription
  misc_feature: MA Experiment 20000439 PARAMETER Experiment Name: At_Roots__P Parameter: Age (day) Value: 14 vs. 21
  misc_feature: MA Experiment 20000439 PARAMETER Experiment Name: At_Roots__P Parameter: Organism Value: A. thaliana
  misc_feature: MA Experiment 20000439 PARAMETER Experiment Name: At_Roots__P Parameter: Tissue Value: Roots vs. Whole Plant
  misc_feature: MA Experiment ID: 20000441 Result: Up-regulated in Transcription
  misc_feature: MA Experiment 20000441 PARAMETER Experiment Name: At_1uM_BR-BRZ__P Parameter: Tissue Value: Shoot Apices
  misc_feature: MA Experiment 20000441 PARAMETER Experiment Name: At_1uM_BR-BRZ__P Parameter: Treatment Value: 1uM BR vs. No Treatment
  misc_feature: MA Experiment ID: 20000576 Result: Down-regulated in Transcription
  misc_feature: MA Experiment 20000576 PARAMETER Experiment Name: At_100uM_ABA_Mutants__P Parameter: Organism Value: A. thaliana
  misc_feature: MA Experiment 20000576 PARAMETER Experiment Name: At_100uM_ABA_Mutants__P Parameter: Plant Line Value: CS23
  misc_feature: MA Experiment 20000576 PARAMETER Experiment Name: At_100uM_ABA_Mutants__P Parameter: Timepoint (hr) Value: 6
  misc_feature: MA Experiment 20000576 PARAMETER Experiment Name: At_100uM_ABA_Mutants__P Parameter: Tissue Value: Whole Plant
  misc_feature: MA Experiment 20000576 PARAMETER Experiment Name: At_100uM_ABA_Mutants__P Parameter: Treatment Value: 1uM ABA vs. No Treatment
  misc_feature: MA Experiment ID: 20000606 Result: Up-regulated in Transcription
  misc_feature: MA Experiment 20000606 PARAMETER Experiment Name: At_CS8548_Mutant_P Parameter: Age (day) Value: 14
  misc_feature: MA Experiment 20000606 PARAMETER Experiment Name: At_CS8548_Mutant_P Parameter: Plant Line Value: CS8548 vs. wt
  misc_feature: MA Experiment 20000606 PARAMETER Experiment Name: At_CS8548_Mutant_P Parameter: Tissue Value: Whole Plant
  misc_feature: MA Experiment ID: 20000794 Result: Down-regulated in Transcription
  misc_feature: MA Experiment 20000794 PARAMETER Experiment Name: At_Petals_P Parameter: Age (day) Value: 23-25 days
  misc_feature: MA Experiment 20000794 PARAMETER Experiment Name: At_Petals_P Parameter: Plant Line Value: WS
  misc_feature: MA Experiment 20000794 PARAMETER Experiment Name: At_Petals_P Parameter: Tissue Value: Petals vs. Whole plant
  misc_feature: MA Experiment ID: 20001248 Result: Up-regulated in Transcription
  misc_feature: MA Experiment 20001248 PARAMETER Experiment Name: At_Far-red-induction_P Parameter: Age (day) Value: 7
  misc_feature: MA Experiment 20001248 PARAMETER Experiment Name: At_Far-red-induction_P Parameter: Light Value: Far-red vs. White
  misc_feature: MA Experiment 20001248 PARAMETER Experiment Name: At_Far-red-induction_P Parameter: Organism Value: A. thaliana
  misc_feature: MA Experiment 20001248 PARAMETER Experiment Name: At_Far-red-induction_P Parameter: Plant Line Value: Columbia
  misc_feature: MA Experiment 20001248 PARAMETER Experiment Name: At_Far-red-induction_P Parameter: Timepoint (hr) Value: 4
  misc_feature: MA Experiment 20001248 PARAMETER Experiment Name: At_Far-red-induction_P Parameter: Tissue Value: Whole Plant
  misc_feature: MA Experiment ID: 20001450 Result: Up-regulated in Transcription
  misc_feature: MA Experiment 20001450 PARAMETER Experiment Name: At_Far-red-induction_P Parameter: Age (day) Value: 7
  misc_feature: MA Experiment 20001450 PARAMETER Experiment Name: At_Far-red-induction_P Parameter: Light Value: Far-red vs. White
  misc_feature: MA Experiment 20001450 PARAMETER Experiment Name: At_Far-red-induction_P Parameter: Organism Value: A. thaliana
  misc_feature: MA Experiment 20001450 PARAMETER Experiment Name: At_Far-red-induction_P Parameter: Plant Line Value: Columbia
  misc_feature: MA Experiment 20001450 PARAMETER Experiment Name: At_Far-red-induction_P Parameter: Timepoint (hr) Value: 8
  misc_feature: MA Experiment 20001450 PARAMETER Experiment Name: At_Far-red-induction_P Parameter: Tissue Value: Whole Plant
  misc_feature: MA Experiment ID: 20001451 Result: Up-regulated in Transcription
  misc_feature: MA Experiment 20001451 PARAMETER Experiment Name: At_Far-red-induction_P Parameter: Age (day) Value: 7
  misc_feature: MA Experiment 20001451 PARAMETER Experiment Name: At_Far-red-induction_P Parameter: Light Value: Far-red vs. White
  misc_feature: MA Experiment 20001451 PARAMETER Experiment Name: At_Far-red-induction_P Parameter: Organism Value: A. thaliana
  misc_feature: MA Experiment 20001451 PARAMETER Experiment Name: At_Far-red-induction_P Parameter: Plant Line Value: Columbia
  misc_feature: MA Experiment 20001451 PARAMETER Experiment Name: At_Far-red-induction_P Parameter: Timepoint (hr) Value: 24
  misc_feature: MA Experiment 20001451 PARAMETER Experiment Name: At_Far-red-induction_P Parameter: Tissue Value: Whole Plant
  misc_feature: MA Experiment ID: 20001554 Result: Down-regulated in Transcription
  misc_feature: MA Experiment 20001554 PARAMETER Experiment Name: At_Drought_Soil_Dry_P Parameter: Age (day) Value: 21
  misc_feature: MA Experiment 20001554 PARAMETER Experiment Name: At_Drought_Soil_Dry_P Parameter: Organism Value: A. thaliana
  misc_feature: MA Experiment 20001554 PARAMETER Experiment Name: At_Drought_Soil_Dry_P Parameter: Plant Line Value: WS
  misc_feature: MA Experiment 20001554 PARAMETER Experiment Name: At_Drought_Soil_Dry_P Parameter: Post Timepoint (hr) Value: None
  misc_feature: MA Experiment 20001554 PARAMETER Experiment Name: At_Drought_Soil_Dry_P Parameter: Post-Treatment Value: None
  misc_feature: MA Experiment 20001554 PARAMETER Experiment Name: At_Drought_Soil_Dry_P Parameter: Timepoint (day) Value: 7
  misc_feature: MA Experiment 20001554 PARAMETER Experiment Name: At_Drought_Soil_Dry_P Parameter: Treatment Value: Drought vs. No Drought
  misc_feature: MA Experiment ID: 20001555 Result: Down-regulated in Transcription
  misc_feature: MA Experiment 20001555 PARAMETER Experiment Name: At_Drought_Soil_Dry_P Parameter: Age (day) Value: 24
  misc_feature: MA Experiment 20001555 PARAMETER Experiment Name: At_Drought_Soil_Dry_P Parameter: Organism Value: A. thaliana
  misc_feature: MA Experiment 20001555 PARAMETER Experiment Name: At_Drought_Soil_Dry_P Parameter: Plant Line Value: WS
  misc_feature: MA Experiment 20001555 PARAMETER Experiment Name: At_Drought_Soil_Dry_P Parameter: Post Timepoint (hr) Value: None
  misc_feature: MA Experiment 20001555 PARAMETER Experiment Name: At_Drought_Soil_Dry_P Parameter: Post-Treatment Value: None
  misc_feature: MA Experiment 20001555 PARAMETER Experiment Name: At_Drought_Soil_Dry_P Parameter: Timepoint (day) Value: 10
  misc_feature: MA Experiment 20001555 PARAMETER Experiment Name: At_Drought_Soil_Dry_P Parameter: Treatment Value: Drought vs. No Drought
  misc_feature: MA Experiment ID: 20001556 Result: Down-regulated in Transcription
  misc_feature: MA Experiment 20001556 PARAMETER Experiment Name: At_Drought_Soil_Dry_P Parameter: Age (day) Value: 26
  misc_feature: MA Experiment 20001556 PARAMETER Experiment Name: At_Drought_Soil_Dry_P Parameter: Organism Value: A. thaliana
  misc_feature: MA Experiment 20001556 PARAMETER Experiment Name: At_Drought_Soil_Dry_P Parameter: Plant Line Value: WS
  misc_feature: MA Experiment 20001556 PARAMETER Experiment Name: At_Drought_Soil_Dry_P Parameter: Post Timepoint (hr) Value: None
  misc_feature: MA Experiment 20001556 PARAMETER Experiment Name: At_Drought_Soil_Dry_P Parameter: Post-Treatment Value: None
  misc_feature: MA Experiment 20001556 PARAMETER Experiment Name: At_Drought_Soil_Dry_P Parameter: Timepoint (day) Value: 12
  misc_feature: MA Experiment 20001556 PARAMETER Experiment Name: At_Drought_Soil_Dry_P Parameter: Treatment Value: Drought vs. No Drought
  misc_feature: MA Experiment ID: 20001557 Result: Down-regulated in Transcription
  misc_feature: MA Experiment 20001557 PARAMETER Experiment Name: At_Drought_Soil_Dry_P Parameter: Age (day) Value: 27
  misc_feature: MA Experiment 20001557 PARAMETER Experiment Name: At_Drought_Soil_Dry_P Parameter: Organism Value: A. thaliana
  misc_feature: MA Experiment 20001557 PARAMETER Experiment Name: At_Drought_Soil_Dry_P Parameter: Plant Line Value: WS
  misc_feature: MA Experiment 20001557 PARAMETER Experiment Name: At_Drought_Soil_Dry_P Parameter: Post Timepoint (hr) Value: 3
  misc_feature: MA Experiment 20001557 PARAMETER Experiment Name: At_Drought_Soil_Dry_P Parameter: Post-Treatment Value: Re-Water vs. No Drought
  misc_feature: MA Experiment 20001557 PARAMETER Experiment Name: At_Drought_Soil_Dry_P Parameter: Timepoint (day) Value: 13
  misc_feature: MA Experiment 20001557 PARAMETER Experiment Name: At_Drought_Soil_Dry_P Parameter: Treatment Value: Drought vs. No Drought
  misc_feature: MA Experiment ID: 20001558 Result: Down-regulated in Transcription
  misc_feature: MA Experiment 20001558 PARAMETER Experiment Name: At_Drought_Soil_Dry_P Parameter: Age (day) Value: 27
  misc_feature: MA Experiment 20001558 PARAMETER Experiment Name: At_Drought_Soil_Dry_P Parameter: Organism Value: A. thaliana
  misc_feature: MA Experiment 20001558 PARAMETER Experiment Name: At_Drought_Soil_Dry_P Parameter: Plant Line Value: WS
  misc_feature: MA Experiment 20001558 PARAMETER Experiment Name: At_Drought_Soil_Dry_P Parameter: Post Timepoint (hr) Value: 6
  misc_feature: MA Experiment 20001558 PARAMETER Experiment Name: At_Drought_Soil_Dry_P Parameter: Post-Treatment Value: Re-Water vs. No Drought
  misc_feature: MA Experiment 20001558 PARAMETER Experiment Name: At_Drought_Soil_Dry_P Parameter: Timepoint (day) Value: 13
  misc_feature: MA Experiment 20001558 PARAMETER Experiment Name: At_Drought_Soil_Dry_P Parameter: Treatment Value: Drought vs. No Drought
  misc_feature: MA Experiment ID: 20001904 Result: Down-regulated in Transcription
  misc_feature: MA Experiment 20001904 PARAMETER Experiment Name: At_Drought_Reproduction_P Parameter: Age (day) Value: 37
  misc_feature: MA Experiment 20001904 PARAMETER Experiment Name: At_Drought_Reproduction_P Parameter: Organism Value: A. thaliana
  misc_feature: MA Experiment 20001904 PARAMETER Experiment Name: At_Drought_Reproduction_P Parameter: Plant Line Value: WS
  misc_feature: MA Experiment 20001904 PARAMETER Experiment Name: At_Drought_Reproduction_P Parameter: Timepoint (day) Value: 7
  misc_feature: MA Experiment 20001904 PARAMETER Experiment Name: At_Drought_Reproduction_P Parameter: Tissue Value: Rosettes
  misc_feature: MA Experiment 20001904 PARAMETER Experiment Name: At_Drought_Reproduction_P Parameter: Treatment Value: Drought vs. No Drought
  misc_feature: MA Experiment ID: 20001905 Result: Down-regulated in Transcription
  misc_feature: MA Experiment 20001905 PARAMETER Experiment Name: At_Drought_Reproduction_P Parameter: Age (day) Value: 40
  misc_feature: MA Experiment 20001905 PARAMETER Experiment Name: At_Drought_Reproduction_P Parameter: Organism Value: A. thaliana
  misc_feature: MA Experiment 20001905 PARAMETER Experiment Name: At_Drought_Reproduction_P Parameter: Plant Line Value: WS
  misc_feature: MA Experiment 20001905 PARAMETER Experiment Name: At_Drought_Reproduction_P Parameter: Timepoint (day) Value: 10
  misc_feature: MA Experiment 20001905 PARAMETER Experiment Name: At_Drought_Reproduction_P Parameter: Tissue Value: Rosettes
  misc_feature: MA Experiment 20001905 PARAMETER Experiment Name: At_Drought_Reproduction_P Parameter: Treatment Value: Drought vs. No Drought
  misc_feature: MA Experiment ID: 20001906 Result: Down-regulated in Transcription
  misc_feature: MA Experiment 20001906 PARAMETER Experiment Name: At_Drought_Reproduction_P Parameter: Age (day) Value: 35
  misc_feature: MA Experiment 20001906 PARAMETER Experiment Name: At_Drought_Reproduction_P Parameter: Organism Value: A. thaliana
  misc_feature: MA Experiment 20001906 PARAMETER Experiment Name: At_Drought_Reproduction_P Parameter: Plant Line Value: WS
  misc_feature: MA Experiment 20001906 PARAMETER Experiment Name: At_Drought_Reproduction_P Parameter: Timepoint (day) Value: 5
  misc_feature: MA Experiment 20001906 PARAMETER Experiment Name: At_Drought_Reproduction_P Parameter: Tissue Value: Siliques
  misc_feature: MA Experiment 20001906 PARAMETER Experiment Name: At_Drought_Reproduction_P Parameter: Treatment Value: Drought vs. No Drought
atggcaaaagtctctgggaggagcaagaaaacaatcgttgacgatgaaatcagcgataaaacagcgtctgcgtctgagtctgcgtccattgccttaacatccaaacgcaaacgtaagtcgccgcctcgaaacgctcctcttcaacgcagctccccttacagaggcgtcacaaggcatagatggactgggagatacgaagcgcatttgtgggataagaacagctggaacgatacacagaccaagaaaggacgtcaaggggcttacgacgaagaagaagcagcagcacgtgcctacgacttagcagcattgaagtactggggacgagacacactcttgaacttccctttgccgagttatgacgaagacgtcaaagaaatggaaggccaatccaaggaagagtatattggatcattgagaagaaaaagtagtggattttctcgcggtgtatcaaaatacagaggcgttgcaaggcatcaccataatgggagatgggaagctagaattggaagggtgtttggtaataaatatctatatcttggaacatacgccacgcaagaagaagcagcaatcgcctacgacatcgcggcaatagagtaccgtggacttaacgccgttaccaatttcgacgtcagccgttatctaaaccctaacgccgccgcggataaagccgattccgattctaagcccattcgaagccctagtcgcgagcccgaatcgtcggatgataacaaatctccgaaatcagaggaagtaatcgaaccatctacatcgccggaagtgattccaactcgccggagcttccccgacgatatccagacgtattttgggtgtcaagattccggcaagttagcgactgaggaagacgtaatattcgattgtttcaattcttatataaatcctggcttctataacgagtttgattatggaccttaa

SEQ ID NO: 88969 - protein, 310 aa, Arabidopsis thaliana
  peptide (1)..(310): Ceres Seq. ID no. 12714444
  misc_feature (50)..(120): Pfam Name: AP2 domain Pfam Description: AP2 domain
  misc_feature (1)..(310): Homolog of NCBI NO: 15219975 NR Description: ovule development protein, putative; protein id:
  misc_feature (1)..(310): Homolog of NCBI NO: 34221733 NR Description: putative AP2 domain transcription factor
  misc_feature (1)..(182): Homolog of NCBI NO: 26449695 NR Description: unknown protein [Arabidopsis thaliana]
  misc_feature (1)..(250): Homolog of NCBI NO: 25518475 NR Description: hypothetical protein T24D18.16 - Arabidopsis >gi|6587812|gb|AAF18503.1|AC010924_16 Similar to gb|U44028 factor CKC from Arabidopsis thaliana and contains two PF|00847
  misc_feature (1)..(250): Homolog of NCBI NO: 18394319 NR Description: ovule development protein, putative; protein id: supported by cDNA: gi_15028184 [Arabidopsis thaliana]
  misc_feature (48)..(260): Homolog of NCBI NO: 28201307 NR Description: putative ovule development protein antitegumenta
  misc_feature (1)..(252): Homolog of NCBI NO: 15223777 NR Description: ovule development protein, putative; protein id:
  misc_feature (1)..(252): Homolog of NCBI NO: 25405447 NR Description: hypothetical protein F11M15.6 [imported] - thaliana >gi|4836931|gb|AAD30633.1|AC006085_6 Hypothetical
  misc_feature (48)..(235): Homolog of NCBI NO: 15237965 NR Description: ovule development protein, putative; protein id: [Arabidopsis thaliana] >gi|11358596|pir||T51580 ovule development
  misc_feature (33)..(213): Homolog of NCBI NO: 20330778 NR Description: Putative ovule development protein antitegumenta
MAKVSGRSKKTIVDDEISDKTASASESASIALTSKRKRKSPPRNAPLQRSSPYRGVTRHRWTGRYEAHLWDKNSWNDTQTKKGRQGAYDEEEAAARAYDLAALKYWGRDTLLNFPLPSYDEDVKEMEGQSKEEYIGSLRRKSSGFSRGVSKYRGVARHHHNGRWEARIGRVFGNKYLYLGTYATQEEAAIAYDIAAIEYRGLNAVTNFDVSRYLNPNAAADKADSDSKPIRSPSREPESSDDNKSPKSEEVIEPSTSPEVIPTRRSFPDDIQTYFGCQDSGKLATEEDVIFDCFNSYINPGFYNEFDYGP

SEQ ID NO: 88970 - protein, 185 aa, Arabidopsis thaliana
  peptide (1)..(185): Ceres Seq. ID no. 12714445
  misc_feature (1)..(185): Homolog of NCBI NO: 15219975 NR Description: ovule development protein, putative; protein id:
  misc_feature (1)..(185): Homolog of NCBI NO: 34221733 NR Description: putative AP2 domain transcription factor
  misc_feature (1)..(57): Homolog of NCBI NO: 26449695 NR Description: unknown protein [Arabidopsis thaliana]
  misc_feature (1)..(125): Homolog of NCBI NO: 25518475 NR Description: hypothetical protein T24D18.16 - Arabidopsis >gi|6587812|gb|AAF18503.1|AC010924_16 Similar to gb|U44028 factor CKC from Arabidopsis thaliana and contains two PF|00847
  misc_feature (1)..(125): Homolog of NCBI NO: 18394319 NR Description: ovule development protein, putative; protein id: supported by cDNA: gi_15028184 [Arabidopsis thaliana]
  misc_feature (1)..(135): Homolog of NCBI NO: 28201307 NR Description: putative ovule development protein antitegumenta
  misc_feature (1)..(127): Homolog of NCBI NO: 15223777 NR Description: ovule development protein, putative; protein id:
  misc_feature (1)..(127): Homolog of NCBI NO: 25405447 NR Description: hypothetical protein F11M15.6 [imported] - thaliana >gi|4836931|gb|AAD30633.1|AC006085_6 Hypothetical
  misc_feature (1)..(110): Homolog of NCBI NO: 15237965 NR Description: ovule development protein, putative; protein id: [Arabidopsis thaliana] >gi|11358596|pir||T51580 ovule development
  misc_feature (1)..(88): Homolog of NCBI NO: 20330778 NR Description: Putative ovule development protein antitegumenta
MEGQSKEEYIGSLRRKSSGFSRGVSKYRGVARHHHNGRWEARIGRVFGNKYLYLGTYATQEEAAIAYDIAAIEYRGLNAVTNFDVSRYLNPNAAADKADSDSKPIRSPSREPESSDDNKSPKSEEVIEPSTSPEVIPTRRSFPDDIQTYFGCQDSGKLATEEDVIFDCFNSYINPGFYNEFDYGP

SEQ ID NO: 88971 - DNA, 1212 bp, Arabidopsis thaliana
  misc_feature (1)..(1212): Ceres Seq. ID no. 12714465
  misc_feature: MA Experiment ID: 20000171 Result: Up-regulated in Transcription
  misc_feature: MA Experiment 20000171 PARAMETER Experiment Name: At_42deg_Heat_P Parameter: Age (day) Value: 14
  misc_feature: MA Experiment 20000171 PARAMETER Experiment Name: At_42deg_Heat_P Parameter: Organism Value: A. thaliana
  misc_feature: MA Experiment 20000171 PARAMETER Experiment Name: At_42deg_Heat_P Parameter: Plant Line Value: WS
  misc_feature: MA Experiment 20000171 PARAMETER Experiment Name: At_42deg_Heat_P Parameter: Temperature (deg C) Value: 42 vs. 22
  misc_feature: MA Experiment 20000171 PARAMETER Experiment Name: At_42deg_Heat_P Parameter: Timepoint (hr) Value: 1
  misc_feature: MA Experiment 20000171 PARAMETER Experiment Name: At_42deg_Heat_P Parameter: Tissue Value: Aerial
  misc_feature: MA Experiment ID: 20000234 Result: Up-regulated in Transcription
  misc_feature: MA Experiment 20000234 PARAMETER Experiment Name: At_Siliques_P Parameter: Age (day) Value: 21
  misc_feature: MA Experiment 20000234 PARAMETER Experiment Name: At_Siliques_P Parameter: Organism Value: A. thaliana
  misc_feature: MA Experiment 20000234 PARAMETER Experiment Name: At_Siliques_P Parameter: Plant Line Value: WS
  misc_feature: MA Experiment 20000234 PARAMETER Experiment Name: At_Siliques_P Parameter: Tissue Value: Less Than 5mm Siliques vs. Whole Plant
  misc_feature: MA Experiment ID: 20000235 Result: Up-regulated in Transcription
  misc_feature: MA Experiment 20000235 PARAMETER Experiment Name: At_Siliques_P Parameter: Age (day) Value: 21
  misc_feature: MA Experiment 20000235 PARAMETER Experiment Name: At_Siliques_P Parameter: Organism Value: A. thaliana
  misc_feature: MA Experiment 20000235 PARAMETER Experiment Name: At_Siliques_P Parameter: Plant Line Value: WS
  misc_feature: MA Experiment 20000235 PARAMETER Experiment Name: At_Siliques_P Parameter: Tissue Value: 5-10mm Siliques vs. Whole Plant
  misc_feature: MA Experiment ID: 20000264 Result: Up-regulated in Transcription
  misc_feature: MA Experiment 20000264 PARAMETER Experiment Name: At_Open_Flower_P Parameter: Age (day) Value: 21
  misc_feature: MA Experiment 20000264 PARAMETER Experiment Name: At_Open_Flower_P Parameter: Plant Line Value: WS
  misc_feature: MA Experiment 20000264 PARAMETER Experiment Name: At_Open_Flower_P Parameter: Tissue Value: Open Flower vs. Whole Plant
  misc_feature: MA Experiment ID: 20000265 Result: Up-regulated in Transcription
  misc_feature: MA Experiment 20000265 PARAMETER Experiment Name: At_Open_Flower_P Parameter: Age (day) Value: 21
  misc_feature: MA Experiment 20000265 PARAMETER Experiment Name: At_Open_Flower_P Parameter: Plant Line Value: WS
  misc_feature: MA Experiment 20000265 PARAMETER Experiment Name: At_Open_Flower_P Parameter: Tissue Value: Closed Flower vs. Whole Plant
  misc_feature: MA Experiment ID: 20000286 Result: Up-regulated in Transcription
  misc_feature: MA Experiment 20000286 PARAMETER Experiment Name: At_Open_Flower_P Parameter: Age (day) Value: 21
  misc_feature: MA Experiment 20000286 PARAMETER Experiment Name: At_Open_Flower_P Parameter: Plant Line Value: WS
  misc_feature: MA Experiment 20000286 PARAMETER Experiment Name: At_Open_Flower_P Parameter: Tissue Value: Half Open vs. Whole Plant
  misc_feature: MA Experiment ID: 20000495 Result: Up-regulated in Transcription
  misc_feature: MA Experiment 20000495 PARAMETER Experiment Name: At_Guard_Cells_P Parameter: Harvest Date Value: 8/2/2002
  misc_feature: MA Experiment 20000495 PARAMETER Experiment Name: At_Guard_Cells_P Parameter: Organism Value: A. thaliana
  misc_feature: MA Experiment 20000495 PARAMETER Experiment Name: At_Guard_Cells_P Parameter: Tissue Value: Guard Cells vs. Leaves
  misc_feature: MA Experiment ID: 20001560 Result: Up-regulated in Transcription
  misc_feature: MA Experiment 20001560 PARAMETER Experiment Name: At_Drought_Soil_Dry_P Parameter: Age (day) Value: 28
  misc_feature: MA Experiment 20001560 PARAMETER Experiment Name: At_Drought_Soil_Dry_P Parameter: Organism Value: A. thaliana
  misc_feature: MA Experiment 20001560 PARAMETER Experiment Name: At_Drought_Soil_Dry_P Parameter: Plant Line Value: WS
  misc_feature: MA Experiment 20001560 PARAMETER Experiment Name: At_Drought_Soil_Dry_P Parameter: Post Timepoint (hr) Value: None
  misc_feature: MA Experiment 20001560 PARAMETER Experiment Name: At_Drought_Soil_Dry_P Parameter: Post-Treatment Value: None
  misc_feature: MA Experiment 20001560 PARAMETER Experiment Name: At_Drought_Soil_Dry_P Parameter: Timepoint (day) Value: 14
  misc_feature: MA Experiment 20001560 PARAMETER Experiment Name: At_Drought_Soil_Dry_P Parameter: Treatment Value: Drought vs. No Drought
atggatgaaggtcttgtggttagcacctgcttaggcggcgcctttattgggtctctgttcagtgggttggtagctgatggtgttgggcgccgtagagctttccagttgagcgctttaccaatgattgttggagcttctgtgagtgcatcaactgagagtcttatgggcatgctcctgggaaggtttttggtcggaattgggatgggcataggtccttctgttacagctctctatgtcactgaggtgtcacctgcttatgtgagaggtacatatgggagttctacccaaatcgcaacatgtattggactcttaggttcgctgtttgctggaatcccggcaaaagataacttgggctggtggcgcatatgtttttggatatccacagtcccagctgcaatgcttgctgtcttcatggaactctgcgtggaaagtcctcagtggctttttaagaggggaagggcagctgaagctgaagctgtgtttgagaagctattgggagggtcgtacgtcaaagctgctatggcagagttagtgaagtcggataggggagatgacgccgattcagccaaattgtcggagttgctttttggacgcagttttagagtggttttcattggatctaccctttttgctttacaacagttgtctgggataaatgctgtgttctatttctcatcaactgtcttcaagaaagctggtgtaccttcagcctctgcaaacatatgtgtaggagtttgcaacctcttaggatcaactgttgctgtggttttgatggataagctggggagaaaagtgttgcttattgggagttttgcgggcatggcagtatcgctgggtctccaagcaatagcatatacttcgcttccttcgccctttggaaccttgtttctctcggttggaggaatgctgctgtttgtgttgtcgtttgcaactggagcgggtcctgttccaagtcttctcctgtctgagatatgccctggtcgacttcgagcaactgcgttggctgtttgtcttgccgttcactgggttataaacttctttgtcgggctgctgtttctgagaatgctggagcaactaggttcggtgcttctaaatgcaatatttgggttcttctgtgtggtggcagtcatctttgtgcagaagaacgtggttgagactaaaggaaagagcctacaagagatagaaatcagtctgctctcttccacccagtga

SEQ ID NO: 88972 - protein, 403 aa, Arabidopsis thaliana
  peptide (1)..(403): Ceres Seq. ID no. 12714466
  misc_feature (3)..(398): Pfam Name: Sugar (and other) transporter Pfam Description: Sugar (and other) transporter
  misc_feature (3)..(403): Homolog of NCBI NO: 25308946 NR Description: probable sugar transporter, 77409-81599 - Arabidopsis thaliana >gi|12324590|gb|AAG52251.1|AC011717_19
  misc_feature (3)..(403): Homolog of NCBI NO: 30699453 NR Description: hexose transporter, putative [Arabidopsis >gi|30699455|ref|NP_178100.3| hexose transporter, putative
  misc_feature (3)..(403): Homolog of NCBI NO: 7715596 NR Description: F20B17.24 [Arabidopsis thaliana]
  misc_feature (41)..(403): Homolog of NCBI NO: 19347894 NR Description: putative hexose transporter protein [Arabidopsis
  misc_feature (3)..(399): Homolog of NCBI NO: 27261731 NR Description: sugar transporter [Citrus unshiu]
  misc_feature (3)..(400): Homolog of NCBI NO: 15220399 NR Description: integral membrane protein, putative; protein id:
  misc_feature (3)..(204): Homolog of NCBI NO: 30793849 NR Description: putative hexose transporter protein [Arabidopsis >gi|30794114|gb|AAP40499.1| putative hexose transporter protein
  misc_feature (3)..(398): Homolog of NCBI NO: 8347246 NR Description: hexose transporter [Solanum tuberosum]
  misc_feature (3)..(398): Homolog of NCBI NO: 8347248 NR Description: hexose transporter [Zea mays]
  misc_feature (3)..(400): Homolog of NCBI NO: 18417892 NR Description: sugar transporter-like protein; protein id: supported by cDNA: gi_16648752, supported by cDNA: gi_20259505 thaliana] >gi|16648753|gb|AAL25568.1| AT5g16150/T21H19_70
MDEGLVVSTCLGGAFIGSLFSGLVADGVGRRRAFQLSALPMIVGASVSASTESLMGMLLGRFLVGIGMGIGPSVTALYVTEVSPAYVRGTYGSSTQIATCIGLLGSLFAGIPAKDNLGWWRICFWISTVPAAMLAVFMELCVESPQWLFKRGRAAEAEAVFEKLLGGSYVKAAMAELVKSDRGDDADSAKLSELLFGRSFRVVFIGSTLFALQQLSGINAVFYFSSTVFKKAGVPSASANICVGVCNLLGSTVAVVLMDKLGRKVLLIGSFAGMAVSLGLQAIAYTSLPSPFGTLFLSVGGMLLFVLSFATGAGPVPSLLLSEICPGRLRATALAVCLAVHWVINFFVGLLFLRMLEQLGSVLLNAIFGFFCVVAVIFVQKNVVETKGKSLQEIEISLLSSTQ

SEQ ID NO: 88973 - protein, 363 aa, Arabidopsis thaliana
  peptide (1)..(363): Ceres Seq. ID no. 12714467
  misc_feature (1)..(358): Pfam Name: Sugar (and other) transporter Pfam Description: Sugar (and other) transporter
  misc_feature (1)..(363): Homolog of NCBI NO: 25308946 NR Description: probable sugar transporter, 77409-81599 - Arabidopsis thaliana >gi|12324590|gb|AAG52251.1|AC011717_19
  misc_feature (1)..(363): Homolog of NCBI NO: 30699453 NR Description: hexose transporter, putative [Arabidopsis >gi|30699455|ref|NP_178100.3| hexose transporter, putative
  misc_feature (1)..(363): Homolog of NCBI NO: 7715596 NR Description: F20B17.24 [Arabidopsis thaliana]
  misc_feature (1)..(363): Homolog of NCBI NO: 19347894 NR Description: putative hexose transporter protein [Arabidopsis
  misc_feature (1)..(359): Homolog of NCBI NO: 27261731 NR Description: sugar transporter [Citrus unshiu]
  misc_feature (1)..(360): Homolog of NCBI NO: 15220399 NR Description: integral membrane protein, putative; protein id:
  misc_feature (1)..(164): Homolog of NCBI NO: 30793849 NR Description: putative hexose transporter protein [Arabidopsis >gi|30794114|gb|AAP40499.1| putative hexose transporter protein
  misc_feature (1)..(358): Homolog of NCBI NO: 8347246 NR Description: hexose transporter [Solanum tuberosum]
  misc_feature (1)..(358): Homolog of NCBI NO: 8347248 NR Description: hexose transporter [Zea mays]
  misc_feature (1)..(360): Homolog of NCBI NO: 18417892 NR Description: sugar transporter-like protein; protein id: supported by cDNA: gi_16648752, supported by cDNA: gi_20259505 thaliana] >gi|16648753|gb|AAL25568.1| AT5g16150/T21H19_70
MIVGASVSASTESLMGMLLGRFLVGIGMGIGPSVTALYVTEVSPAYVRGTYGSSTQIATCIGLLGSLFAGIPAKDNLGWWRICFWISTVPAAMLAVFMELCVESPQWLFKRGRAAEAEAVFEKLLGGSYVKAAMAELVKSDRGDDADSAKLSELLFGRSFRVVFIGSTLFALQQLSGINAVFYFSSTVFKKAGVPSASANICVGVCNLLGSTVAVVLMDKLGRKVLLIGSFAGMAVSLGLQAIAYTSLPSPFGTLFLSVGGMLLFVLSFATGAGPVPSLLLSEICPGRLRATALAVCLAVHWVINFFVGLLFLRMLEQLGSVLLNAIFGFFCVVAVIFVQKNVVETKGKSLQEIEISLLSSTQ

SEQ ID NO: 88974 - protein, 349 aa, Arabidopsis thaliana
  peptide (1)..(349): Ceres Seq. ID no. 12714468
  misc_feature (1)..(344): Pfam Name: Sugar (and other) transporter Pfam Description: Sugar (and other) transporter
  misc_feature (1)..(349): Homolog of NCBI NO: 25308946 NR Description: probable sugar transporter, 77409-81599 - Arabidopsis thaliana >gi|12324590|gb|AAG52251.1|AC011717_19
  misc_feature (1)..(349): Homolog of NCBI NO: 30699453 NR Description: hexose transporter, putative [Arabidopsis >gi|30699455|ref|NP_178100.3| hexose transporter, putative
  misc_feature (1)..(349): Homolog of NCBI NO: 7715596 NR Description: F20B17.24 [Arabidopsis thaliana]
  misc_feature (1)..(349): Homolog of NCBI NO: 19347894 NR Description: putative hexose transporter protein [Arabidopsis
  misc_feature (1)..(345): Homolog of NCBI NO: 27261731 NR Description: sugar transporter [Citrus unshiu]
  misc_feature (1)..(346): Homolog of NCBI NO: 15220399 NR Description: integral membrane protein, putative; protein id:
  misc_feature (1)..(150): Homolog of NCBI NO: 30793849 NR Description: putative hexose transporter protein [Arabidopsis >gi|30794114|gb|AAP40499.1| putative hexose transporter protein
  misc_feature (1)..(344): Homolog of NCBI NO: 8347246 NR Description: hexose transporter [Solanum tuberosum]
  misc_feature (1)..(344): Homolog of NCBI NO: 8347248 NR Description: hexose transporter [Zea mays]
  misc_feature (1)..(346): Homolog of NCBI NO: 18417892 NR Description: sugar transporter-like protein; protein id: supported by cDNA: gi_16648752, supported by cDNA: gi_20259505 thaliana] >gi|16648753|gb|AAL25568.1| AT5g16150/T21H19_70
MGMLLGRFLVGIGMGIGPSVTALYVTEVSPAYVRGTYGSSTQIATCIGLLGSLFAGIPAKDNLGWWRICFWISTVPAAMLAVFMELCVESPQWLFKRGRAAEAEAVFEKLLGGSYVKAAMAELVKSDRGDDADSAKLSELLFGRSFRVVFIGSTLFALQQLSGINAVFYFSSTVFKKAGVPSASANICVGVCNLLGSTVAVVLMDKLGRKVLLIGSFAGMAVSLGLQAIAYTSLPSPFGTLFLSVGGMLLFVLSFATGAGPVPSLLLSEICPGRLRATALAVCLAVHWVINFFVGLLFLRMLEQLGSVLLNAIFGFFCVVAVIFVQKNVVETKGKSLQEIEISLLSSTQ

SEQ ID NO: 88975 - DNA, 2496 bp, Arabidopsis thaliana
  misc_feature (1)..(2496): Ceres Seq. ID no. 12714500
  misc_feature: MA Experiment ID: 20000171 Result: Up-regulated in Transcription
  misc_feature: MA Experiment 20000171 PARAMETER Experiment Name: At_42deg_Heat_P Parameter: Age (day) Value: 14
  misc_feature: MA Experiment 20000171 PARAMETER Experiment Name: At_42deg_Heat_P Parameter: Organism Value: A. thaliana
  misc_feature: MA Experiment 20000171 PARAMETER Experiment Name: At_42deg_Heat_P Parameter: Plant Line Value: WS
  misc_feature: MA Experiment 20000171 PARAMETER Experiment Name: At_42deg_Heat_P Parameter: Temperature (deg C) Value: 42 vs. 22
  misc_feature: MA Experiment 20000171 PARAMETER Experiment Name: At_42deg_Heat_P Parameter: Timepoint (hr) Value: 1
  misc_feature: MA Experiment 20000171 PARAMETER Experiment Name: At_42deg_Heat_P Parameter: Tissue Value: Aerial
  misc_feature: MA Experiment ID: 20000173 Result: Up-regulated in Transcription
  misc_feature: MA Experiment 20000173 PARAMETER Experiment Name: At_42deg_Heat_P Parameter: Age (day) Value: 14
  misc_feature: MA Experiment 20000173 PARAMETER Experiment Name: At_42deg_Heat_P Parameter: Organism Value: A. thaliana
  misc_feature: MA Experiment 20000173 PARAMETER Experiment Name: At_42deg_Heat_P Parameter: Plant Line Value: WS
  misc_feature: MA Experiment 20000173 PARAMETER Experiment Name: At_42deg_Heat_P Parameter: Temperature (deg C) Value: 42 vs. 22
  misc_feature: MA Experiment 20000173 PARAMETER Experiment Name: At_42deg_Heat_P Parameter: Timepoint (hr) Value: 6
  misc_feature: MA Experiment 20000173 PARAMETER Experiment Name: At_42deg_Heat_P Parameter: Tissue Value: Aerial
  misc_feature: MA Experiment ID: 20000495 Result: Down-regulated in Transcription
  misc_feature: MA Experiment 20000495 PARAMETER Experiment Name: At_Guard_Cells_P Parameter: Harvest Date Value: 8/2/2002
  misc_feature: MA Experiment 20000495 PARAMETER Experiment Name: At_Guard_Cells_P Parameter: Organism Value: A. thaliana
  misc_feature: MA Experiment 20000495 PARAMETER Experiment Name: At_Guard_Cells_P Parameter: Tissue Value: Guard Cells vs. Leaves
  misc_feature: MA Experiment ID: 20001451 Result: Down-regulated in Transcription
  misc_feature: MA Experiment 20001451 PARAMETER Experiment Name: At_Far-red-induction_P Parameter: Age (day) Value: 7
  misc_feature: MA Experiment 20001451 PARAMETER Experiment Name: At_Far-red-induction_P Parameter: Light Value: Far-red vs. White
  misc_feature: MA Experiment 20001451 PARAMETER Experiment Name: At_Far-red-induction_P Parameter: Organism Value: A. thaliana
  misc_feature: MA Experiment 20001451 PARAMETER Experiment Name: At_Far-red-induction_P Parameter: Plant Line Value: Columbia
  misc_feature: MA Experiment 20001451 PARAMETER Experiment Name: At_Far-red-induction_P Parameter: Timepoint (hr) Value: 24
  misc_feature: MA Experiment 20001451 PARAMETER Experiment Name: At_Far-red-induction_P Parameter: Tissue Value: Whole Plant
  misc_feature: MA Experiment ID: 20001557 Result: Up-regulated in Transcription
  misc_feature: MA Experiment 20001557 PARAMETER Experiment Name: At_Drought_Soil_Dry_P Parameter: Age (day) Value: 27
  misc_feature: MA Experiment 20001557 PARAMETER Experiment Name: At_Drought_Soil_Dry_P Parameter: Organism Value: A. thaliana
  misc_feature: MA Experiment 20001557 PARAMETER Experiment Name: At_Drought_Soil_Dry_P Parameter: Plant Line Value: WS
  misc_feature: MA Experiment 20001557 PARAMETER Experiment Name: At_Drought_Soil_Dry_P Parameter: Post Timepoint (hr) Value: 3
  misc_feature: MA Experiment 20001557 PARAMETER Experiment Name: At_Drought_Soil_Dry_P Parameter: Post-Treatment Value: Re-Water vs. No Drought
  misc_feature: MA Experiment 20001557 PARAMETER Experiment Name: At_Drought_Soil_Dry_P Parameter: Timepoint (day) Value: 13
  misc_feature: MA Experiment 20001557 PARAMETER Experiment Name: At_Drought_Soil_Dry_P Parameter: Treatment Value: Drought vs. No Drought
atgagtgtagtcgggtttgattttggaaacgagaattgccttgttgccgttgcgaggcaaagaggtatcgacgtcgtgcttaatgatgagtccaatcgtgagactcctgctattgtctgcttcggtgacaagcagcgcttcatcggcactgctggagctgcttctaccatgatgaaccctaaaaactccatctctcaaattaagcgcttaattggtcgccagttttccgaccctgagcttcaaagggatatcaaatcccttcccttttctgtcaccgaaggccctgatggctatcctttgatacatgctaattatttgggagagaagcgagcctttaccccgactcaagtcatgggcatgatgttgtctaacctgaaaggtattgccgagaagaatttgaatacagctgttgtcgactgctgtattggtattcctgtttactttaccgacctccagcgtagggctgttctcgatgctgccactattgctggcttgcatcccttgcgcttgatccacgagactacagctacggctttggcatatggtatttataagacagatttgccagagagtgaccagctcaatgttgcattcattgacattggacacgcaagcatgcaagtctgtattgcaggctttaaaaaaggacagctcaaaatcttgtctcacgctttcgatcgctcccttgggggaagggactttgatgaagttcttttcaatcattttgctgctaagttcaaggacgagtacaagattgacgtctcccagaatgctaaggcttctctcaggctccgtgctacatgcgagaaactgaaaaaggttctaagcgctaatcctctggcaccgttgaatatcgagtgtttgatggatgagaaagatgttaggggtgtcatcaagagggaagagtttgaagagatcagcatcccgattttggagcgtgtaaagaggcctctagagaaagctctctctgatgcaggcctcactgttgaagatgtacatatggttgaggttattggctctggctctcgtgtccctgctatgatcaagattctaactgagttttttggtaaggagcccaggcggacaatgaatgcaagtgagtgtgtgtcaaggggatgtgccttgcagtgtgccattctcagtccgacctttaaagttcgcgaattccaggttcatgagagcttccctttctcaatttctctcgcttggaaaggagcagcttctgaagctcaaaatggaggagctgagaatcagcagagcaccattgtttttcccaaaggaaatcccattcctagtgtcaaggctctaacgttttatcgttctggaacattctctgttgatgtgcagtacagtgatgtgaacgatttgcaagcacctccaaaaatcagcacatacacgattggtccgttccagtcatcaaaaggcgagagggcaaagcttaaagtgaaagtgagattgaaccttcatggaatcgtctcagttgaatctgcaactcttttggaagaggaagaagttgaagttccggtcacaaaagaacattcagaggaaactactaagatggactctgacaaagcttctgctgaggcagctcctgcttctggagactgtgatgtaaacatgcaggacgccaaagacaccagtgatgcaactggtactgacaatggtgttccagagtctgctgagaagccggtgcaaatggaaactgattcaaaggctgaggctccaaagaagaaggtgaagaaaacaaatgtaccactgtctgaattggtctatggtgccttgaaaactgtggaggtcgaaaaggcagtggagaaggaatttgagatggctttgcaagacagagttatggaagagaccaaggaccggaagaatgctgttgagtcttatgtttatgatatgcggaacaaactgagtgacaaataccaggaatatatcactgactcggagagggaagcattcctggcgaatctgcaggaagttgaggattggttgtatgaagatggggaagatgagaccaaaggtgtttatgttgcgaagctcgaggagctcaagaaggtgggtgaccctgttgaagtgcgttacaaggagtcattggaaagagggtcggtcattgatcagcttggttactgtattaacagctacagagaggcagctatgtctactgatcccaagtttgatcacattgaattggcagagaagcaaaaggttttgaacgagtgtgtggaagcagaagcatggctgcggggaaagcagcagcagcaggacacacttcccaagtatgccacaccggctctcttgtcagctgacgttaaaagcaaggcagaggcattggacaagttttgcaggcctataatgaccaaaccaaagccggtggctaaagcagaggcaccacaagccaagggaggtgagcaggcggatgagggcaagagtgagccagagcaaccagcttctgccgaaccaatggagactgagaatcccgcggaaggtagtacctaa

SEQ ID NO: 88976 - protein, 831 aa, Arabidopsis thaliana; identical to SEQ ID NO: 78067
  peptide (1)..(831): Ceres Seq. ID no. 12714501
  misc_feature (1)..(831): Homolog of NCBI NO: 39645395 NR Description: Unknown (protein for MGC:76295) [Silurana
  misc_feature (1)..(830): Homolog of NCBI NO: 34856875 NR Description: similar to osmotic stress protein [Rattus
  misc_feature (1)..(825): Homolog of NCBI NO: 29881532 NR Description: Unknown (protein for MGC:55506) [Danio rerio]
  misc_feature (1)..(831): Homolog of NCBI NO: 40254361 NR Description: osmotic stress protein; osmotic stress protein 94 [Mus musculus] >gi|31077176|sp|P48722|OS94_MOUSE Osmotic stress
  misc_feature (1)..(830): Homolog of NCBI NO: 30525062 NR Description: heat shock protein 4 [Cyprinus carpio]
  misc_feature (1)..(831): Homolog of NCBI NO: 1098541 NR Description: osmotic stress protein 94
  misc_feature (1)..(830): Homolog of NCBI NO: 31077164 NR Description: Osmotic stress protein 94 (Heat shock 70-related
  misc_feature (1)..(825): Homolog of NCBI NO: 40788905 NR Description: KIAA0201 [Homo sapiens]
  misc_feature (2)..(626): Homolog of NCBI NO: 7441858 NR Description: heat shock protein 70 - fission yeast pombe) >gi|3090716|gb|AAC18441.1| Pss1 [Schizosaccharomyces
  misc_feature (2)..(626): Homolog of NCBI NO: 12230134 NR Description: HEAT SHOCK PROTEIN HOMOLOG PSS1

SEQ ID NO: 88977 - protein, 775 aa, Arabidopsis thaliana; identical to SEQ ID NO: 78068
  peptide (1)..(775): Ceres Seq. ID no. 12714502
  misc_feature (1)..(775): Homolog of NCBI NO: 39645395 NR Description: Unknown (protein for MGC:76295) [Silurana
  misc_feature (1)..(774): Homolog of NCBI NO: 34856875 NR Description: similar to osmotic stress protein [Rattus
  misc_feature (1)..(769): Homolog of NCBI NO: 29881532 NR Description: Unknown (protein for MGC:55506) [Danio rerio]
  misc_feature (1)..(775): Homolog of NCBI NO: 40254361 NR Description: osmotic stress protein; osmotic stress protein 94 [Mus musculus] >gi|31077176|sp|P48722|OS94_MOUSE Osmotic stress
  misc_feature (1)..(774): Homolog of NCBI NO: 30525062 NR Description: heat shock protein 4 [Cyprinus carpio]
  misc_feature (1)..(775): Homolog of NCBI NO: 1098541 NR Description: osmotic stress protein 94
  misc_feature (1)..(774): Homolog of NCBI NO: 31077164 NR Description: Osmotic stress protein 94 (Heat shock 70-related
  misc_feature (1)..(769): Homolog of NCBI NO: 40788905 NR Description: KIAA0201 [Homo sapiens]
  misc_feature (1)..(570): Homolog of NCBI NO: 7441858 NR Description: heat shock protein 70 - fission yeast pombe) >gi|3090716|gb|AAC18441.1| Pss1 [Schizosaccharomyces
  misc_feature (1)..(570): Homolog of NCBI NO: 12230134 NR Description: HEAT SHOCK PROTEIN HOMOLOG PSS1

SEQ ID NO: 88978 - protein, 774 aa, Arabidopsis thaliana; identical to SEQ ID NO: 78069
  peptide (1)..(774): Ceres Seq. ID no. 12714503
  misc_feature (1)..(774): Homolog of NCBI NO: 39645395 NR Description: Unknown (protein for MGC:76295) [Silurana
  misc_feature (1)..(773): Homolog of NCBI NO: 34856875 NR Description: similar to osmotic stress protein [Rattus
  misc_feature (1)..(768): Homolog of NCBI NO: 29881532 NR Description: Unknown (protein for MGC:55506) [Danio rerio]
  misc_feature (1)..(774): Homolog of NCBI NO: 40254361 NR Description: osmotic stress protein; osmotic stress protein 94 [Mus musculus] >gi|31077176|sp|P48722|OS94_MOUSE Osmotic stress
  misc_feature (1)..(773): Homolog of NCBI NO: 30525062 NR Description: heat shock protein 4 [Cyprinus carpio]
  misc_feature (1)..(774): Homolog of NCBI NO: 1098541 NR Description: osmotic stress protein 94
  misc_feature (1)..(773): Homolog of NCBI NO: 31077164 NR Description: Osmotic stress protein 94 (Heat shock 70-related
  misc_feature (1)..(768): Homolog of NCBI NO: 40788905 NR Description: KIAA0201 [Homo sapiens]
  misc_feature (1)..(569): Homolog of NCBI NO: 7441858 NR Description: heat shock protein 70 - fission yeast pombe) >gi|3090716|gb|AAC18441.1| Pss1 [Schizosaccharomyces
  misc_feature (1)..(569): Homolog of NCBI NO: 12230134 NR Description: HEAT SHOCK PROTEIN HOMOLOG PSS1

SEQ ID NO: 88979 - DNA, 2115 bp, Arabidopsis thaliana
  misc_feature (1)..(2115): Ceres Seq. ID no. 12714588
  misc_feature: MA Experiment ID: 20000315 Result: Down-regulated in Transcription
  misc_feature: MA Experiment 20000315 PARAMETER Experiment Name: At_14day_Shoots-Roots_Sub_P Parameter: Age (day) Value: 14
  misc_feature: MA Experiment 20000315 PARAMETER Experiment Name: At_14day_Shoots-Roots_Sub_P Parameter: Organism Value: A. thaliana
  misc_feature: MA Experiment 20000315 PARAMETER Experiment Name: At_14day_Shoots-Roots_Sub_P Parameter: Plant Line Value: WS
  misc_feature: MA Experiment 20000315 PARAMETER Experiment Name: At_14day_Shoots-Roots_Sub_P Parameter: Tissue Value: Shoots vs. Whole Plant
  misc_feature: MA Experiment ID: 20000355 Result: Down-regulated in Transcription
  misc_feature: MA Experiment 20000355 PARAMETER Experiment Name: At_Siliques_Sub_P Parameter: Age (day) Value: 21
  misc_feature: MA Experiment 20000355 PARAMETER Experiment Name: At_Siliques_Sub_P Parameter: Organism Value: A. thaliana
  misc_feature: MA Experiment 20000355 PARAMETER Experiment Name: At_Siliques_Sub_P Parameter: Plant Line Value: WS
  misc_feature: MA Experiment 20000355 PARAMETER Experiment Name: At_Siliques_Sub_P Parameter: Tissue Value: Less Than 5mm Siliques vs. Whole Plant
  misc_feature: MA Experiment ID: 20000634 Result: Up-regulated in Transcription
  misc_feature: MA Experiment 20000634 PARAMETER Experiment Name: At_10percent_PEG_Sub_P Parameter: Age (day) Value: 12
  misc_feature: MA Experiment 20000634 PARAMETER Experiment Name: At_10percent_PEG_Sub_P Parameter: Organism Value: A. thaliana
  misc_feature: MA Experiment 20000634 PARAMETER Experiment Name: At_10percent_PEG_Sub_P Parameter: Plant Line Value: WS
  misc_feature: MA Experiment 20000634 PARAMETER Experiment Name: At_10percent_PEG_Sub_P Parameter: Timepoint (day) Value: 12
  misc_feature: MA Experiment 20000634 PARAMETER Experiment Name: At_10percent_PEG_Sub_P Parameter: Tissue Value: Whole Plant
  misc_feature: MA Experiment 20000634 PARAMETER Experiment Name: At_10percent_PEG_Sub_P Parameter: Treatment Value: 10% PEG vs. No Treatment
atgggttgcgttagctcgaagcagacggtctctgtgacgcctgcgatcgatcactcaggcgtcttcaaggataatgaaaatgagtgttctggatcgggtcggattgtggtggaggatccgcctcggccgacgttgaagaagctcgtgtcgtggaggagtaggagcgggaagaggaggagtcagaagagcggtagcgagttagggagtgagtcaggacgtgctagtgactcgcttagttttcgactcggtaatgttagtagataccttgaagctgagcaagtcgctgctggttggcctgcgtggttgagcaacgttgctggtgaagctatccatggttgggtcccacttcgatccgatgcgttcgaaaaactcgaaaagattggacaaggtacttatagcaatgtgtttcgtgcggtggagactgaaactgggaggattgtggcattgaagaaggtgaggtttgataattttgagccggagagtgttaagtttatggcaagagagattttgatacttagaagacttaatcatcccaacattatcaaactggaaggtttgattacttcaaaactatcctgcaacattcaacttgtgttcgagtatatggagcatgatcttactggtcttctttcttcccctgacatcaaatttacgacgccacagattaagtgttacatgaagcaattgttgtctgggcttgatcattgtcattcacgaggcgtgatgcatcgagacataaagggttcgaatcttttgttgagtaatgaagggatattaaaggtggctgattttgggttagcaaacttcagtaatagttctggacacaagaagaaacctcttaccagtcgagttgtgactctgtggtatcgtccaccagaacttttgctcggggcaacggactatggagcatctgttgatttgtggagtgttggttgtgttttcgctgagctgcttcttggaaaacctattctccggggaagaactgaggttgaacagttgcacaagatattcaaactgtgtggatctccaccagaagattactggaaaaagtccaaacttccccatgcaatgcttttcaagccacagcaaacttatgatagttgtctccgcgaaaccttgaaagatttgtctgagactgaaatcaatctgatagaaactcttctttctatagatccccacaaacgcggtactgcctctagtgcccttgtttctcagtattttactacaaagccttttgcttgtgatccctcaagcttgccaatatacccacctagcaaggagatagatacaaagcatcgggacgaagcagcaaggaaaaaaattagcgggaatgggagacgtggtatagatccgaggaagccatcaaggaaggcccattcattcaatagattggcaccagttgagttacttcctacttactcacttttctacatgttatctgatgtgcggcaccaaactgaaacatttcagaaacgaattggtcatttagttcatagttcgattgaaagtgatgccaggttatgtgggaaactgcaaaacccgttagatcacaagaaagacgaagcttcccatgtgaagcatgcatcacaaggagatgtgcctttctcagggccgttacaagtctctaaatcaaacagttttgcttgggcgaaacgagaaaaagatgacgtatgtgttagggtgcataatcgatctctctcaagaggttacattcctagcttgtcaggacattcccccgcattcaatgggaaaagtgatgttgaatccaagataaataaggatgaaaaggaggacaagacagattctcgaggcgaggagtcatatgagatggtgaagcgttctatgctaaagcagtggagacaacttgaacgtccagattcttttggtgcatctgacgagtatcactcgcaggaactgtcattgggactctatcagagagatgaaatggcaaaaaagatgggtaataatttgggtgatggggacaagatcgaattctcgggccctttgttgtctcaatcttatggagttgatgaactgttggaacgccatgaacgcaacatccgcaagctaattcgaaaaccgtggtttcaaaaagataagaaacaggggaagtga

SEQ ID NO: 88980 - protein, 704 aa, Arabidopsis thaliana
  peptide (1)..(704): Ceres Seq. ID no. 12714589
  misc_feature (121)..(407): Pfam Name: Protein kinase domain Pfam Description: Protein kinase domain
  misc_feature (1)..(655): Homolog of NCBI NO: 15221833 NR Description: protein kinase, putative; protein id: At1g18670.1
  misc_feature (1)..(442): Homolog of NCBI NO: 15221219 NR Description: putative protein kinase; protein id: At1g74330.1
  misc_feature (1)..(701): Homolog of NCBI NO: 33146814 NR Description: putative cyclin-dependent kinase CDC2C [Oryza
  misc_feature (1)..(467): Homolog of NCBI NO: 18032144 NR Description: cyclin-dependent kinase CDC2C [Arabidopsis
  misc_feature (1)..(467): Homolog of NCBI NO: 22327464 NR Description: cdc2-like protein; protein id: At5g39420.1,
  misc_feature (502)..(700): Homolog of NCBI NO: 18032144 NR Description: cyclin-dependent kinase CDC2C [Arabidopsis
  misc_feature (520)..(700): Homolog of NCBI NO: 22327464 NR Description: cdc2-like protein; protein id: At5g39420.1,
  misc_feature (81)..(550): Homolog of NCBI NO: 34914694 NR Description: putative CRK1 protein [Oryza sativa (japonica group)] >gi|15528648|dbj|BAB64715.1| putative CRK1 protein [Oryza
  misc_feature (7)..(458): Homolog of NCBI NO: 15217565 NR Description: putative protein kinase; protein id: At1g09600.1
  misc_feature (7)..(458): Homolog of NCBI NO: 25402555 NR Description: hypothetical protein [imported] - Arabidopsis >gi|3482933|gb|AAC33218.1| Similar to cdc2 protein kinases
MGCVSSKQTVSVTPAIDHSGVFKDNENECSGSGRIVVEDPPRPTLKKLVSWRSRSGKRRSQKSGSELGSESGRASDSLSFRLGNVSRYLEAEQVAAGWPAWLSNVAGEAIHGWVPLRSDAFEKLEKIGQGTYSNVFRAVETETGRIVALKKVRFDNFEPESVKFMAREILILRRLNHPNIIKLEGLITSKLSCNIQLVFEYMEHDLTGLLSSPDIKFTTPQIKCYMKQLLSGLDHCHSRGVMHRDIKGSNLLLSNEGILKVADFGLANFSNSSGHKKKPLTSRVVTLWYRPPELLLGATDYGASVDLWSVGCVFAELLLGKPILRGRTEVEQLHKIFKLCGSPPEDYWKKSKLPHAMLFKPQQTYDSCLRETLKDLSETEINLIETLLSIDPHKRGTASSALVSQYFTTKPFACDPSSLPIYPPSKEIDTKHRDEAARKKISGNGRRGIDPRKPSRKAHSFNRLAPVELLPTYSLFYMLSDVRHQTETFQKRIGHLVHSSIESDARLCGKLQNPLDHKKDEASHVKHASQGDVPFSGPLQVSKSNSFAWAKREKDDVCVRVHNRSLSRGYIPSLSGHSPAFNGKSDVESKINKDEKEDKTDSRGEESYEMVKRSMLKQWRQLERPDSFGASDEYHSQELSLGLYQRDEMAKKMGNNLGDGDKIEFSGPLLSQSYGVDELLERHERNIRKLIRKPWFQKDKKQGK

SEQ ID NO: 88981 - protein, 540 aa, Arabidopsis thaliana
  peptide (1)..(540): Ceres Seq. ID no. 12714590
  misc_feature (1)..(243): Pfam Name: Protein kinase domain Pfam Description: Protein kinase domain
  misc_feature (1)..(491): Homolog of NCBI NO: 15221833 NR Description: protein kinase, putative; protein id: At1g18670.1
  misc_feature (1)..(278): Homolog of NCBI NO: 15221219 NR Description: putative protein kinase; protein id: At1g74330.1
  misc_feature (1)..(537): Homolog of NCBI NO: 33146814 NR Description: putative cyclin-dependent kinase CDC2C [Oryza
  misc_feature (1)..(303): Homolog of NCBI NO: 18032144 NR Description: cyclin-dependent kinase CDC2C [Arabidopsis
  misc_feature (1)..(303): Homolog of NCBI NO: 22327464 NR Description: cdc2-like protein; protein id: At5g39420.1,
  misc_feature (338)..(536): Homolog of NCBI NO: 18032144 NR Description: cyclin-dependent kinase CDC2C [Arabidopsis
  misc_feature (356)..(536): Homolog of NCBI NO: 22327464 NR Description: cdc2-like protein; protein id: At5g39420.1,
  misc_feature (1)..(386): Homolog of NCBI NO: 34914694 NR Description: putative CRK1 protein [Oryza sativa (japonica group)] >gi|15528648|dbj|BAB64715.1| putative CRK1 protein [Oryza
  misc_feature (1)..(294): Homolog of NCBI NO: 15217565 NR Description: putative protein kinase; protein id: At1g09600.1
  misc_feature (1)..(294): Homolog of NCBI NO: 25402555 NR Description: hypothetical protein [imported] - Arabidopsis >gi|3482933|gb|AAC33218.1| Similar to cdc2 protein kinases
MAREILILRRLNHPNIIKLEGLITSKLSCNIQLVFEYMEHDLTGLLSSPDIKFTTPQIKCYMKQLLSGLDHCHSRGVMHRDIKGSNLLLSNEGILKVADFGLANFSNSSGHKKKPLTSRVVTLWYRPPELLLGATDYGASVDLWSVGCVFAELLLGKPILRGRTEVEQLHKIFKLCGSPPEDYWKKSKLPHAMLFKPQQTYDSCLRETLKDLSETEINLIETLLSIDPHKRGTASSALVSQYFTTKPFACDPSSLPIYPPSKEIDTKHRDEAARKKISGNGRRGIDPRKPSRKAHSFNRLAPVELLPTYSLFYMLSDVRHQTETFQKRIGHLVHSSIESDARLCGKLQNPLDHKKDEASHVKHASQGDVPFSGPLQVSKSNSFAWAKREKDDVCVRVHNRSLSRGYIPSLSGHSPAFNGKSDVESKINKDEKEDKTDSRGEESYEMVKRSMLKQWRQLERPDSFGASDEYHSQELSLGLYQRDEMAKKMGNNLGDGDKIEFSGPLLSQSYGVDELLERHERNIRKLIRKPWFQKDKKQGK

SEQ ID NO: 88982 - protein, 503 aa, Arabidopsis thaliana
  peptide (1)..(503): Ceres Seq. ID no. 12714591
  misc_feature (1)..(206): Pfam Name: Protein kinase domain Pfam Description: Protein kinase domain
  misc_feature (1)..(454): Homolog of NCBI NO: 15221833 NR Description: protein kinase, putative; protein id: At1g18670.1
  misc_feature (1)..(241): Homolog of NCBI NO: 15221219 NR Description: putative protein kinase; protein id: At1g74330.1
  misc_feature (1)..(500): Homolog of NCBI NO: 33146814 NR Description: putative cyclin-dependent kinase CDC2C [Oryza
  misc_feature (1)..(266): Homolog of NCBI NO: 18032144 NR Description: cyclin-dependent kinase CDC2C [Arabidopsis
  misc_feature (1)..(266): Homolog of NCBI NO: 22327464 NR Description: cdc2-like protein; protein id: At5g39420.1,
  misc_feature (301)..(499): Homolog of NCBI NO: 18032144 NR Description: cyclin-dependent kinase CDC2C [Arabidopsis
  misc_feature (319)..(499): Homolog of NCBI NO: 22327464 NR Description: cdc2-like protein; protein id: At5g39420.1,
  misc_feature (1)..(349): Homolog of NCBI NO: 34914694 NR Description: putative CRK1 protein [Oryza sativa (japonica group)] >gi|15528648|dbj|BAB64715.1| putative CRK1 protein [Oryza
  misc_feature (1)..(257): Homolog of NCBI NO: 15217565 NR Description: putative protein kinase; protein id: At1g09600.1
  misc_feature (1)..(257): Homolog of NCBI NO: 25402555 NR Description: hypothetical protein [imported] - Arabidopsis >gi|3482933|gb|AAC33218.1| Similar to cdc2 protein kinases
MEHDLTGLLSSPDIKFTTPQIKCYMKQLLSGLDHCHSRGVMHRDIKGSNLLLSNEGILKVADFGLANFSNSSGHKKKPLTSRVVTLWYRPPELLLGATDYGASVDLWSVGCVFAELLLGKPILRGRTEVEQLHKIFKLCGSPPEDYWKKSKLPHAMLFKPQQTYDSCLRETLKDLSETEINLIETLLSIDPHKRGTASSALVSQYFTTKPFACDPSSLPIYPPSKEIDTKHRDEAARKKISGNGRRGIDPRKPSRKAHSFNRLAPVELLPTYSLFYMLSDVRHQTETFQKRIGHLVHSSIESDARLCGKLQNPLDHKKDEASHVKHASQGDVPFSGPLQVSKSNSFAWAKREKDDVCVRVHNRSLSRGYIPSLSGHSPAFNGKSDVESKINKDEKEDKTDSRGEESYEMVKRSMLKQWRQLERPDSFGASDEYHSQELSLGLYQRDEMAKKMGNNLGDGDKIEFSGPLLSQSYGVDELLERHERNIRKLIRKPWFQKDKKQGK

SEQ ID NO: 88983 - DNA, 1114 bp, Arabidopsis thaliana
  misc_feature (1)..(1114): Ceres Seq. ID no. 12714596
  misc_feature: MA Experiment ID: 108462 Result: Down-regulated in Transcription
  misc_feature: MA Experiment 108462 PARAMETER Experiment Name: At_Germinating_Seeds_cDNA_P Parameter: Age (day) Value: 2 vs. 0
  misc_feature: MA Experiment 108462 PARAMETER Experiment Name: At_Germinating_Seeds_cDNA_P Parameter: Tissue Value: Germinating Seeds
  misc_feature: MA Experiment ID: 108463 Result: Down-regulated in Transcription
  misc_feature: MA Experiment 108463 PARAMETER Experiment Name: At_Germinating_Seeds_cDNA_P Parameter: Age (day) Value: 3 vs. 0
  misc_feature: MA Experiment 108463 PARAMETER Experiment Name: At_Germinating_Seeds_cDNA_P Parameter: Tissue Value: Germinating Seeds
  misc_feature: MA Experiment ID: 108464 Result: Down-regulated in Transcription
  misc_feature: MA Experiment 108464 PARAMETER Experiment Name: At_Germinating_Seeds_cDNA_P Parameter: Age (day) Value: 4 vs. 0
  misc_feature: MA Experiment 108464 PARAMETER Experiment Name: At_Germinating_Seeds_cDNA_P Parameter: Tissue Value: Germinating Seeds
  misc_feature: MA Experiment ID: 108573 Result: Up-regulated in Transcription
  misc_feature: MA Experiment 108573 PARAMETER Experiment Name: At_Drought_cDNA_P Parameter: Timepoint (hr) Value: 6
  misc_feature: MA Experiment 108573 PARAMETER Experiment Name: At_Drought_cDNA_P Parameter: Tissue Value: Aerial
  misc_feature: MA Experiment 108573 PARAMETER Experiment Name: At_Drought_cDNA_P Parameter: Treatment Value: Drought vs. No Drought
  misc_feature: MA Experiment ID: 108594 Result: Up-regulated in Transcription
  misc_feature: MA Experiment 108594 PARAMETER Experiment Name: At_Ler-rhl_Root_cDNA_P Parameter: Plant Line Value: null
  misc_feature: MA Experiment ID: 108595 Result: Down-regulated in Transcription
  misc_feature: MA Experiment 108595 PARAMETER Experiment Name: At_Ler-pi_Ovule_cDNA_P Parameter: Plant Line Value: null
  misc_feature: MA Experiment ID: 20000185 Result: Down-regulated in Transcription
  misc_feature: MA Experiment 20000185 PARAMETER Experiment Name: At_Roots__P Parameter: Age (day) Value: 7 vs. 21
  misc_feature: MA Experiment 20000185 PARAMETER Experiment Name: At_Roots__P Parameter: Organism Value: A. thaliana
  misc_feature: MA Experiment 20000185 PARAMETER Experiment Name: At_Roots__P Parameter: Tissue Value: Roots vs. Whole Plant
  misc_feature: MA Experiment ID: 20000439 Result: Down-regulated in Transcription
  misc_feature: MA Experiment 20000439 PARAMETER Experiment Name: At_Roots__P Parameter: Age (day) Value: 14 vs. 21
  misc_feature: MA Experiment 20000439 PARAMETER Experiment Name: At_Roots__P Parameter: Organism Value: A. thaliana
  misc_feature: MA Experiment 20000439 PARAMETER Experiment Name: At_Roots__P Parameter: Tissue Value: Roots vs. Whole Plant
  misc_feature: MA Experiment ID: 20001757 Result: Up-regulated in Transcription
  misc_feature: MA Experiment 20001757 PARAMETER Experiment Name: At_50mM_NH4NO3_L-to-H_P Parameter: Timepoint (hr) Value: 6
  misc_feature: MA Experiment 20001757 PARAMETER Experiment Name: At_50mM_NH4NO3_L-to-H_P Parameter: Tissue Value: Leaf
  misc_feature: MA Experiment 20001757 PARAMETER Experiment Name: At_50mM_NH4NO3_L-to-H_P Parameter: Treatment Value: 50mM NH4NO3 vs 100mM Mannitol
attgaaaggcgtttcagagtcaccatgttttacgacgcgtgtctctttttcagccggttttcttctcgctggttacatcagagcttcggagatattatataactcaacgacgtagctgttgcattttttgtttttgcaatgatcttcatcttcatgaccggataaactcttagagaaagattcaaagtgattatctttgtggatccctccattgctatgtggaatttagcttcaaaatcgatcagagaaggttttatatcgaagggagaagaagctgctacaaaaccaagaagagctactttagatagatcaggagatggaagaaagacaacaaaggaagaaaaattggagtgtcccatttgctgggaatcattcaacgttgttgagaatgtaccttatgtcttatggtgtggtcatacaatctgcaagtactgtctcttagggcttcaacgtgccattgtcatcaaatcctctgctttaccattccagcttcccttcttcgttgcttgcccttggtgcaatattctctctttaaggctggtttgcaatggaaccatcagatttccttccaagaacttttaccttctgtggatggtagaaagcatgaatggctccagatcggaggcacccagcgacaacaaaagggttgcttcagggcagagagacttgagaaataggtgtgatggagtgagtaataccgccttgggtgatgaagggttgctggacaatcgcagctggtggaatggtgtgaccagaggattcttcagaactgggaggctccatgactcggtacgtaagtcaatggctcttgttgctcatttgttggctaagtttcctctggtagtcatattcctgttgatggctttatatgcaatccctgtgagtgctgcagttctcggggtttatttctttgttacgtttgctttggctgtcccgtcgtttctcgtcctttattttgccttcccgagcttaaactggctgatcagagagattgcaacctgactcattgtactgtttctttcttcctgtatgtttcctgacttgtaagaaacacgagatagagccaacgttgtttacactcaatatagacaagaagaagagaagatctttattt

SEQ ID NO: 88984 - protein, 261 aa, Arabidopsis thaliana
  peptide (1)..(261): Ceres Seq. ID no. 12714597
  misc_feature (1)..(261): Homolog of NCBI NO: 15221223 NR Description: putative RING zinc finger protein; protein id: supported by cDNA: 29883. [Arabidopsis thaliana]
  misc_feature (1)..(261): Homolog of NCBI NO: 21592563 NR Description: putative RING zinc finger protein [Arabidopsis
  misc_feature (1)..(261): Homolog of NCBI NO: 15228658 NR Description: unknown protein; protein id: At3g29270.1 thaliana] >gi|27754358|gb|AAO22628.1| unknown protein thaliana] >gi|28394061|gb|AAO42438.1| unknown protein
  misc_feature (1)..(261): Homolog of NCBI NO: 11994767 NR Description: RING zinc finger protein-like [Arabidopsis
  misc_feature (1)..(261): Homolog of NCBI NO: 21594048 NR Description: unknown [Arabidopsis thaliana]
  misc_feature (1)..(261): Homolog of NCBI NO: 18409246 NR Description: expressed protein; protein id: At1g69330.1, by cDNA: 6632., supported by cDNA: gi_19699329 [Arabidopsis
MWNLASKSIREGFISKGEEAATKPRRATLDRSGDGRKTTKEEKLECPICWESFNVVENVPYVLWCGHTICKYCLLGLQRAIVIKSSALPFQLPFFVACPWCNILSLRLVCNGTIRFPSKNFYLLWMVESMNGSRSEAPSDNKRVASGQRDLRNRCDGVSNTALGDEGLLDNRSWWNGVTRGFFRTGRLHDSVRKSMALVAHLLAKFPLVVIFLLMALYAIPVSAAVLGVYFFVTFALAVPSFLVLYFAFPSLNWLIREIAT

SEQ ID NO: 88985 - protein, 136 aa, Arabidopsis thaliana
  peptide (1)..(136): Ceres Seq. ID no. 12714598
  misc_feature (1)..(136): Homolog of NCBI NO: 15221223 NR Description: putative RING zinc finger protein; protein id: supported by cDNA: 29883. [Arabidopsis thaliana]
  misc_feature (1)..(136): Homolog of NCBI NO: 21592563 NR Description: putative RING zinc finger protein [Arabidopsis
  misc_feature (1)..(136): Homolog of NCBI NO: 15228658 NR Description: unknown protein; protein id: At3g29270.1 thaliana] >gi|27754358|gb|AAO22628.1| unknown protein thaliana] >gi|28394061|gb|AAO42438.1| unknown protein
  misc_feature (1)..(136): Homolog of NCBI NO: 11994767 NR Description: RING zinc finger protein-like [Arabidopsis
  misc_feature (1)..(136): Homolog of NCBI NO: 21594048 NR Description: unknown [Arabidopsis thaliana]
  misc_feature (1)..(136): Homolog of NCBI NO: 18409246 NR Description: expressed protein; protein id: At1g69330.1, by cDNA: 6632., supported by cDNA: gi_19699329 [Arabidopsis
MVESMNGSRSEAPSDNKRVASGQRDLRNRCDGVSNTALGDEGLLDNRSWWNGVTRGFFRTGRLHDSVRKSMALVAHLLAKFPLVVIFLLMALYAIPVSAAVLGVYFFVTFALAVPSFLVLYFAFPSLNWLIREIAT

SEQ ID NO: 88986 - protein, 132 aa, Arabidopsis thaliana
  peptide (1)..(132): Ceres Seq. ID no. 12714599
  misc_feature (1)..(132): Homolog of NCBI NO: 15221223 NR Description: putative RING zinc finger protein; protein id: supported by cDNA: 29883. [Arabidopsis thaliana]
  misc_feature (1)..(132): Homolog of NCBI NO: 21592563 NR Description: putative RING zinc finger protein [Arabidopsis
  misc_feature (1)..(132): Homolog of NCBI NO: 15228658 NR Description: unknown protein; protein id: At3g29270.1 thaliana] >gi|27754358|gb|AAO22628.1| unknown protein thaliana] >gi|28394061|gb|AAO42438.1| unknown protein
  misc_feature (1)..(132): Homolog of NCBI NO: 11994767 NR Description: RING zinc finger protein-like [Arabidopsis
  misc_feature (1)..(132): Homolog of NCBI NO: 21594048 NR Description: unknown [Arabidopsis thaliana]
  misc_feature (1)..(132): Homolog of NCBI NO: 18409246 NR Description: expressed protein; protein id: At1g69330.1, by cDNA: 6632., supported by cDNA: gi_19699329 [Arabidopsis
MNGSRSEAPSDNKRVASGQRDLRNRCDGVSNTALGDEGLLDNRSWWNGVTRGFFRTGRLHDSVRKSMALVAHLLAKFPLVVIFLLMALYAIPVSAAVLGVYFFVTFALAVPSFLVLYFAFPSLNWLIREIAT

SEQ ID NO: 88987 - DNA, 3780 bp, Arabidopsis thaliana
  misc_feature (1)..(3780): Ceres Seq. ID no. 12714653
  misc_feature: MA Experiment ID: 20000314 Result: Up-regulated in Transcription
  misc_feature: MA Experiment 20000314 PARAMETER Experiment Name: At_14day_Shoots-Roots_Sub_P Parameter: Age (day) Value: 14
  misc_feature: MA Experiment 20000314 PARAMETER Experiment Name: At_14day_Shoots-Roots_Sub_P Parameter: Organism Value: A. thaliana
  misc_feature: MA Experiment 20000314 PARAMETER Experiment Name: At_14day_Shoots-Roots_Sub_P Parameter: Plant Line Value: WS
  misc_feature: MA Experiment 20000314 PARAMETER Experiment Name: At_14day_Shoots-Roots_Sub_P Parameter: Tissue Value: Roots vs. Whole Plant
  misc_feature: MA Experiment ID: 20000347 Result: Up-regulated in Transcription
  misc_feature: MA Experiment 20000347 PARAMETER Experiment Name: At_2mM_SA_Sub_P Parameter: Age (day) Value: 14
  misc_feature: MA Experiment 20000347 PARAMETER Experiment Name: At_2mM_SA_Sub_P Parameter: Organism Value: A. thaliana
  misc_feature: MA Experiment 20000347 PARAMETER Experiment Name: At_2mM_SA_Sub_P Parameter: Plant Line Value: WS
  misc_feature: MA Experiment 20000347 PARAMETER Experiment Name: At_2mM_SA_Sub_P Parameter: Timepoint (hr) Value: 6
  misc_feature: MA Experiment 20000347 PARAMETER Experiment Name: At_2mM_SA_Sub_P Parameter: Tissue Value: Aerial
  misc_feature: MA Experiment 20000347 PARAMETER Experiment Name: At_2mM_SA_Sub_P Parameter: Treatment Value: 2mM SA vs. No Treatment
atgggaggcggaaatcttcattcccttccgccggaaaacgcttccgtttctgcatcttatgcggtgaccgttggaaataccaagctttctgatgctccggttcttttcttcgtttactgccacaaggctttccgtgctcagctggtggagctccggcgtttcgctactgacgctgctgaagccgattcctttagtggggatctggcggtggagctctcccggaagtttgagttcttgaagcttgtatataagtatcatagcgcagctgaagatgaggttatatttttggcgctagataaacgagtgaaaaacatagtttctaattactcacttgagcatgctggcacagatgatctctttacctcaattttccactggctacatgttcttgaagaagaaataggaagtagaagcgatgtacttcgtgaagttattttatgcataggcaccatccagtcatctatatgccaacatatgcttaaagaagagcggcaggtgtttcctttgttaatagagaagttttctttccgagaacaagcatcacttgtgtggcaattcatttgtagtgttccagtgatggtgcttgaagactttttgccatggatgatctctcatctctctcacgaggagaaaattgaagttgagaattgtataaaagatgttgccccaaatgaagactcattgcaacaggtcataagctcttggctgcttgacgatagtcaatcttcttgtgggactcctacagagatcatgaaaggagtccagtatgttaatgtgtctaaaagtttgaagaaatcacctgagtcacatccgtcaagcggatgttttcaacgcttttgggagtggagtaaaaagtccctttcaattccaaatgtaggacggagcccaattcatggtcttagactttttcaaaatgcaattgaaaaagatttgagagatattcaagaaggattatgccaagcaaaattccaaacccttattttggatcttgatgtactgatggctagattaaacttccttgctgatgtccttgtttcttatagcaatgcatttaagaagttctttcacccagtgttagaagaaatgacagctcgccgctcttcaactgccaaacagttcaacatagatgattgtcttgagaattttcagagattgttatacaaaagtgctgatgataaaacaaagacggacaattttctattgcagcttcaggaggaacttgagtcccttataatccaagtaacaaagcaatttgccatacagagaacagaggtattcccaatcatcagcaagaattgcaaccatgaaatgcagaagcagctcctatacacaagcattcatgtcttacctcttggattactaaagtgtgtcatactttggttttctgctcatttatcagaagaagaatctcaatccattcttcatttcttaagtttggaagattcttctcccaagaaatcatttccacgcctcttgctacagtggcttcgttttggctattcaggcaaaacctctgttgaaagattttggaaacagttggatgttatgttcaaagtaagatgttcctgccaaaaggagcacactgaagaagcatcaggatcattttccaaccaaacacagctgcaactatgtaaagtatctaaagatgtttatcctagaaagaaagataagtcttcaacctgcttcatgtcaatggatctagctgttggagacatgtatgagacaccttactcaagtcgaatgaatcaacaaatgactttctcaggaaagcttaagcctcctctccatctcccagatttttttggtgagaagaatatggatgatcctatgattatggatgttaaaccaattgacctccttttcttcttccacaaggcaatgaagatggatttggactaccttgtttgtggatcaacaagattggcagccgactttcgtttcctcgcggagtttcagcaacggttccatatgataaagtttttgtatcagatacattctgatgcagaagatgagattgcatttccagcattggaagccaagggacagctaaaaaacattagtcactcgtttagcattgatcatgagctagaaactaaacacttcgacaaagtttcgttcattttgaatgagatgtcagagctgaacatgttggtttctaccatcaataccactgcagctgaccacgaccgaaaaatgaagtatgagcggttatgtctcagtctccgagagatttgcaaatcaatgcacaagctattgtctgagcatatccaacatgaagaaactgagctttggggtctattcaggaactgcttctctattgaagaacaagagaaaatcataggatgcatgctcgggagaataagtggggaaatattgcaggatatgattccttggttaatggaatctttaacctctgatgaacagcttgccgcgatgtccttgtggcgccaagcaacaaggaaaacaatgtttgtcgaatggctaacagaatggtataacggtcatgttttacaagaggaagcaggagaagcaaacaacgatccatttggggattcagatccactagagattgtctggaagtatctctttgaagcatctgctgatggggaaaaagggagcatgcgcagcagccttctcaaactcccgaagacgaattttacaggtattatgaatcagcctcctcctaattacaaggttgaagttggcaaaaaagaggaaaaagatctagaacggtcagaaagtaaaaagatatgcagaggatctaaccaagagggggacaaagaacaaactgacaaaatgtctcagaaggttagccagtttggtccatccaagaaatatgaacaactgttaacaatgagtgaagaagaacttgtggttgtgattaagaaaatatcatgcgactcttccctggatcctcagaagaaagactatatcaagcagaacttgttaatgagtcggtggaatatctcacaacgtacatataatttggaaccatcctctctctcgagcaacatggaaacagttcatggtcaacatccatcatatcgagatcctcacagtttgatctttggttgcaatcactacaagagaaattgtaaacttcttgctccttgttgtgacaagctcttcacatgtatacgatgccatgatgaagaagctgatcactcggtggataggaaacagattacaaagatgatgtgcatgaaatgcctcttgattcaaccgattggtgcaaattgctcaaatacttcgtgcaagtcgtcaatgggaaaatacttctgcaaaatatgcaaattatatgacgatgaaaggaaaatttatcactgtccttactgcaacctctgtcgagtagggaaaggattgggtattgactacttccactgcatgaaatgcaatgcttgtatgtcacgtaccttagtagagcatgtttgcagggaaaagtgcttagaagataattgtccgatttgccatgagtatatcttcacctccagctccccagtgaaggctcttccttgtggtcacttgatgcactccacatgctttcaggagtacacatgttcacattacacatgccctgtctgcagcaagtcgcttggagatatgcaggtctactttaagatgttagacgcattgcttgcagaagagaagatgcctgatgaatactccaacaaaactcaggtgatcttgtgtaatgattgtggaagaaaaggaaatgctccttaccattggctttaccacaaatgcacaacctgtggctcctacaactcaaggctcctttag

SEQ ID NO: 88988 - protein, 1259 aa, Arabidopsis thaliana
  peptide (1)..(1259): Ceres Seq. ID no. 12714654
  misc_feature (685)..(772): Pfam Name: Domain of Unknown function Pfam Description: Domain of Unknown function
  misc_feature (10)..(750): Homolog of NCBI NO: 15221896 NR Description: hypothetical protein; protein id: At1g18920.1
  misc_feature (2)..(485): Homolog of NCBI NO: 9279663 NR Description: gb|AAD55299.1~gene_id:MIE15.8~similar to unknown
  misc_feature (2)..(485): Homolog of NCBI NO: 15229615 NR Description: zinc finger protein, putative; protein id: supported by cDNA: gi_20453198 [Arabidopsis thaliana] AT3g18290/MIE15_8 [Arabidopsis thaliana]
  misc_feature (912)..(1259): Homolog of NCBI NO: 9279663 NR Description: gb|AAD55299.1~gene_id:MIE15.8~similar to unknown
  misc_feature (912)..(1259): Homolog of NCBI NO: 15229615 NR Description: zinc finger protein, putative; protein id: supported by cDNA: gi_20453198 [Arabidopsis thaliana] AT3g18290/MIE15_8 [Arabidopsis thaliana]
  misc_feature (615)..(858): Homolog of NCBI NO: 9279663 NR Description: gb|AAD55299.1~gene_id:MIE15.8~similar to unknown
  misc_feature (615)..(858): Homolog of NCBI NO: 15229615 NR Description: zinc finger protein, putative; protein id: supported by cDNA: gi_20453198 [Arabidopsis thaliana] AT3g18290/MIE15_8 [Arabidopsis thaliana]
  misc_feature (921)..(1259): Homolog of NCBI NO: 34911328 NR Description: putative zinc finger protein [Oryza sativa
  misc_feature (615)..(848): Homolog of NCBI NO: 34911328 NR Description: putative zinc finger protein [Oryza sativa
  misc_feature (2)..(172): Homolog of NCBI NO: 34911328 NR Description: putative zinc finger protein [Oryza sativa
MGGGNLHSLPPENASVSASYAVTVGNTKLSDAPVLFFVYCHKAFRAQLVELRRFATDAAEADSFSGDLAVELSRKFEFLKLVYKYHSAAEDEVIFLALDKRVKNIVSNYSLEHAGTDDLFTSIFHWLHVLEEEIGSRSDVLREVILCIGTIQSSICQHMLKEERQVFPLLIEKFSFREQASLVWQFICSVPVMVLEDFLPWMISHLSHEEKIEVENCIKDVAPNEDSLQQVISSWLLDDSQSSCGTPTEIMKGVQYVNVSKSLKKSPESHPSSGCFQRFWEWSKKSLSIPNVGRSPIHGLRLFQNAIEKDLRDIQEGLCQAKFQTLILDLDVLMARLNFLADVLVSYSNAFKKFFHPVLEEMTARRSSTAKQFNIDDCLENFQRLLYKSADDKTKTDNFLLQLQEELESLIIQVTKQFAIQRTEVFPIISKNCNHEMQKQLLYTSIHVLPLGLLKCVILWFSAHLSEEESQSILHFLSLEDSSPKKSFPRLLLQWLRFGYSGKTSVERFWKQLDVMFKVRCSCQKEHTEEASGSFSNQTQLQLCKVSKDVYPRKKDKSSTCFMSMDLAVGDMYETPYSSRMNQQMTFSGKLKPPLHLPDFFGEKNMDDPMIMDVKPIDLLFFFHKAMKMDLDYLVCGSTRLAADFRFLAEFQQRFHMIKFLYQIHSDAEDEIAFPALEAKGQLKNISHSFSIDHELETKHFDKVSFILNEMSELNMLVSTINTTAADHDRKMKYERLCLSLREICKSMHKLLSEHIQHEETELWGLFRNCFSIEEQEKIIGCMLGRISGEILQDMIPWLMESLTSDEQLAAMSLWRQATRKTMFVEWLTEWYNGHVLQEEAGEANNDPFGDSDPLEIVWKYLFEASADGEKGSMRSSLLKLPKTNFTGIMNQPPPNYKVEVGKKEEKDLERSESKKICRGSNQEGDKEQTDKMSQKVSQFGPSKKYEQLLTMSEEELVVVIKKISCDSSLDPQKKDYIKQNLLMSRWNISQRTYNLEPSSLSSNMETVHGQHPSYRDPHSLIFGCNHYKRNCKLLAPCCDKLFTCIRCHDEEADHSVDRKQITKMMCMKCLLIQPIGANCSNTSCKSSMGKYFCKICKLYDDERKIYHCPYCNLCRVGKGLGIDYFHCMKCNACMSRTLVEHVCREKCLEDNCPICHEYIFTSSSPVKALPCGHLMHSTCFQEYTCSHYTCPVCSKSLGDMQVYFKMLDALLAEEKMPDEYSNKTQVILCNDCGRKGNAPYHWLYHKCTTCGSYNSRLL

SEQ ID NO: 88989 - protein, 1101 aa, Arabidopsis thaliana
  peptide (1)..(1101): Ceres Seq. ID no. 12714655
  misc_feature (527)..(614): Pfam Name: Domain of Unknown function Pfam Description: Domain of Unknown function
  misc_feature (1)..(592): Homolog of NCBI NO: 15221896 NR Description: hypothetical protein; protein id: At1g18920.1
  misc_feature (1)..(327): Homolog of NCBI NO: 9279663 NR Description: gb|AAD55299.1~gene_id:MIE15.8~similar to unknown
  misc_feature (1)..(327): Homolog of NCBI NO: 15229615 NR Description: zinc finger protein, putative; protein id: supported by cDNA: gi_20453198 [Arabidopsis thaliana] AT3g18290/MIE15_8 [Arabidopsis thaliana]
  misc_feature (754)..(1101): Homolog of NCBI NO: 9279663 NR Description: gb|AAD55299.1~gene_id:MIE15.8~similar to unknown
  misc_feature (754)..(1101): Homolog of NCBI NO: 15229615 NR Description: zinc finger protein, putative; protein id: supported by cDNA: gi_20453198 [Arabidopsis thaliana] AT3g18290/MIE15_8 [Arabidopsis thaliana]
  misc_feature (457)..(700): Homolog of NCBI NO: 9279663 NR Description: gb|AAD55299.1~gene_id:MIE15.8~similar to unknown
  misc_feature (457)..(700): Homolog of NCBI NO: 15229615 NR Description: zinc finger protein, putative; protein id: supported by cDNA: gi_20453198 [Arabidopsis thaliana] AT3g18290/MIE15_8 [Arabidopsis thaliana]
  misc_feature (763)..(1101): Homolog of NCBI NO: 34911328 NR Description: putative zinc finger protein [Oryza sativa
  misc_feature (457)..(690): Homolog of NCBI NO: 34911328 NR Description: putative zinc finger protein [Oryza sativa
  misc_feature (1)..(14): Homolog of NCBI NO: 34911328 NR Description: putative zinc finger protein [Oryza sativa
MLKEERQVFPLLIEKFSFREQASLVWQFICSVPVMVLEDFLPWMISHLSHEEKIEVENCIKDVAPNEDSLQQVISSWLLDDSQSSCGTPTEIMKGVQYVNVSKSLKKSPESHPSSGCFQRFWEWSKKSLSIPNVGRSPIHGLRLFQNAIEKDLRDIQEGLCQAKFQTLILDLDVLMARLNFLADVLVSYSNAFKKFFHPVLEEMTARRSSTAKQFNIDDCLENFQRLLYKSADDKTKTDNFLLQLQEELESLIIQVTKQFAIQRTEVFPIISKNCNHEMQKQLLYTSIHVLPLGLLKCVILWFSAHLSEEESQSILHFLSLEDSSPKKSFPRLLLQWLRFGYSGKTSVERFWKQLDVMFKVRCSCQKEHTEEASGSFSNQTQLQLCKVSKDVYPRKKDKSSTCFMSMDLAVGDMYETPYSSRMNQQMTFSGKLKPPLHLPDFFGEKNMDDPMIMDVKPIDLLFFFHKAMKMDLDYLVCGSTRLAADFRFLAEFQQRFHMIKFLYQIHSDAEDEIAFPALEAKGQLKNISHSFSIDHELETKHFDKVSFILNEMSELNMLVSTINTTAADHDRKMKYERLCLSLREICKSMHKLLSEHIQHEETELWGLFRNCFSIEEQEKIIGCMLGRISGEILQDMIPWLMESLTSDEQLAAMSLWRQATRKTMFVEWLTEWYNGHVLQEEAGEANNDPFGDSDPLEIVWKYLFEASADGEKGSMRSSLLKLPKTNFTGIMNQPPPNYKVEVGKKEEKDLERSESKKICRGSNQEGDKEQTDKMSQKVSQFGPSKKYEQLLTMSEEELVVVIKKISCDSSLDPQKKDYIKQNLLMSRWNISQRTYNLEPSSLSSNMETVHGQHPSYRDPHSLIFGCNHYKRNCKLLAPCCDKLFTCIRCHDEEADHSVDRKQITKMMCMKCLLIQPIGANCSNTSCKSSMGKYFCKICKLYDDERKIYHCPYCNLCRVGKGLGIDYFHCMKCNACMSRTLVEHVCREKCLEDNCPICHEYIFTSSSPVKALPCGHLMHSTCFQEYTCSHYTCPVCSKSLGDMQVYFKMLDALLAEEKMPDEYSNKTQVILCNDCGRKGNAPYHWLYHKCTTCGSYNSRLL

SEQ ID NO: 88990 - protein, 1067 aa, Arabidopsis thaliana
  peptide (1)..(1067): Ceres Seq. ID no. 12714656
  misc_feature (493)..(580): Pfam Name: Domain of Unknown function Pfam Description: Domain of Unknown function
  misc_feature (1)..(558): Homolog of NCBI NO: 15221896 NR Description: hypothetical protein; protein id: At1g18920.1
  misc_feature (1)..(293): Homolog of NCBI NO: 9279663 NR Description: gb|AAD55299.1~gene_id:MIE15.8~similar to unknown
  misc_feature (1)..(293): Homolog of NCBI NO: 15229615 NR Description: zinc finger protein, putative; protein id: supported by cDNA: gi_20453198 [Arabidopsis thaliana] AT3g18290/MIE15_8 [Arabidopsis thaliana]
  misc_feature (720)..(1067): Homolog of NCBI NO: 9279663 NR Description: gb|AAD55299.1~gene_id:MIE15.8~similar to unknown
  misc_feature (720)..(1067): Homolog of NCBI NO: 15229615 NR Description: zinc finger protein, putative; protein id: supported by cDNA: gi_20453198 [Arabidopsis thaliana] AT3g18290/MIE15_8 [Arabidopsis thaliana]
  misc_feature (423)..(666): Homolog of NCBI NO: 9279663 NR Description: gb|AAD55299.1~gene_id:MIE15.8~similar to unknown
  misc_feature (423)..(666): Homolog of NCBI NO: 15229615 NR Description: zinc finger protein, putative; protein id: supported by cDNA: gi_20453198 [Arabidopsis thaliana] AT3g18290/MIE15_8 [Arabidopsis thaliana]
  misc_feature (729)..(1067): Homolog of NCBI NO: 34911328 NR Description: putative zinc finger protein [Oryza sativa
  misc_feature (423)..(656): Homolog of NCBI NO: 34911328 NR Description: putative zinc finger protein [Oryza sativa
  misc_feature (100)..(232): Homolog of NCBI NO: 34911328 NR Description: putative zinc finger protein [Oryza sativa
MVLEDFLPWMISHLSHEEKIEVENCIKDVAPNEDSLQQVISSWLLDDSQSSCGTPTEIMKGVQYVNVSKSLKKSPESHPSSGCFQRFWEWSKKSLSIPNVGRSPIHGLRLFQNAIEKDLRDIQEGLCQAKFQTLILDLDVLMARLNFLADVLVSYSNAFKKFFHPVLEEMTARRSSTAKQFNIDDCLENFQRLLYKSADDKTKTDNFLLQLQEELESLIIQVTKQFAIQRTEVFPIISKNCNHEMQKQLLYTSIHVLPLGLLKCVILWFSAHLSEEESQSILHFLSLEDSSPKKSFPRLLLQWLRFGYSGKTSVERFWKQLDVMFKVRCSCQKEHTEEASGSFSNQTQLQLCKVSKDVYPRKKDKSSTCFMSMDLAVGDMYETPYSSRMNQQMTFSGKLKPPLHLPDFFGEKNMDDPMIMDVKPIDLLFFFHKAMKMDLDYLVCGSTRLAADFRFLAEFQQRFHMIKFLYQIHSDAEDEIAFPALEAKGQLKNISHSFSIDHELETKHFDKVSFILNEMSELNMLVSTINTTAADHDRKMKYERLCLSLREICKSMHKLLSEHIQHEETELWGLFRNCFSIEEQEKIIGCMLGRISGEILQDMIPWLMESLTSDEQLAAMSLWRQATRKTMFVEWLTEWYNGHVLQEEAGEANNDPFGDSDPLEIVWKYLFEASADGEKGSMRSSLLKLPKTNFTGIMNQPPPNYKVEVGKKEEKDLERSESKKICRGSNQEGDKEQTDKMSQKVSQFGPSKKYEQLLTMSEEELVVVIKKISCDSSLDPQKKDYIKQNLLMSRWNISQRTYNLEPSSLSSNMETVHGQHPSYRDPHSLIFGCNHYKRNCKLLAPCCDKLFTCIRCHDEEADHSVDRKQITKMMCMKCLLIQPIGANCSNTSCKSSMGKYFCKICKLYDDERKIYHCPYCNLCRVGKGLGIDYFHCMKCNACMSRTLVEHVCREKCLEDNCPICHEYIFTSSSPVKALPCGHLMHSTCFQEYTCSHYTCPVCSKSLGDMQVYFKMLDALLAEEKMPDEYSNKTQVILCNDCGRKGNAPYHWLYHKCTTCGSYNSRLL

SEQ ID NO: 88991 - DNA, 1177 bp, Arabidopsis thaliana
  misc_feature (1)..(1177): Ceres Seq. ID no. 12714661
  misc_feature: MA Experiment ID: 108434 Result: Up-regulated in Transcription
  misc_feature: MA Experiment 108434 PARAMETER Experiment Name: At_Root_Tips_cDNA_P Parameter: Tissue Value: Root Tips
  misc_feature: MA Experiment ID: 108464 Result: Up-regulated in Transcription
  misc_feature: MA Experiment 108464 PARAMETER Experiment Name: At_Germinating_Seeds_cDNA_P Parameter: Age (day) Value: 4 vs. 0
  misc_feature: MA Experiment 108464 PARAMETER Experiment Name: At_Germinating_Seeds_cDNA_P Parameter: Tissue Value: Germinating Seeds
  misc_feature: MA Experiment ID: 108573 Result: Up-regulated in Transcription
  misc_feature: MA Experiment 108573 PARAMETER Experiment Name: At_Drought_cDNA_P Parameter: Timepoint (hr) Value: 6
  misc_feature: MA Experiment 108573 PARAMETER Experiment Name: At_Drought_cDNA_P Parameter: Tissue Value: Aerial
  misc_feature: MA Experiment 108573 PARAMETER Experiment Name: At_Drought_cDNA_P Parameter: Treatment Value: Drought vs. No Drought
  misc_feature: MA Experiment ID: 108574 Result: Down-regulated in Transcription
  misc_feature: MA Experiment 108574 PARAMETER Experiment Name: At_Wounding__cDNA_P Parameter: Timepoint (hr) Value: 1
  misc_feature: MA Experiment 108574 PARAMETER Experiment Name: At_Wounding__cDNA_P Parameter: Tissue Value: Aerial
  misc_feature: MA Experiment 108574 PARAMETER Experiment Name: At_Wounding__cDNA_P Parameter: Treatment Value: Wounding vs. No Wounding
  misc_feature: MA Experiment ID: 108576 Result: Down-regulated in Transcription
  misc_feature: MA Experiment 108576 PARAMETER Experiment Name: At_42deg_Heat_cDNA_P Parameter: Temperature (deg C) Value: 42 vs. 22
  misc_feature: MA Experiment 108576 PARAMETER Experiment Name: At_42deg_Heat_cDNA_P Parameter: Timepoint (hr) Value: 1
  misc_feature: MA Experiment 108576 PARAMETER Experiment Name: At_42deg_Heat_cDNA_P Parameter: Tissue Value: Aerial
  misc_feature: MA Experiment ID: 108595 Result: Down-regulated in Transcription
  misc_feature: MA Experiment 108595 PARAMETER Experiment Name: At_Ler-pi_Ovule_cDNA_P Parameter: Plant Line Value: null
  misc_feature: MA Experiment ID: 20000087 Result: Down-regulated in Transcription
  misc_feature: MA Experiment 20000087 PARAMETER Experiment Name: At_100uM_ABA_Mutants_cDNA_P Parameter: Plant Line Value: WS
  misc_feature: MA Experiment 20000087 PARAMETER Experiment Name: At_100uM_ABA_Mutants_cDNA_P Parameter: Timepoint (hr) Value: 6
  misc_feature: MA Experiment 20000087 PARAMETER Experiment Name: At_100uM_ABA_Mutants_cDNA_P Parameter: Tissue Value: Aerial
  misc_feature: MA Experiment 20000087 PARAMETER Experiment Name: At_100uM_ABA_Mutants_cDNA_P Parameter: Treatment Value: 100uM ABA vs. No Treatment
  misc_feature: MA Experiment ID: 20000185 Result: Up-regulated in Transcription
  misc_feature: MA Experiment 20000185 PARAMETER Experiment Name: At_Roots__P Parameter: Age (day) Value: 7 vs. 21
  misc_feature: MA Experiment 20000185 PARAMETER Experiment Name: At_Roots__P Parameter: Organism Value: A. thaliana
  misc_feature: MA Experiment 20000185 PARAMETER Experiment Name: At_Roots__P Parameter: Tissue Value: Roots vs. Whole Plant
  misc_feature: MA Experiment ID: 20000214 Result: Up-regulated in Transcription
  misc_feature: MA Experiment 20000214 PARAMETER Experiment Name: At_4deg_Cold_P Parameter: Timepoint (hr) Value: 6
  misc_feature: MA Experiment ID: 20000224 Result: Down-regulated in Transcription
  misc_feature: MA Experiment ID: 20000227 Result: Down-regulated in Transcription
  misc_feature: MA Experiment 20000227 PARAMETER Experiment Name: At_Root-Tips-vs-Tops_P Parameter: Tissue Value: Root Tips vs. Root Tops
  misc_feature: MA Experiment ID: 20000234 Result: Down-regulated in Transcription
  misc_feature: MA Experiment 20000234 PARAMETER Experiment Name: At_Siliques_P Parameter: Age (day) Value: 21
  misc_feature: MA Experiment 20000234 PARAMETER Experiment Name: At_Siliques_P Parameter: Organism Value: A. thaliana
  misc_feature: MA Experiment 20000234 PARAMETER Experiment Name: At_Siliques_P Parameter: Plant Line Value: WS
  misc_feature: MA Experiment 20000234 PARAMETER Experiment Name: At_Siliques_P Parameter: Tissue Value: Less Than 5mm Siliques vs. Whole Plant
  misc_feature: MA Experiment ID: 20000264 Result: Down-regulated in Transcription
  misc_feature: MA Experiment 20000264 PARAMETER Experiment Name: At_Open_Flower_P Parameter: Age (day) Value: 21
  misc_feature: MA Experiment 20000264 PARAMETER Experiment Name: At_Open_Flower_P Parameter: Plant Line Value: WS
  misc_feature: MA Experiment 20000264 PARAMETER Experiment Name: At_Open_Flower_P Parameter: Tissue Value: Open Flower vs. Whole Plant
  misc_feature: MA Experiment ID: 20000286 Result: Down-regulated in Transcription
  misc_feature: MA Experiment 20000286 PARAMETER Experiment Name: At_Open_Flower_P Parameter: Age (day) Value: 21
  misc_feature: MA Experiment 20000286 PARAMETER Experiment Name: At_Open_Flower_P Parameter: Plant Line Value: WS
  misc_feature: MA Experiment 20000286 PARAMETER Experiment Name: At_Open_Flower_P Parameter: Tissue Value: Half Open vs. Whole Plant
  misc_feature: MA Experiment ID: 20000439 Result: Up-regulated in Transcription
  misc_feature: MA Experiment 20000439 PARAMETER Experiment Name: At_Roots__P Parameter: Age (day) Value: 14 vs. 21
  misc_feature: MA Experiment 20000439 PARAMETER Experiment Name: At_Roots__P Parameter: Organism Value: A. thaliana
  misc_feature: MA Experiment 20000439 PARAMETER Experiment Name: At_Roots__P Parameter: Tissue Value: Roots vs. Whole Plant
  misc_feature: MA Experiment ID: 20001248 Result: Up-regulated in Transcription
  misc_feature: MA Experiment 20001248 PARAMETER Experiment Name: At_Far-red-induction_P Parameter: Age (day) Value: 7
  misc_feature: MA Experiment 20001248 PARAMETER Experiment Name: At_Far-red-induction_P Parameter: Light Value: Far-red vs. White
  misc_feature: MA Experiment 20001248 PARAMETER Experiment Name: At_Far-red-induction_P Parameter: Organism Value: A. thaliana
  misc_feature: MA Experiment 20001248 PARAMETER Experiment Name: At_Far-red-induction_P Parameter: Plant Line Value: Columbia
  misc_feature: MA Experiment 20001248 PARAMETER Experiment Name: At_Far-red-induction_P Parameter: Timepoint (hr) Value: 4
  misc_feature: MA Experiment 20001248 PARAMETER Experiment Name: At_Far-red-induction_P Parameter: Tissue Value: Whole Plant
  misc_feature: MA Experiment ID: 20001450 Result: Up-regulated in Transcription
  misc_feature: MA Experiment 20001450 PARAMETER Experiment Name: At_Far-red-induction_P Parameter: Age (day) Value: 7
  misc_feature: MA Experiment 20001450 PARAMETER Experiment Name: At_Far-red-induction_P Parameter: Light Value: Far-red vs. White
  misc_feature: MA Experiment 20001450 PARAMETER Experiment Name: At_Far-red-induction_P Parameter: Organism Value: A. thaliana
  misc_feature: MA Experiment 20001450 PARAMETER Experiment Name: At_Far-red-induction_P Parameter: Plant Line Value: Columbia
  misc_feature: MA Experiment 20001450 PARAMETER Experiment Name: At_Far-red-induction_P Parameter: Timepoint (hr) Value: 8
  misc_feature: MA Experiment 20001450 PARAMETER Experiment Name: At_Far-red-induction_P Parameter: Tissue Value: Whole Plant
  misc_feature: MA Experiment ID: 20001558 Result: Down-regulated in Transcription
  misc_feature: MA Experiment 20001558 PARAMETER Experiment Name: At_Drought_Soil_Dry_P Parameter: Age (day) Value: 27
  misc_feature: MA Experiment 20001558 PARAMETER Experiment Name: At_Drought_Soil_Dry_P Parameter: Organism Value: A. thaliana
  misc_feature: MA Experiment 20001558 PARAMETER Experiment Name: At_Drought_Soil_Dry_P Parameter: Plant Line Value: WS
  misc_feature: MA Experiment 20001558 PARAMETER Experiment Name: At_Drought_Soil_Dry_P Parameter: Post Timepoint (hr) Value: 6
  misc_feature: MA Experiment 20001558 PARAMETER Experiment Name: At_Drought_Soil_Dry_P Parameter: Post-Treatment Value: Re-Water vs. No Drought
  misc_feature: MA Experiment 20001558 PARAMETER Experiment Name: At_Drought_Soil_Dry_P Parameter: Timepoint (day) Value: 13
  misc_feature: MA Experiment 20001558 PARAMETER Experiment Name: At_Drought_Soil_Dry_P Parameter: Treatment Value: Drought vs. No Drought
  misc_feature: MA Experiment ID: 20001560 Result: Down-regulated in Transcription
  misc_feature: MA Experiment 20001560 PARAMETER Experiment Name: At_Drought_Soil_Dry_P Parameter: Age (day) Value: 28
  misc_feature: MA Experiment 20001560 PARAMETER Experiment Name: At_Drought_Soil_Dry_P Parameter: Organism Value: A. thaliana
  misc_feature: MA Experiment 20001560 PARAMETER Experiment Name: At_Drought_Soil_Dry_P Parameter: Plant Line Value: WS
  misc_feature: MA Experiment 20001560 PARAMETER Experiment Name: At_Drought_Soil_Dry_P Parameter: Post Timepoint (hr) Value: None
  misc_feature: MA Experiment 20001560 PARAMETER Experiment Name: At_Drought_Soil_Dry_P Parameter: Post-Treatment Value: None
  misc_feature: MA Experiment 20001560 PARAMETER Experiment Name: At_Drought_Soil_Dry_P Parameter: Timepoint (day) Value: 14
  misc_feature: MA Experiment 20001560 PARAMETER Experiment Name: At_Drought_Soil_Dry_P Parameter: Treatment Value: Drought vs. No Drought
aactcacaccactccattgcccattgctctgtgtactttgcttctttaggagaaagaaagcacaaggggcaaaatcggaaagattatcatggccgacggtagtactagttcttcggagtccactaccgcctgcgctggaagcggcacaagaagagagattatgctgttcggagtcagggttgtgcttgacccgatgagaaagtgcgtgagtttgaacaatctgtctgactatgaacagacggcggagactccaaagatcgacggcgaagatagagatgaacaagatatgaacaaaaccccggccggttacgcctcggcggatgaagctcttcccatgtcttcttctaacggcaaaatcgagaggaaacgaggagttccatggactgaagaagaacacaagctgttcttgcttgggctgcagagagtcggtaaaggagattggaaaggaatatcaagaaactttgtcaagaccagaacctctacacaagttgctagtcatgctcagaaatacttcctcaggcgaagtaatcttaaccgtcgccgccgaagatctagcctttttgacatgactactgatacggtcatacccatggaagaagatcaccaagtgcttatacaggagaacacatctcaatcatcttctcctgtaccggaaatcaacaacttctctatacatccggttatgcaagtctttcccgagttcccggtaccaacagggaatcaatcatacggacagcttacttcatcgaatctcatcaatttggttccattaacttttcagtcaagtccagcaccgctttctctcaacctctcactagcttcatctaatcttaatgaaccatctccttcaatgcatccagcattcaacacgattggagtcgcttagagcttatcctaaaggtgaaaatctgcaacacaccctgtttgtttctttgctgtacagataggtcttgactttgttataaaaaaattcgtcaaatttatgtatttggctaaaaaaaatctgttgaaaagaagaataataaacagagtttggagataggacttaagtggggttttagggttcataatcatcctgtgtttttccttccatgtttggaagttgttgtaatactctctaagttcattcgtgtggatctatcaaaacttataaatcatattaacgttatgtttgttt

SEQ ID NO: 88992 - protein, 265 aa, Arabidopsis thaliana; identical to SEQ ID NO: 40934
  peptide (1)..(265): Ceres Seq. ID no. 12714662
  misc_feature (95)..(142): Pfam Name: Myb-like DNA-binding domain Pfam Description: Myb-like DNA-binding domain
  misc_feature (1)..(265): Homolog of NCBI NO: 15221408 NR Description: myb family transcription factor; protein id: supported by cDNA: 117643., supported by cDNA: gi_17979192, by cDNA: gi_20465856 [Arabidopsis thaliana]
  misc_feature (5)..(259): Homolog of NCBI NO: 15221922 NR Description: myb family transcription factor; protein id: supported by cDNA: 41381., supported by cDNA: gi_15028048, by cDNA: gi_19310830 [Arabidopsis thaliana]
  misc_feature (5)..(259): Homolog of NCBI NO: 21593684 NR Description: Myb-related transcription activator, putative
  misc_feature (6)..(188): Homolog of NCBI NO: 28629811 NR Description: transcription factor Myb1 [Malus xiaojinensis]
  misc_feature (19)..(188): Homolog of NCBI NO: 15222521 NR Description: DNA binding protein MybSt1, putative; protein id: [Arabidopsis thaliana] >gi|25406021|pir||F96722 hypothetical
  misc_feature (22)..(220): Homolog of NCBI NO: 15238083 NR Description: Myb-related transcription activator-like; protein At5g47390.1, supported by cDNA: 102806., supported by cDNA:
  misc_feature (22)..(163): Homolog of NCBI NO: 37536856 NR Description: putative Myb-related protein [Oryza sativa
  misc_feature (22)..(163): Homolog of NCBI NO: 24850307 NR Description: transcription factor MYBS3 [Oryza sativa
  misc_feature (8)..(194): Homolog of NCBI NO: 34906364 NR Description: unnamed protein product [Oryza sativa (japonica group)] >gi|9558504|dbj|BAB03423.1| unnamed protein product
  misc_feature (5)..(163): Homolog of NCBI NO: 7705206 NR Description: MybSt1 [Solanum tuberosum]

SEQ ID NO: 88993 - protein, 241 aa, Arabidopsis thaliana; identical to SEQ ID NO: 40935
  peptide (1)..(241): Ceres Seq. ID no. 12714663
  misc_feature (71)..(118): Pfam Name: Myb-like DNA-binding domain Pfam Description: Myb-like DNA-binding domain
  misc_feature (1)..(241): Homolog of NCBI NO: 15221408 NR Description: myb family transcription factor; protein id: supported by cDNA: 117643., supported by cDNA: gi_17979192, by cDNA: gi_20465856 [Arabidopsis thaliana]
  misc_feature (1)..(235): Homolog of NCBI NO: 15221922 NR Description: myb family transcription factor; protein id: supported by cDNA: 41381., supported by cDNA: gi_15028048, by cDNA: gi_19310830 [Arabidopsis thaliana]
  misc_feature (1)..(235): Homolog of NCBI NO: 21593684 NR Description: Myb-related transcription activator, putative
  misc_feature (1)..(164): Homolog of NCBI NO: 28629811 NR Description: transcription factor Myb1 [Malus xiaojinensis]
  misc_feature (1)..(164): Homolog of NCBI NO: 15222521 NR Description: DNA binding protein MybSt1, putative; protein id: [Arabidopsis thaliana] >gi|25406021|pir||F96722 hypothetical
  misc_feature (1)..(196): Homolog of NCBI NO: 15238083 NR Description: Myb-related transcription activator-like; protein At5g47390.1, supported by cDNA: 102806., supported by cDNA:
  misc_feature (1)..(139): Homolog of NCBI NO: 37536856 NR Description: putative Myb-related protein [Oryza sativa
  misc_feature (1)..(139): Homolog of NCBI NO: 24850307 NR Description: transcription factor MYBS3 [Oryza sativa
  misc_feature (1)..(170): Homolog of NCBI NO: 34906364 NR Description: unnamed protein product [Oryza sativa (japonica group)] >gi|9558504|dbj|BAB03423.1| unnamed protein product
  misc_feature (1)..(139): Homolog of NCBI NO: 7705206 NR Description: MybSt1 [Solanum tuberosum]

SEQ ID NO: 88994 - protein, 230 aa, Arabidopsis thaliana; identical to SEQ ID NO: 40936
  peptide (1)..(230): Ceres Seq. ID no. 12714664
  misc_feature (60)..(107): Pfam Name: Myb-like DNA-binding domain Pfam Description: Myb-like DNA-binding domain
  misc_feature (1)..(230): Homolog of NCBI NO: 15221408 NR Description: myb family transcription factor; protein id: supported by cDNA: 117643., supported by cDNA: gi_17979192, by cDNA: gi_20465856 [Arabidopsis thaliana]
  misc_feature (1)..(224): Homolog of NCBI NO: 15221922 NR Description: myb family transcription factor; protein id: supported by cDNA: 41381., supported by cDNA: gi_15028048, by cDNA: gi_19310830 [Arabidopsis thaliana]
  misc_feature (1)..(224): Homolog of NCBI NO: 21593684 NR Description: Myb-related transcription activator, putative
  misc_feature (1)..(153): Homolog of NCBI NO: 28629811 NR Description: transcription factor Myb1 [Malus xiaojinensis]
  misc_feature (1)..(153): Homolog of NCBI NO: 15222521 NR Description: DNA binding protein MybSt1, putative; protein id: [Arabidopsis thaliana] >gi|25406021|pir||F96722 hypothetical
  misc_feature (1)..(185): Homolog of NCBI NO: 15238083 NR Description: Myb-related transcription activator-like; protein At5g47390.1, supported by cDNA: 102806., supported by cDNA:
  misc_feature (1)..(128): Homolog of NCBI NO: 37536856 NR Description: putative Myb-related protein [Oryza sativa
  misc_feature (1)..(128): Homolog of NCBI NO: 24850307 NR Description: transcription factor MYBS3 [Oryza sativa
  misc_feature (1)..(159): Homolog of NCBI NO: 34906364 NR Description: unnamed protein product [Oryza sativa (japonica group)] >gi|9558504|dbj|BAB03423.1| unnamed protein product
  misc_feature (1)..(128): Homolog of NCBI NO: 7705206 NR Description: MybSt1 [Solanum tuberosum]

SEQ ID NO: 88995 - DNA, 663 bp, Arabidopsis thaliana
  misc_feature (1)..(663): Ceres Seq. ID no. 12714690
  misc_feature: MA Experiment ID: 20000184 Result: Down-regulated in Transcription
  misc_feature: MA Experiment 20000184 PARAMETER Experiment Name: At_Shoots__P Parameter: Age (day) Value: 7
  misc_feature: MA Experiment 20000184 PARAMETER Experiment Name: At_Shoots__P Parameter: Tissue Value: Shoots vs. Whole Plant
  misc_feature: MA Experiment ID: 20000496 Result: Up-regulated in Transcription
  misc_feature: MA Experiment 20000496 PARAMETER Experiment Name: At_Guard_Cells_P Parameter: Harvest Date Value: 7/19/2002
  misc_feature: MA Experiment 20000496 PARAMETER Experiment Name: At_Guard_Cells_P Parameter: Organism Value: Canola
  misc_feature: MA Experiment 20000496 PARAMETER Experiment Name: At_Guard_Cells_P Parameter: Tissue Value: Guard Cells vs. Leaves
  misc_feature: MA Experiment ID: 20001247 Result: Down-regulated in Transcription
  misc_feature: MA Experiment 20001247 PARAMETER Experiment Name: At_Far-red-induction_P Parameter: Age (day) Value: 7
  misc_feature: MA Experiment 20001247 PARAMETER Experiment Name: At_Far-red-induction_P Parameter: Light Value: Far-red vs. White
  misc_feature: MA Experiment 20001247 PARAMETER Experiment Name: At_Far-red-induction_P Parameter: Organism Value: A. thaliana
  misc_feature: MA Experiment 20001247 PARAMETER Experiment Name: At_Far-red-induction_P Parameter: Plant Line Value: Columbia
  misc_feature: MA Experiment 20001247 PARAMETER Experiment Name: At_Far-red-induction_P Parameter: Timepoint (hr) Value: 1
  misc_feature: MA Experiment 20001247 PARAMETER Experiment Name: At_Far-red-induction_P Parameter: Tissue Value: Whole Plant
  misc_feature: MA Experiment ID: 20001451 Result: Down-regulated in Transcription
  misc_feature: MA Experiment 20001451 PARAMETER Experiment Name: At_Far-red-induction_P Parameter: Age (day) Value: 7
  misc_feature: MA Experiment 20001451 PARAMETER Experiment Name: At_Far-red-induction_P Parameter: Light Value: Far-red vs. White
  misc_feature: MA Experiment 20001451 PARAMETER Experiment Name: At_Far-red-induction_P Parameter: Organism Value: A. thaliana
  misc_feature: MA Experiment 20001451 PARAMETER Experiment Name: At_Far-red-induction_P Parameter: Plant Line Value: Columbia
  misc_feature: MA Experiment 20001451 PARAMETER Experiment Name: At_Far-red-induction_P Parameter: Timepoint (hr) Value: 24
  misc_feature: MA Experiment 20001451 PARAMETER Experiment Name: At_Far-red-induction_P Parameter: Tissue Value: Whole Plant
atggtgctgaaagaagaatcatttttcaaccctaatggctcgacaaaagactctagtgatactgcatctaccctgctatctgagaaatatgctgattttacaaagcaaagaaatctatccgctcgagcatcgtctatgctggaagctgaacgagattcatcaaaaagatggagtcctattcttgagatgcagtacagaggaggacttttcaagggaagatgccaaggaggccttcccgaaggaaagacagacttcttagttaatccgaaagtaacagctgactattcccaccagggtcgtttggtacttggagatggaagcatatatgatggaatgtggcacaacggtaaaagatctggtctcggaacattctacttcaagaatggagacgtgttccaaggcacatggagagaagatttaatacacggaaagggttggttttatttccacaaaggtgatcgatggtttgcaaatttctggaaaggaaaagccagtggcgaaggccggttctattcaaagtccggtgagatattctttggacatttcaaagatggttggcgccacggacaattcctctgtatagatttggatggaacaagatactctgaaacttgggacgacggtgttctcattgaccggaaacaagtggacgccggagattga

SEQ ID NO: 88996 - protein, 220 aa, Arabidopsis thaliana
  peptide (1)..(220): Ceres Seq. ID no. 12714691
  misc_feature (132)..(154): Pfam Name: MORN repeat Pfam Description: MORN repeat
  misc_feature (4)..(220): Homolog of NCBI NO: 15222086 NR Description: hypothetical protein; protein id: At1g75010.1
  misc_feature (4)..(220): Homolog of NCBI NO: 25406404 NR Description: hypothetical protein F9E10.14 [imported] -
  misc_feature (4)..(220): Homolog of NCBI NO: 5882723 NR Description: F25A4.3 [Arabidopsis thaliana]
  misc_feature (98)..(205): Homolog of NCBI NO: 29346157 NR Description: putative phosphatidylinositol-4-phosphate 5-kinase
  misc_feature (67)..(208): Homolog of NCBI NO: 40062709 NR Description: MORN repeat protein [uncultured bacterium 314]
  misc_feature (65)..(209): Homolog of NCBI NO: 22330351 NR Description: putative phosphatidylinositol-4-phosphate protein id: At1g60890.1, supported by cDNA: gi_18491176
  misc_feature (65)..(209): Homolog of NCBI NO: 25404297 NR Description: hypothetical protein T7P1.4 [imported] -
  misc_feature (63)..(210): Homolog of NCBI NO: 29247595 NR Description: GLP_302_43026_44162 [Giardia lamblia ATCC 50803]
  misc_feature (67)..(209): Homolog of NCBI NO: 29346157 NR Description: putative phosphatidylinositol-4-phosphate 5-kinase
  misc_feature (64)..(209): Homolog of NCBI NO: 40062709 NR Description: MORN repeat protein [uncultured bacterium 314]
MVLKEESFFNPNGSTKDSSDTASTLLSEKYADFTKQRNLSARASSMLEAERDSSKRWSPILEMQYRGGLFKGRCQGGLPEGKTDFLVNPKVTADYSHQGRLVLGDGSIYDGMWHNGKRSGLGTFYFKNGDVFQGTWREDLIHGKGWFYFHKGDRWFANFWKGKASGEGRFYSKSGEIFFGHFKDGWRHGQFLCIDLDGTRYSETWDDGVLIDRKQVDAGD

SEQ ID NO: 88997 - protein, 175 aa, Arabidopsis thaliana
  peptide (1)..(175): Ceres Seq. ID no. 12714692
  misc_feature (87)..(109): Pfam Name: MORN repeat Pfam Description: MORN repeat
  misc_feature (1)..(175): Homolog of NCBI NO: 15222086 NR Description: hypothetical protein; protein id: At1g75010.1
  misc_feature (1)..(175): Homolog of NCBI NO: 25406404 NR Description: hypothetical protein F9E10.14 [imported] -
  misc_feature (1)..(175): Homolog of NCBI NO: 5882723 NR Description: F25A4.3 [Arabidopsis thaliana]
  misc_feature (53)..(160): Homolog of NCBI NO: 29346157 NR Description: putative phosphatidylinositol-4-phosphate 5-kinase
  misc_feature (22)..(163): Homolog of NCBI NO: 40062709 NR Description: MORN repeat protein [uncultured bacterium 314]
  misc_feature (20)..(164): Homolog of NCBI NO: 22330351 NR Description: putative phosphatidylinositol-4-phosphate protein id: At1g60890.1, supported by cDNA: gi_18491176
  misc_feature (20)..(164): Homolog of NCBI NO: 25404297 NR Description: hypothetical protein T7P1.4 [imported] -
  misc_feature (18)..(165): Homolog of NCBI NO: 29247595 NR Description: GLP_302_43026_44162 [Giardia lamblia ATCC 50803]
  misc_feature (22)..(164): Homolog of NCBI NO: 29346157 NR Description: putative phosphatidylinositol-4-phosphate 5-kinase
  misc_feature (19)..(164): Homolog of NCBI NO: 40062709 NR Description: MORN repeat protein [uncultured bacterium 314]
MLEAERDSSKRWSPILEMQYRGGLFKGRCQGGLPEGKTDFLVNPKVTADYSHQGRLVLGDGSIYDGMWHNGKRSGLGTFYFKNGDVFQGTWREDLIHGKGWFYFHKGDRWFANFWKGKASGEGRFYSKSGEIFFGHFKDGWRHGQFLCIDLDGTRYSETWDDGVLIDRKQVDAGD

SEQ ID NO: 88998 - protein, 158 aa, Arabidopsis thaliana
  peptide (1)..(158): Ceres Seq. ID no. 12714693
  misc_feature (70)..(92): Pfam Name: MORN repeat Pfam Description: MORN repeat
  misc_feature (1)..(158): Homolog of NCBI NO: 15222086 NR Description: hypothetical protein; protein id: At1g75010.1
  misc_feature (1)..(158): Homolog of NCBI NO: 25406404 NR Description: hypothetical protein F9E10.14 [imported] -
  misc_feature (1)..(158): Homolog of NCBI NO: 5882723 NR Description: F25A4.3 [Arabidopsis thaliana]
  misc_feature (36)..(143): Homolog of NCBI NO: 29346157 NR Description: putative phosphatidylinositol-4-phosphate 5-kinase
  misc_feature (5)..(146): Homolog of NCBI NO: 40062709 NR Description: MORN repeat protein [uncultured bacterium 314]
  misc_feature (3)..(147): Homolog of NCBI NO: 22330351 NR Description: putative phosphatidylinositol-4-phosphate protein id: At1g60890.1, supported by cDNA: gi_18491176
  misc_feature (3)..(147): Homolog of NCBI NO: 25404297 NR Description: hypothetical protein T7P1.4 [imported] -
  misc_feature (1)..(148): Homolog of NCBI NO: 29247595 NR Description: GLP_302_43026_44162 [Giardia lamblia ATCC 50803]
  misc_feature (5)..(147): Homolog of NCBI NO: 29346157 NR Description: putative phosphatidylinositol-4-phosphate 5-kinase
  misc_feature (2)..(147): Homolog of NCBI NO: 40062709 NR Description: MORN repeat protein [uncultured bacterium 314]
MQYRGGLFKGRCQGGLPEGKTDFLVNPKVTADYSHQGRLVLGDGSIYDGMWHNGKRSGLGTFYFKNGDVFQGTWREDLIHGKGWFYFHKGDRWFANFWKGKASGEGRFYSKSGEIFFGHFKDGWRHGQFLCIDLDGTRYSETWDDGVLIDRKQVDAGD

SEQ ID NO: 88999 - DNA, 741 bp, Arabidopsis thaliana
  misc_feature (1)..(741): Ceres Seq. ID no. 12714698
  misc_feature: MA Experiment ID: 20000355 Result: Down-regulated in Transcription
  misc_feature: MA Experiment 20000355 PARAMETER Experiment Name: At_Siliques_Sub_P Parameter: Age (day) Value: 21
  misc_feature: MA Experiment 20000355 PARAMETER Experiment Name: At_Siliques_Sub_P Parameter: Organism Value: A. thaliana
  misc_feature: MA Experiment 20000355 PARAMETER Experiment Name: At_Siliques_Sub_P Parameter: Plant Line Value: WS
  misc_feature: MA Experiment 20000355 PARAMETER Experiment Name: At_Siliques_Sub_P Parameter: Tissue Value: Less Than 5mm Siliques vs. Whole Plant
  misc_feature: MA Experiment ID: 20000440 Result: Up-regulated in Transcription
  misc_feature: MA Experiment 20000440 PARAMETER Experiment Name: At_Closed-Flower__Sub_P Parameter: Tissue Value: Closed Flower vs. Whole Plant
atggcgaattactcaagtattcacattctcttcttggtcttcatcacaagcggcattgctgtttccgccgccaccgtcttcactttacagaacagttgtccttacaccgtttggcctggaattctctccggcaacgacaacaccctcggcgacggcggatttcccttaacaccaggcgcttccgtacagctcacggctcctgcaggatggtcaggacggttctgggctcgtaccggctgcaacttcgacgcctccggccacggtaactgcggcaccggagactgcggcggtgttcttaaatgtaacggcggcggagttccaccagtcactctggctgaattcacacttgtaggcgacggcggcaaggatttctacgacgtgagtctcgtcgacggttacaatgtcgagatggggattaaacctcaaggaggttccggtgattgccattacgccggctgcgtcgccgacgtcaacgcggtttgccctaacgagcttcggctcatggatccacatacaggaatcatcgcggcgtgtaaaagcgcttgtgcggcgtttaattctgaggagttctgttgtaccggtgctcacgcgacgccgcaaacttgttctccgacgcattactcggcgatgtttaaaagcgcttgccctggtgcttacagttacgcctacgacgacgccacgagcaccttcacttgtaccggctctaactacttgatctctttctgccccacccggaactaa

SEQ ID NO: 89000 - protein, 246 aa, Arabidopsis thaliana
  peptide (1)..(246): Ceres Seq. ID no. 12714699
  misc_feature (31)..(243): Pfam Name: Thaumatin family Pfam Description: Thaumatin family
  misc_feature (1)..(246): Homolog of NCBI NO: 15222090 NR Description: thaumatin-like protein; protein id: At1g75050.1
  misc_feature (1)..(246): Homolog of NCBI NO: 15222088 NR Description: thaumatin-like protein (PR-5); protein id: supported by cDNA: gi_2435405 [Arabidopsis thaliana]
  misc_feature (1)..(246): Homolog of NCBI NO: 2435406 NR Description: thaumatin-like protein [Arabidopsis thaliana]
  misc_feature (1)..(243): Homolog of NCBI NO: 15222089 NR Description: thaumatin-like protein; protein id: At1g75040.1, by cDNA: gi_14334527, supported by cDNA: gi_1448918, supported by
  misc_feature (1)..(242): Homolog of NCBI NO: 30686314 NR Description: thaumatin family [Arabidopsis thaliana]
  misc_feature (1)..(242): Homolog of NCBI NO: 28973703 NR Description: putative pathogenesis-related protein 5 precursor
  misc_feature (19)..(243): Homolog of NCBI NO: 6273385 NR Description: SCUTL2 [Vitis vinifera]
  misc_feature (1)..(172): Homolog of NCBI NO: 5882717 NR Description: Identical to gb|U83490 thaumatin-like protein Arabidopsis thaliana. (This gene is cut off.) EST gb|T20787 comes
  misc_feature (18)..(245): Homolog of NCBI NO: 20330768 NR Description: Putative thaumatin-like protein [Oryza sativa
  misc_feature (5)..(244): Homolog of NCBI NO: 18420282 NR Description: putative thaumatin-like protein; protein id: supported by cDNA: 32152., supported by cDNA: gi_17979354, by cDNA: gi_20466020 [Arabidopsis thaliana]
MANYSSIHILFLVFITSGIAVSAATVFTLQNSCPYTVWPGILSGNDNTLGDGGFPLTPGASVQLTAPAGWSGRFWARTGCNFDASGHGNCGTGDCGGVLKCNGGGVPPVTLAEFTLVGDGGKDFYDVSLVDGYNVEMGIKPQGGSGDCHYAGCVADVNAVCPNELRLMDPHTGIIAACKSACAAFNSEEFCCTGAHATPQTCSPTHYSAMFKSACPGAYSYAYDDATSTFTCTGSNYLISFCPTRN

SEQ ID NO: 89001 - DNA, 1197 bp, Arabidopsis thaliana
  misc_feature (1)..(1197): Ceres Seq. ID no. 12714706
  misc_feature: MA Experiment ID: 20000315 Result: Down-regulated in Transcription
  misc_feature: MA Experiment 20000315 PARAMETER Experiment Name: At_14day_Shoots-Roots_Sub_P Parameter: Age (day) Value: 14
  misc_feature: MA Experiment 20000315 PARAMETER Experiment Name: At_14day_Shoots-Roots_Sub_P Parameter: Organism Value: A. thaliana
  misc_feature: MA Experiment 20000315 PARAMETER Experiment Name: At_14day_Shoots-Roots_Sub_P Parameter: Plant Line Value: WS
  misc_feature: MA Experiment 20000315 PARAMETER Experiment Name: At_14day_Shoots-Roots_Sub_P Parameter: Tissue Value: Shoots vs. Whole Plant
  misc_feature: MA Experiment ID: 20000355 Result: Up-regulated in Transcription
  misc_feature: MA Experiment 20000355 PARAMETER Experiment Name: At_Siliques_Sub_P Parameter: Age (day) Value: 21
  misc_feature: MA Experiment 20000355 PARAMETER Experiment Name: At_Siliques_Sub_P Parameter: Organism Value: A. thaliana
  misc_feature: MA Experiment 20000355 PARAMETER Experiment Name: At_Siliques_Sub_P Parameter: Plant Line Value: WS
  misc_feature: MA Experiment 20000355 PARAMETER Experiment Name: At_Siliques_Sub_P Parameter: Tissue Value: Less Than 5mm Siliques vs. Whole Plant
  misc_feature: MA Experiment ID: 20000440 Result: Up-regulated in Transcription
  misc_feature: MA Experiment 20000440 PARAMETER Experiment Name: At_Closed-Flower__Sub_P Parameter: Tissue Value: Closed Flower vs. Whole Plant
gtatatgccttcgtagtaaaattttaatgttgtgattttggatgttctccttgtcttcctccttcataagatgggtgtgttttcattctccagcggtgtgcaatgctccagaaaaaaaaaaaatcttaagtggctatacaccacaagttatacactagaagcaaaaagttcacgtctatctatcgaagacgacgaagcgttcttggcacccgagataaatgccttcggggatcagttcagggactacgatgccgagaatgagaggcagaaaggcgtggaagccttttagaaatctcaacacattaaccaaactgtcgactttgtgatagagacgagggcagaatttggtaaattggataaagaagtgatgagcatttgggaatgttgtgagcttcttaatgaggtggtggacgagagtgatccagatctcgacgagcctcaaattcaacatttgcttcaatctgccgaagccatcagcaaggattaccttagcgaagcttggcttcatctaaccgctctcattcatggtgacatagattccttgttaggtgtgcatttgatgaatctaacgtacaacacgggtatttaaccaaaaatggcatctacagtcaagcatgtggactaaacaatgagcatgatgtcatggggccatgacgactacatgtacatggaatttacactcaaggatgtggattaaacaatatagttaagcaaagttcattttgacttgatcttcatcacgtcaacatgaactttgattttactgtataacttgtatttactgtaataacaacaatatataacaattagaggttgtagatattatgatcaattacttaatcatgtcttgatcctaataactacggtctctgaattgctgtatattattattattacagcaagtacaagttataccgcaagatcaaagttcacgttgatgtggagaaagtcaagtcctactagatgtctctgataggtggtggtggagaaagttcacgttgatctagaaatatattccggaggtggtggtgaagtgtggagaagaaaagaagtggggcatcacttagaagaattcaagaaatacagatagtacaatatcttaaataaagagacatttgtatatgtatcataagttaacataactccataaacaaggagaactagtgtatctacaaagattgtaagtgtaatccatat

SEQ ID NO: 89002 - protein, 73 aa, Arabidopsis thaliana
  peptide (1)..(73): Ceres Seq. ID no. 12714707
  misc_feature (1)..(60): Pfam Name: Family of unknown function (DUF706) Pfam Description: Family of unknown function (DUF706)
  misc_feature (1)..(60): Homolog of NCBI NO: 7487428 NR Description: hypothetical protein T25K17.70 - Arabidopsis >gi|4539422|emb|CAB38955.1| putative protein [Arabidopsis >gi|7269477|emb|CAB79481.1| putative protein [Arabidopsis
  misc_feature (1)..(60): Homolog of NCBI NO: 30687167 NR Description: expressed protein [Arabidopsis thaliana]
  misc_feature (1)..(60): Homolog of NCBI NO: 21536858 NR Description: unknown [Arabidopsis thaliana]
  misc_feature (1)..(60): Homolog of NCBI NO: 15241891 NR Description: putative protein; protein id: At5g56640.1, by cDNA: 113619. [Arabidopsis thaliana] gene_id:MIK19.9~pir||T06010~similar to unknown protein
  misc_feature (1)..(60): Homolog of NCBI NO: 18399158 NR Description: expressed protein; protein id: At2g19800.1, by cDNA: 254633. [Arabidopsis thaliana]
  misc_feature (1)..(60): Homolog of NCBI NO: 21554393 NR Description: unknown [Arabidopsis thaliana]
  misc_feature (1)..(60): Homolog of NCBI NO: 7262695 NR Description: Strong similarity to an unknown protein from
  misc_feature (1)..(60): Homolog of NCBI NO: 7527731 NR Description: T5E21.2 [Arabidopsis thaliana]
  misc_feature (1)..(60): Homolog of NCBI NO: 30683840 NR Description: expressed protein [Arabidopsis thaliana] unknown protein [Arabidopsis thaliana]
  misc_feature (1)..(60): Homolog of NCBI NO: 26451656 NR Description: unknown protein [Arabidopsis thaliana]
MSIWECCELLNEVVDESDPDLDEPQIQHLLQSAEAISKDYLSEAWLHLTALIHGDIDSLLGVHLMNLTYNTGI

SEQ ID NO: 89003 - protein, 72 aa, Arabidopsis thaliana
  peptide (1)..(72): Ceres Seq. ID no. 12714708
  misc_feature (35)..(72): Homolog of NCBI NO: 7487428 NR Description: hypothetical protein T25K17.70 - Arabidopsis >gi|4539422|emb|CAB38955.1| putative protein [Arabidopsis >gi|7269477|emb|CAB79481.1| putative protein [Arabidopsis
  misc_feature (35)..(72): Homolog of NCBI NO: 30687167 NR Description: expressed protein [Arabidopsis thaliana]
  misc_feature (34)..(72): Homolog of NCBI NO: 21536858 NR Description: unknown [Arabidopsis thaliana]
  misc_feature (34)..(72): Homolog of NCBI NO: 15241891 NR Description: putative protein; protein id: At5g56640.1, by cDNA: 113619. [Arabidopsis thaliana] gene_id:MIK19.9~pir||T06010~similar to unknown protein
  misc_feature (39)..(72): Homolog of NCBI NO: 18399158 NR Description: expressed protein; protein id: At2g19800.1, by cDNA: 254633. [Arabidopsis thaliana]
  misc_feature (39)..(72): Homolog of NCBI NO: 21554393 NR Description: unknown [Arabidopsis thaliana]
  misc_feature (41)..(72): Homolog of NCBI NO: 7262695 NR Description: Strong similarity to an unknown protein from
  misc_feature (57)..(72): Homolog of NCBI NO: 7527731 NR Description: T5E21.2 [Arabidopsis thaliana]
  misc_feature (41)..(72): Homolog of NCBI NO: 30683840 NR Description: expressed protein [Arabidopsis thaliana] unknown protein [Arabidopsis thaliana]
  misc_feature (41)..(72): Homolog of NCBI NO: 26451656 NR Description: unknown protein [Arabidopsis thaliana]
MGVFSFSSGVQCSRKKKNLKWLYTTSYTLEAKSSRLSIEDDEAFLAPEINAFGDQFRDYDAENERQKGVEAF

SEQ ID NO: 89004 - protein, 38 aa, Arabidopsis thaliana
  peptide (1)..(38): Ceres Seq. ID no. 12714709
MFSLSSSFIRWVCFHSPAVCNAPEKKKILSGYTPQVIH

SEQ ID NO: 89005 - DNA, 1042 bp, Arabidopsis thaliana
  misc_feature (1)..(1042): Ceres Seq. ID no. 12714710
  misc_feature: MA Experiment ID: 20000328 Result: Up-regulated in Transcription
  misc_feature: MA Experiment 20000328 PARAMETER Experiment Name: At_42deg_Heat_Sub_P Parameter: Age (day) Value: 14
  misc_feature: MA Experiment 20000328 PARAMETER Experiment Name: At_42deg_Heat_Sub_P Parameter: Organism Value: A. thaliana
  misc_feature: MA Experiment 20000328 PARAMETER Experiment Name: At_42deg_Heat_Sub_P Parameter: Plant Line Value: WS
  misc_feature: MA Experiment 20000328 PARAMETER Experiment Name: At_42deg_Heat_Sub_P Parameter: Temperature (deg C) Value: 42 vs. 22
  misc_feature: MA Experiment 20000328 PARAMETER Experiment Name: At_42deg_Heat_Sub_P Parameter: Timepoint (hr) Value: 6
  misc_feature: MA Experiment 20000328 PARAMETER Experiment Name: At_42deg_Heat_Sub_P Parameter: Tissue Value: Aerial
  misc_feature: MA Experiment ID: 20000352 Result: Up-regulated in Transcription
  misc_feature: MA Experiment 20000352 PARAMETER Experiment Name: At_Drought_Sub_P Parameter: Age (day) Value: 7
  misc_feature: MA Experiment 20000352 PARAMETER Experiment Name: At_Drought_Sub_P Parameter: Organism Value: A. thaliana
  misc_feature: MA Experiment 20000352 PARAMETER Experiment Name: At_Drought_Sub_P Parameter: Plant Line Value: WS
  misc_feature: MA Experiment 20000352 PARAMETER Experiment Name: At_Drought_Sub_P Parameter: Timepoint (hr) Value: 6
  misc_feature: MA Experiment 20000352 PARAMETER Experiment Name: At_Drought_Sub_P Parameter: Tissue Value: Whole Plant
  misc_feature: MA Experiment 20000352 PARAMETER Experiment Name: At_Drought_Sub_P Parameter: Treatment Value: Drought vs. No Drought
atggctcaaatgtcgatgaccgtcgagaagagtatcaaagctgacgtgacggtgagccatgaccgtgtgaaaagggcttacgtcactttccttgctggaaacaaagactactggatgggtgtagttggtctagccaagggacttcgtaaggtgaaatctgcttatcctcttgtggttgcgattctcccggacgtgcctgaggaacaccgtcaaatcctgttggctcagggatgcatcatccgtgagattgaaccggtttatccaccggaaaacaaaaccggttattcaatggcctattacgttatcaactactccaagcttcgtatttgggagtttgtggagtatgaaaagatgatttatctagatggagacattcaagtatttagtaacatcgatcatcttttcgatactcctcgtggctacttgtacgctgtcaaagattgcttttgcgagatttcttggtccaaaactcctcaatttaagataggttactgccaacaatgtcctgaaaaggtgacatggcctgttgaaagtcttggttctccaccgccggtatatttcaacgccggtatgttggtttttgaacctaatctcctcacttacgaggatctccttcgtgttgttcaaatcaccactccgacatattttgccgaacaggattttctgaatgaatactttacagacatttacaagcccatcccttcgacctacaaccttgtaatggctatgctttggcgtcatcctgaacacattgaccttgaccaaatcagtgttattcattattgtgcaaatggttcgaagccttggagattcgatgaaactgaagagcatatggatcgtgaggacataaaaatgttggtgaagaaatggtgggatatttatgaagattcgagtttagattacaagaactttgtcgagactgagtccaaactgagtccgatcaatgcaaccttggcttccaaggaatctgttggcgatgtccttattagtcttgccccttccgctgcataaccaattctttatgtggaagctctatctatgc

SEQ ID NO: 89006 - protein, 336 aa, Arabidopsis thaliana
  peptide (1)..(336): Ceres Seq. ID no. 12714711
  misc_feature (1)..(336): Homolog of NCBI NO: 30687163 NR Description: glycosyltransferase family 8 [Arabidopsis >gi|23296356|gb|AAN13051.1| galactinol synthase [Arabidopsis
  misc_feature (97)..(336): Homolog of NCBI NO: 7487427 NR Description: hypothetical protein T25K17.60 - Arabidopsis >gi|4539421|emb|CAB38954.1| putative protein [Arabidopsis >gi|7269476|emb|CAB79480.1| putative protein [Arabidopsis
  misc_feature (1)..(121): Homolog of NCBI NO: 7487427 NR Description: hypothetical protein T25K17.60 - Arabidopsis >gi|4539421|emb|CAB38954.1| putative protein [Arabidopsis >gi|7269476|emb|CAB79480.1| putative protein [Arabidopsis
  misc_feature (4)..(336): Homolog of NCBI NO: 15237827 NR Description: galactinol synthase; protein id: At5g23790.1 thaliana] >gi|10176846|dbj|BAB10052.1| galactinol synthase
  misc_feature (1)..(336): Homolog of NCBI NO: 30692339 NR Description: galactinol synthase, putative [Arabidopsis
  misc_feature (19)..(336): Homolog of NCBI NO: 18874402 NR Description: galactinol synthase [Cucumis melo]
  misc_feature (19)..(336): Homolog of NCBI NO: 29569824 NR Description: galactinol synthase [Cucumis sativus]
  misc_feature (6)..(336): Homolog of NCBI NO: 4588376 NR Description: galactinol synthase [Brassica napus]
  misc_feature (24)..(336): Homolog of NCBI NO: 15223567 NR Description: water stress-induced protein, putative; protein At1g56600.1, supported by cDNA: gi_15215761, supported by cDNA:
  misc_feature (25)..(336): Homolog of NCBI NO: 15226522 NR Description: putative galactinol synthase; protein id: supported by cDNA: 124236., supported by cDNA: gi_15810148,
MAQMSMTVEKSIKADVTVSHDRVKRAYVTFLAGNKDYWMGVVGLAKGLRKVKSAYPLVVAILPDVPEEHRQILLAQGCIIREIEPVYPPENKTGYSMAYYVINYSKLRIWEFVEYEKMIYLDGDIQVFSNIDHLFDTPRGYLYAVKDCFCEISWSKTPQFKIGYCQQCPEKVTWPVESLGSPPPVYFNAGMLVFEPNLLTYEDLLRVVQITTPTYFAEQDFLNEYFTDIYKPIPSTYNLVMAMLWRHPEHIDLDQISVIHYCANGSKPWRFDETEEHMDREDIKMLVKKWWDIYEDSSLDYKNFVETESKLSPINATLASKESVGDVLISLAPSAA

SEQ ID NO: 89007 - protein, 333 aa, Arabidopsis thaliana
  peptide (1)..(333): Ceres Seq. ID no. 12714712
  misc_feature (1)..(333): Homolog of NCBI NO: 30687163 NR Description: glycosyltransferase family 8 [Arabidopsis >gi|23296356|gb|AAN13051.1| galactinol synthase [Arabidopsis
  misc_feature (94)..(333): Homolog of NCBI NO: 7487427 NR Description: hypothetical protein T25K17.60 - Arabidopsis >gi|4539421|emb|CAB38954.1| putative protein [Arabidopsis >gi|7269476|emb|CAB79480.1| putative protein [Arabidopsis
  misc_feature (1)..(118): Homolog of NCBI NO: 7487427 NR Description: hypothetical protein T25K17.60 - Arabidopsis >gi|4539421|emb|CAB38954.1| putative protein [Arabidopsis >gi|7269476|emb|CAB79480.1| putative protein [Arabidopsis
  misc_feature (1)..(333): Homolog of NCBI NO: 15237827 NR Description: galactinol synthase; protein id: At5g23790.1 thaliana] >gi|10176846|dbj|BAB10052.1| galactinol synthase
  misc_feature (1)..(333): Homolog of NCBI NO: 30692339 NR Description: galactinol synthase, putative [Arabidopsis
  misc_feature (16)..(333): Homolog of NCBI NO: 18874402 NR Description: galactinol synthase [Cucumis melo]
  misc_feature (16)..(333): Homolog of NCBI NO: 29569824 NR Description: galactinol synthase [Cucumis sativus]
  misc_feature (3)..(333): Homolog of NCBI NO: 4588376 NR Description: galactinol synthase [Brassica napus]
  misc_feature (21)..(333): Homolog of NCBI NO: 15223567 NR Description: water stress-induced protein, putative; protein At1g56600.1, supported by cDNA: gi_15215761, supported by cDNA:
  misc_feature (22)..(333): Homolog of NCBI NO: 15226522 NR Description: putative galactinol synthase; protein id: supported by cDNA: 124236., supported by cDNA: gi_15810148,
MSMTVEKSIKADVTVSHDRVKRAYVTFLAGNKDYWMGVVGLAKGLRKVKSAYPLVVAILPDVPEEHRQILLAQGCIIREIEPVYPPENKTGYSMAYYVINYSKLRIWEFVEYEKMIYLDGDIQVFSNIDHLFDTPRGYLYAVKDCFCEISWSKTPQFKIGYCQQCPEKVTWPVESLGSPPPVYFNAGMLVFEPNLLTYEDLLRVVQITTPTYFAEQDFLNEYFTDIYKPIPSTYNLVMAMLWRHPEHIDLDQISVIHYCANGSKPWRFDETEEHMDREDIKMLVKKWWDIYEDSSLDYKNFVETESKLSPINATLASKESVGDVLISLAPSAA

SEQ ID NO: 89008 - protein, 331 aa, Arabidopsis thaliana
  peptide (1)..(331): Ceres Seq. ID no. 12714713
  misc_feature (1)..(331): Homolog of NCBI NO: 30687163 NR Description: glycosyltransferase family 8 [Arabidopsis >gi|23296356|gb|AAN13051.1| galactinol synthase [Arabidopsis
  misc_feature (92)..(331): Homolog of NCBI NO: 7487427 NR Description: hypothetical protein T25K17.60 - Arabidopsis >gi|4539421|emb|CAB38954.1| putative protein [Arabidopsis >gi|7269476|emb|CAB79480.1| putative protein [Arabidopsis
  misc_feature (1)..(116): Homolog of NCBI NO: 7487427 NR Description: hypothetical protein T25K17.60 - Arabidopsis >gi|4539421|emb|CAB38954.1| putative protein [Arabidopsis >gi|7269476|emb|CAB79480.1| putative protein [Arabidopsis
  misc_feature (1)..(331): Homolog of NCBI NO: 15237827 NR Description: galactinol synthase; protein id: At5g23790.1 thaliana] >gi|10176846|dbj|BAB10052.1| galactinol synthase
  misc_feature (1)..(331): Homolog of NCBI NO: 30692339 NR Description: galactinol synthase, putative [Arabidopsis
  misc_feature (14)..(331): Homolog of NCBI NO: 18874402 NR Description: galactinol synthase [Cucumis melo]
  misc_feature (14)..(331): Homolog of NCBI NO: 29569824 NR Description: galactinol synthase [Cucumis sativus]
  misc_feature (1)..(331): Homolog of NCBI NO: 4588376 NR Description: galactinol synthase [Brassica napus]
  misc_feature (19)..(331): Homolog of NCBI NO: 15223567 NR Description: water stress-induced protein, putative; protein At1g56600.1, supported by cDNA: gi_15215761, supported by cDNA:
  misc_feature (20)..(331): Homolog of NCBI NO: 15226522 NR Description: putative galactinol synthase; protein id: supported by cDNA: 124236., supported by cDNA: gi_15810148,
MTVEKSIKADVTVSHDRVKRAYVTFLAGNKDYWMGVVGLAKGLRKVKSAYPLVVAILPDVPEEHRQILLAQGCIIREIEPVYPPENKTGYSMAYYVINYSKLRIWEFVEYEKMIYLDGDIQVFSNIDHLFDTPRGYLYAVKDCFCEISWSKTPQFKIGYCQQCPEKVTWPVESLGSPPPVYFNAGMLVFEPNLLTYEDLLRVVQITTPTYFAEQDFLNEYFTDIYKPIPSTYNLVMAMLWRHPEHIDLDQISVIHYCANGSKPWRFDETEEHMDREDIKMLVKKWWDIYEDSSLDYKNFVETESKLSPINATLASKESVGDVLISLAPSAA

SEQ ID NO: 89009 - DNA, 2221 bp, Arabidopsis thaliana
  misc_feature (1)..(2221): Ceres Seq. ID no. 12714714
  misc_feature: MA Experiment ID: 20000315 Result: Down-regulated in Transcription
  misc_feature: MA Experiment 20000315 PARAMETER Experiment Name: At_14day_Shoots-Roots_Sub_P Parameter: Age (day) Value: 14
  misc_feature: MA Experiment 20000315 PARAMETER Experiment Name: At_14day_Shoots-Roots_Sub_P Parameter: Organism Value: A. thaliana
  misc_feature: MA Experiment 20000315 PARAMETER Experiment Name: At_14day_Shoots-Roots_Sub_P Parameter: Plant Line Value: WS
  misc_feature: MA Experiment 20000315 PARAMETER Experiment Name: At_14day_Shoots-Roots_Sub_P Parameter: Tissue Value: Shoots vs. Whole Plant
atggggttaaatttcagggaaaaggcatggatacttctggggattctttgttgttcatctttgatttgttcagttaaagcaattgtcacttacgatcgtaaagctgtgatcatcaatggtcagagaaggatccttctctctggctccattcactacccaagaagcacacctgagatgtggcctgaccttatacaaaaagccaaagatggagggttggatgttatacagacttatgttttctggaatgggcatgaaccttctcctggacaatattattttgaggacagatatgatctagttaagttcatcaaggtggtacaacaagctggtctttacgttcatctcaggattggtccctatgtttgcgctgaatggaactttggagggtttcctgtgtggctcaaatatgttcccggtatggtatttaggaccgacaatgaacctttcaaggctgcaatgcaaaaattcactgagaagattgtgaggatgatgaaagaagaaaaattatttgagactcaaggaggacccatcattctgtcacagatagagaatgagtatggaccaatagagtgggagataggagcaccagggaaggcatacacaaaatgggtagctgaaatggcacaaggactctccactggtgtcccatggattatgtgcaagcaagatgatgctcctaactctattataaacacatgtaatgggttttattgtgagaatttcaaaccaaactcggacaataagccgaaaatgtggacagagaactggactggttggtttacagagtttggaggtgcagtaccatacaggccagccgaagacattgccttatccgtggctcgcttcatacagaacggtggctctttcatcaactattatatgtaccatggaggaaccaacttcgacagaacagccggtgaattcatcgccaccagctatgactatgatgctcctcttgatgaatacgggttaccgagagaacctaagtatagtcacttgaaaaggctgcataaggtcatcaagctctgcgaaccggcattggtctctgctgatcctacagtcacatcactcggggataaacaagaagctcacgtgttcaagtctaagtcatcttgcgctgcttttctctcaaactacaacacaagttctgctgcaagagtcttgtttggcggatctacatatgatctgcctccttggtctgtcagtattctacccgactgcaaaactgagtattacaacactgccaaggtacaggtccgtacatcaagcatacacatgaagatggttcctacaaacacaccattctcttggggttcatacaacgaagagattccttctgcaaatgacaatggtaccttttcacaagatgggcttgtggaacagataagtatcaccagagacaagacagactatttctggtatctgacagatattacaatcagtcctgatgaaaagttcctaactggtgaagaccctcttcttactattgggtcagctgggcatgctcttcatgtattcgttaatggccagcttgcaggaactgcatatggatcactggagaagccaaagctaacatttagtcagaagatcaaattacatgcaggggtcaacaaacttgctctattgagtactgcagcgggtctgccgaacgttggcgtgcattatgagacttggaatactggagttcttggcccagtgacactgaatggagttaactccggaacatgggacatgactaaatggaaatggtcttacaagattggtactaagggtgaagctctgagcgttcataccttagccgggagttcaacggtagaatggaaagaaggatcattagtggctaaaaagcagcccttgacctggtacaagtctacttttgactcaccaacaggcaatgaaccattggctttagacatgaacacaatggggaaaggtcaaatgtggataaatgggcagaacatcggacgccactggccagcatatacagctcgtgggaaatgcgaacgctgcagctatgccgggactttcacagagaagaaatgtttgagtaactgtggagaagcttcacaaagatggtaccatgtgcctcgttcatggctgaagccaactaataaccttgtcattgtacttgaagaatggggtggtgaacccaatgggatctctcttgtaaaaagaacagccaaataatagctttctgactccatttttttcaggataaaat

SEQ ID NO: 89010 - protein, 728 aa, Arabidopsis thaliana
  peptide (1)..(728): Ceres Seq. ID no. 12714715
  misc_feature (8)..(725): Homolog of NCBI NO: 3869280 NR Description: beta-galactosidase precursor [Carica papaya]
  misc_feature (1)..(725): Homolog of NCBI NO: 1352078 NR Description: Beta-galactosidase precursor (Lactase) (Acid beta-
  misc_feature (1)..(725): Homolog of NCBI NO: 12583687 NR Description: beta-D-galactosidase [Pyrus pyrifolia]
  misc_feature (13)..(725): Homolog of NCBI NO: 14970839 NR Description: beta-galactosidase [Fragaria x ananassa]
  misc_feature (11)..(725): Homolog of NCBI NO: 1352077 NR Description: Beta-galactosidase precursor (Lactase) (Acid beta-
  misc_feature (21)..(725): Homolog of NCBI NO: 15231354 NR Description: glycosyl hydrolase family 35 protein id: At3g13750.1, supported by cDNA: gi_20260595
  misc_feature (11)..(725): Homolog of NCBI NO: 4138137 NR Description: ss-galactosidase [Lycopersicon esculentum]
  misc_feature (21)..(725): Homolog of NCBI NO: 20260596 NR Description: galactosidase, putative [Arabidopsis thaliana]
  misc_feature (24)..(726): Homolog of NCBI NO: 1168654 NR Description: Beta-galactosidase precursor (Lactase)
  misc_feature (9)..(726): Homolog of NCBI NO: 20514290 NR Description: beta-galactosidase [Oryza sativa (japonica
MGLNFREKAWILLGILCCSSLICSVKAIVTYDRKAVIINGQRRILLSGSIHYPRSTPEMWPDLIQKAKDGGLDVIQTYVFWNGHEPSPGQYYFEDRYDLVKFIKVVQQAGLYVHLRIGPYVCAEWNFGGFPVWLKYVPGMVFRTDNEPFKAAMQKFTEKIVRMMKEEKLFETQGGPIILSQIENEYGPIEWEIGAPGKAYTKWVAEMAQGLSTGVPWIMCKQDDAPNSIINTCNGFYCENFKPNSDNKPKMWTENWTGWFTEFGGAVPYRPAEDIALSVARFIQNGGSFINYYMYHGGTNFDRTAGEFIATSYDYDAPLDEYGLPREPKYSHLKRLHKVIKLCEPALVSADPTVTSLGDKQEAHVFKSKSSCAAFLSNYNTSSAARVLFGGSTYDLPPWSVSILPDCKTEYYNTAKVQVRTSSIHMKMVPTNTPFSWGSYNEEIPSANDNGTFSQDGLVEQISITRDKTDYFWYLTDITISPDEKFLTGEDPLLTIGSAGHALHVFVNGQLAGTAYGSLEKPKLTFSQKIKLHAGVNKLALLSTAAGLPNVGVHYETWNTGVLGPVTLNGVNSGTWDMTKWKWSYKIGTKGEALSVHTLAGSSTVEWKEGSLVAKKQPLTWYKSTFDSPTGNEPLALDMNTMGKGQMWINGQNIGRHWPAYTARGKCERCSYAGTFTEKKCLSNCGEASQRWYHVPRSWLKPTNNLVIVLEEWGGEPNGISLVKRTAK

SEQ ID NO: 89011 - protein, 670 aa, Arabidopsis thaliana
  peptide (1)..(670): Ceres Seq. ID no. 12714716
  misc_feature (1)..(667): Homolog of NCBI NO: 3869280 NR Description: beta-galactosidase precursor [Carica papaya]
  misc_feature (1)..(667): Homolog of NCBI NO: 1352078 NR Description: Beta-galactosidase precursor (Lactase) (Acid beta-
  misc_feature (1)..(667): Homolog of NCBI NO: 12583687 NR Description: beta-D-galactosidase [Pyrus pyrifolia]
  misc_feature (1)..(667): Homolog of NCBI NO: 14970839 NR Description: beta-galactosidase [Fragaria x ananassa]
  misc_feature (1)..(667): Homolog of NCBI NO: 1352077 NR Description: Beta-galactosidase precursor (Lactase) (Acid beta-
  misc_feature (1)..(667): Homolog of NCBI NO: 15231354 NR Description: glycosyl hydrolase family 35 protein id: At3g13750.1, supported by cDNA: gi_20260595
  misc_feature (1)..(667): Homolog of NCBI NO: 4138137 NR Description: ss-galactosidase [Lycopersicon esculentum]
  misc_feature (1)..(667): Homolog of NCBI NO: 20260596 NR Description: galactosidase, putative [Arabidopsis thaliana]
  misc_feature (1)..(668): Homolog of NCBI NO: 1168654 NR Description: Beta-galactosidase precursor (Lactase)
  misc_feature (1)..(668): Homolog of NCBI NO: 20514290 NR Description: beta-galactosidase [Oryza sativa (japonica
MWPDLIQKAKDGGLDVIQTYVFWNGHEPSPGQYYFEDRYDLVKFIKVVQQAGLYVHLRIGPYVCAEWNFGGFPVWLKYVPGMVFRTDNEPFKAAMQKFTEKIVRMMKEEKLFETQGGPIILSQIENEYGPIEWEIGAPGKAYTKWVAEMAQGLSTGVPWIMCKQDDAPNSIINTCNGFYCENFKPNSDNKPKMWTENWTGWFTEFGGAVPYRPAEDIALSVARFIQNGGSFINYYMYHGGTNFDRTAGEFIATSYDYDAPLDEYGLPREPKYSHLKRLHKVIKLCEPALVSADPTVTSLGDKQEAHVFKSKSSCAAFLSNYNTSSAARVLFGGSTYDLPPWSVSILPDCKTEYYNTAKVQVRTSSIHMKMVPTNTPFSWGSYNEEIPSANDNGTFSQDGLVEQISITRDKTDYFWYLTDITISPDEKFLTGEDPLLTIGSAGHALHVFVNGQLAGTAYGSLEKPKLTFSQKIKLHAGVNKLALLSTAAGLPNVGVHYETWNTGVLGPVTLNGVNSGTWDMTKWKWSYKIGTKGEALSVHTLAGSSTVEWKEGSLVAKKQPLTWYKSTFDSPTGNEPLALDMNTMGKGQMWINGQNIGRHWPAYTARGKCERCSYAGTFTEKKCLSNCGEASQRWYHVPRSWLKPTNNLVIVLEEWGGEPNGISLVKRTAK

SEQ ID NO: 89012 - protein, 589 aa, Arabidopsis thaliana
  peptide (1)..(589): Ceres Seq. ID no. 12714717
  misc_feature (1)..(586): Homolog of NCBI NO: 3869280 NR Description: beta-galactosidase precursor [Carica papaya]
  misc_feature (1)..(586): Homolog of NCBI NO: 1352078 NR Description: Beta-galactosidase precursor (Lactase) (Acid beta-
  misc_feature (1)..(586): Homolog of NCBI NO: 12583687 NR Description: beta-D-galactosidase [Pyrus pyrifolia]
  misc_feature (1)..(586): Homolog of NCBI NO: 14970839 NR Description: beta-galactosidase [Fragaria x ananassa]
  misc_feature (1)..(586): Homolog of NCBI NO: 1352077 NR Description: Beta-galactosidase precursor (Lactase) (Acid beta-
  misc_feature (1)..(586): Homolog of NCBI NO: 15231354 NR Description: glycosyl hydrolase family 35 protein id: At3g13750.1, supported by cDNA: gi_20260595
  misc_feature (1)..(586): Homolog of NCBI NO: 4138137 NR Description: ss-galactosidase [Lycopersicon esculentum]
  misc_feature (1)..(586): Homolog of NCBI NO: 20260596 NR Description: galactosidase, putative [Arabidopsis thaliana]
  misc_feature (1)..(587): Homolog of NCBI NO: 1168654 NR Description: Beta-galactosidase precursor (Lactase)
  misc_feature (1)..(587): Homolog of NCBI NO: 20514290 NR Description: beta-galactosidase [Oryza sativa (japonica
MVFRTDNEPFKAAMQKFTEKIVRMMKEEKLFETQGGPIILSQIENEYGPIEWEIGAPGKAYTKWVAEMAQGLSTGVPWIMCKQDDAPNSIINTCNGFYCENFKPNSDNKPKMWTENWTGWFTEFGGAVPYRPAEDIALSVARFIQNGGSFINYYMYHGGTNFDRTAGEFIATSYDYDAPLDEYGLPREPKYSHLKRLHKVIKLCEPALVSADPTVTSLGDKQEAHVFKSKSSCAAFLSNYNTSSAARVLFGGSTYDLPPWSVSILPDCKTEYYNTAKVQVRTSSIHMKMVPTNTPFSWGSYNEEIPSANDNGTFSQDGLVEQISITRDKTDYFWYLTDITISPDEKFLTGEDPLLTIGSAGHALHVFVNGQLAGTAYGSLEKPKLTFSQKIKLHAGVNKLALLSTAAGLPNVGVHYETWNTGVLGPVTLNGVNSGTWDMTKWKWSYKIGTKGEALSVHTLAGSSTVEWKEGSLVAKKQPLTWYKSTFDSPTGNEPLALDMNTMGKGQMWINGQNIGRHWPAYTARGKCERCSYAGTFTEKKCLSNCGEASQRWYHVPRSWLKPTNNLVIVLEEWGGEPNGISLVKRTAK

SEQ ID NO: 89013 - DNA, 1472 bp, Arabidopsis thaliana
  misc_feature (1)..(1472): Ceres Seq. ID no. 12714735
  misc_feature: MA Experiment ID: 20000180 Result: Down-regulated in Transcription
  misc_feature: MA Experiment 20000180 PARAMETER Experiment Name: At_Germinating_Seeds_P Parameter: Age (hr) Value: 24 vs. 0
  misc_feature: MA Experiment 20000180 PARAMETER Experiment Name: At_Germinating_Seeds_P Parameter: Tissue Value: Germinating Seeds
  misc_feature: MA Experiment ID: 20000264 Result: Down-regulated in Transcription
  misc_feature: MA Experiment 20000264 PARAMETER Experiment Name: At_Open_Flower_P Parameter: Age (day) Value: 21
  misc_feature: MA Experiment 20000264 PARAMETER Experiment Name: At_Open_Flower_P Parameter: Plant Line Value: WS
  misc_feature: MA Experiment 20000264 PARAMETER Experiment Name: At_Open_Flower_P Parameter: Tissue Value: Open Flower vs. Whole Plant
attcctgcggagaggagctaattctctctccttgggaagaagacgacgagcttaatacattcgacagtggagaatatcagattctttttggcgagggttggttgattccttcttattcatcagattaaggatcgtttccggtggctgaagagtaatagaaggaggaagaagaggagaggagaggtaaaaatgtcagacctagatcggcaaatagggcagcttaagcgatgcgaaccattgagcgaatcggaggtgaaggctctttgcctcaaagccatggaaattcttgttgaagagagtaatgttcagagagttgatgcccctgtcactttatgtggtgacatccatgggcagttctatgatatgatggagcttttcaaagttgggggtgattgtcctaagaccaactatttgtttatgggagattttgttgatcgtggatattattcggttgagacatttctacttctactcgcactcaaggttagatatccagaccgcataactctcatcagaggaaaccatgaaagcaggcaaatcacacagtaggtttatggattttatgatgagtgtttgcgtaaatatggctcttcaaatgtctggagatactgcaccgacatttttgactacatgagtctttcagctgttgtggagaacaagatattctgtgttcatggtggtctttctccagctattatgactcttgatcagattaggacaattgaccggaagcaagaagtaccacatgatggtgccatgtgtgatctcctatggtctgatcctgaagatattgttgatggctggggattgagccctcgtggtgccggattcctttttggtggcagtgttgtcacgtcttttaaccactcaaacaacatagactacatagcccgtgcccatcaactagttatggagggttacaaatggatgtttgatagccagattgtgacagtgtggtcagccccaaattactgttacagatgcggtaatgtggcttcaattctagagcttgacgagaatctaaataaagaattccgtgtgtttgatgcagcccagcaggactcgagagggcctcccgccaaaaagccggcccctgattacttcctataatgggcaaaacttcgaaaaccttattcccaaagtcgaactagcgtcaatattcaactccgttgaagaggaagagaattactattcgttcagtgtttaggttgcagtgcagaagaatatacaatagagttgtttcaggcgagctctacctaggccacaaagactgatcgaactggggttgtctaaaaaagatattgttgttgttgtttccggttttggtgtaactgtagtcaaaagagtgtttgtgtattggtagttaaagagtgattttgtcctgattcaagtttgtactttcttaggagataagacctcaaacagttttggagctcacagttatatcaatagaattcacagggaagcattag

SEQ ID NO: 89014 - protein, 159 aa, Arabidopsis thaliana
  peptide (1)..(159): Ceres Seq. ID no. 12714736
  misc_feature (1)..(94): Pfam Name: Calcineurin-like phosphoesterase Pfam Description: Calcineurin-like phosphoesterase
  misc_feature (1)..(159): Homolog of NCBI NO: 15236841 NR Description: phosphoprotein phosphatase (PPX-1); protein id: [Arabidopsis thaliana] >gi|1346782|sp|P48529|PPX1_ARATH
  misc_feature (1)..(159): Homolog of NCBI NO: 15240488 NR Description: serine/threonine protein phosphatase; protein id:
  misc_feature (1)..(159): Homolog of NCBI NO: 629550 NR Description: phosphoprotein phosphatase (EC 3.1.3.16) X-2 EP128) - Arabidopsis thaliana >gi|397590|emb|CAA80312.1| protein
  misc_feature (1)..(159): Homolog of NCBI NO: 4506027 NR Description: protein phosphatase 4 (formerly X), catalytic Protein phosphatase 4, catalytic subunit [Homo sapiens] protein phosphatase 4, catalytic subunit; protein phosphatase X
  misc_feature (1)..(159): Homolog of NCBI NO: 5410609 NR Description: protein phosphatase 4 catalytic subunit discoideum] >gi|28829486|gb|AAO52019.1| similar to Dictyostelium (Slime mold). Protein phosphatase 4 catalytic subunit (EC
  misc_feature (1)..(159): Homolog of NCBI NO: 130788 NR Description: SERINE/THREONINE PROTEIN PHOSPHATASE 4 (PP4)
  misc_feature (1)..(159): Homolog of NCBI NO: 346323 NR Description: phosphoprotein phosphatase (EC 3.1.3.16) X
  misc_feature (1)..(159): Homolog of NCBI NO: 4101701 NR Description: serine/threonine phosphatase [Takifugu rubripes]
  misc_feature (1)..(159): Homolog of NCBI NO: 17864424 NR Description: Protein phosphatase 19C CG32505-PA
  misc_feature (11)..(130): Homolog of NCBI NO: 40746125 NR Description: hypothetical protein AN0103.2 [Aspergillus
MSLSAVVENKIFCVHGGLSPAIMTLDQIRTIDRKQEVPHDGAMCDLLWSDPEDIVDGWGLSPRGAGFLFGGSVVTSFNHSNNIDYIARAHQLVMEGYKWMFDSQIVTVWSAPNYCYRCGNVASILELDENLNKEFRVFDAAQQDSRGPPAKKPAPDYFL

SEQ ID NO: 89015 - protein, 137 aa, Arabidopsis thaliana
  peptide (1)..(137): Ceres Seq. ID no. 12714737
  misc_feature (1)..(72): Pfam Name: Calcineurin-like phosphoesterase Pfam Description: Calcineurin-like phosphoesterase
  misc_feature (1)..(137): Homolog of NCBI NO: 15236841 NR Description: phosphoprotein phosphatase (PPX-1); protein id: [Arabidopsis thaliana] >gi|1346782|sp|P48529|PPX1_ARATH
  misc_feature (1)..(137): Homolog of NCBI NO: 15240488 NR Description: serine/threonine protein phosphatase; protein id:
  misc_feature (1)..(137): Homolog of NCBI NO: 629550 NR Description: phosphoprotein phosphatase (EC 3.1.3.16) X-2 EP128) - Arabidopsis thaliana >gi|397590|emb|CAA80312.1| protein
  misc_feature (1)..(137): Homolog of NCBI NO: 4506027 NR Description: protein phosphatase 4 (formerly X), catalytic Protein phosphatase 4, catalytic subunit [Homo sapiens] protein phosphatase 4, catalytic subunit; protein phosphatase X
  misc_feature (1)..(137): Homolog of NCBI NO: 5410609 NR Description: protein phosphatase 4 catalytic subunit discoideum] >gi|28829486|gb|AAO52019.1| similar to Dictyostelium (Slime mold). Protein phosphatase 4 catalytic subunit (EC
  misc_feature (1)..(137): Homolog of NCBI NO: 130788 NR Description: SERINE/THREONINE PROTEIN PHOSPHATASE 4 (PP4)
  misc_feature (1)..(137): Homolog of NCBI NO: 346323 NR Description: phosphoprotein phosphatase (EC 3.1.3.16) X
  misc_feature (1)..(137): Homolog of NCBI NO: 4101701 NR Description: serine/threonine phosphatase [Takifugu rubripes]
  misc_feature (1)..(137): Homolog of NCBI NO: 17864424 NR Description: Protein phosphatase 19C CG32505-PA
  misc_feature (1)..(108): Homolog of NCBI NO: 40746125 NR Description: hypothetical protein AN0103.2 [Aspergillus
MTLDQIRTIDRKQEVPHDGAMCDLLWSDPEDIVDGWGLSPRGAGFLFGGSVVTSFNHSNNIDYIARAHQLVMEGYKWMFDSQIVTVWSAPNYCYRCGNVASILELDENLNKEFRVFDAAQQDSRGPPAKKPAPDYFL

SEQ ID NO: 89016 - protein, 119 aa, Arabidopsis thaliana
  peptide (1)..(119): Ceres Seq. ID no. 12714738
  misc_feature (44)..(119): Pfam Name: Calcineurin-like phosphoesterase Pfam Description: Calcineurin-like phosphoesterase
  misc_feature (1)..(119): Homolog of NCBI NO: 15236841 NR Description: phosphoprotein phosphatase (PPX-1); protein id: [Arabidopsis thaliana] >gi|1346782|sp|P48529|PPX1_ARATH
  misc_feature (1)..(119): Homolog of NCBI NO: 15240488 NR Description: serine/threonine protein phosphatase; protein id:
  misc_feature (1)..(119): Homolog of NCBI NO: 629550 NR Description: phosphoprotein phosphatase (EC 3.1.3.16) X-2 EP128) - Arabidopsis thaliana >gi|397590|emb|CAA80312.1| protein
  misc_feature (1)..(119): Homolog of NCBI NO: 4506027 NR Description: protein phosphatase 4 (formerly X), catalytic Protein phosphatase 4, catalytic subunit [Homo sapiens] protein phosphatase 4, catalytic subunit; protein phosphatase X
  misc_feature (2)..(119): Homolog of NCBI NO: 5410609 NR Description: protein phosphatase 4 catalytic subunit discoideum] >gi|28829486|gb|AAO52019.1| similar to Dictyostelium (Slime mold). Protein phosphatase 4 catalytic subunit (EC
  misc_feature (1)..(119): Homolog of NCBI NO: 130788 NR Description: SERINE/THREONINE PROTEIN PHOSPHATASE 4 (PP4)
  misc_feature (1)..(119): Homolog of NCBI NO: 346323 NR Description: phosphoprotein phosphatase (EC 3.1.3.16) X
  misc_feature (1)..(119): Homolog of NCBI NO: 4101701 NR Description: serine/threonine phosphatase [Takifugu rubripes]
  misc_feature (2)..(119): Homolog of NCBI NO: 17864424 NR Description: Protein phosphatase 19C CG32505-PA
  misc_feature (1)..(119): Homolog of NCBI NO: 40746125 NR Description: hypothetical protein AN0103.2 [Aspergillus
MSDLDRQIGQLKRCEPLSESEVKALCLKAMEILVEESNVQRVDAPVTLCGDIHGQFYDMMELFKVGGDCPKTNYLFMGDFVDRGYYSVETFLLLLALKVRYPDRITLIRGNHESRQITQ

SEQ ID NO: 89017 - DNA, 1484 bp, Arabidopsis thaliana
  misc_feature (1)..(1484): Ceres Seq. ID no. 12714754
  misc_feature: MA Experiment ID: 108577 Result: Down-regulated in Transcription
  misc_feature: MA Experiment 108577 PARAMETER Experiment Name: At_42deg_Heat_cDNA_P Parameter: Temperature (deg C) Value: 42 vs. 22
  misc_feature: MA Experiment 108577 PARAMETER Experiment Name: At_42deg_Heat_cDNA_P Parameter: Timepoint (hr) Value: 6
  misc_feature: MA Experiment 108577 PARAMETER Experiment Name: At_42deg_Heat_cDNA_P Parameter: Tissue Value: Aerial
  misc_feature: MA Experiment ID: 108585 Result: Up-regulated in Transcription
  misc_feature: MA Experiment 108585 PARAMETER Experiment Name: At_5mM_NaNP_cDNA_P Parameter: Timepoint (hr) Value: 6
  misc_feature: MA Experiment 108585 PARAMETER Experiment Name: At_5mM_NaNP_cDNA_P Parameter: Tissue Value: Aerial
  misc_feature: MA Experiment 108585 PARAMETER Experiment Name: At_5mM_NaNP_cDNA_P Parameter: Treatment Value: null
  misc_feature: MA Experiment ID: 108668 Result: Up-regulated in Transcription
  misc_feature: MA Experiment 108668 PARAMETER Experiment Name: At_2mM_SA_cDNA_P Parameter: Plant Line Value: WS
  misc_feature: MA Experiment 108668 PARAMETER Experiment Name: At_2mM_SA_cDNA_P Parameter: Timepoint (hr) Value: 6
  misc_feature: MA Experiment 108668 PARAMETER Experiment Name: At_2mM_SA_cDNA_P Parameter: Treatment Value: 2mM SA vs. No Treatment
  misc_feature: MA Experiment ID: 20000090 Result: Up-regulated in Transcription
  misc_feature: MA Experiment ID: 20000111 Result: Down-regulated in Transcription
  misc_feature: MA Experiment 20000111 PARAMETER Experiment Name: At_42deg_Heat_cDNA_P Parameter: Temperature (deg C) Value: 42 vs. 22
  misc_feature: MA Experiment 20000111 PARAMETER Experiment Name: At_42deg_Heat_cDNA_P Parameter: Timepoint (hr) Value: 6
  misc_feature: MA Experiment 20000111 PARAMETER Experiment Name: At_42deg_Heat_cDNA_P Parameter: Tissue Value: Aerial
  misc_feature: MA Experiment ID: 20000173 Result: Down-regulated in Transcription
  misc_feature: MA Experiment 20000173 PARAMETER Experiment Name: At_42deg_Heat_P Parameter: Age (day) Value: 14
  misc_feature: MA Experiment 20000173 PARAMETER Experiment Name: At_42deg_Heat_P Parameter: Organism Value: A. thaliana
  misc_feature: MA Experiment 20000173 PARAMETER Experiment Name: At_42deg_Heat_P Parameter: Plant Line Value: WS
  misc_feature: MA Experiment 20000173 PARAMETER Experiment Name: At_42deg_Heat_P Parameter: Temperature (deg C) Value: 42 vs. 22
  misc_feature: MA Experiment 20000173 PARAMETER Experiment Name: At_42deg_Heat_P Parameter: Timepoint (hr) Value: 6
  misc_feature: MA Experiment 20000173 PARAMETER Experiment Name: At_42deg_Heat_P Parameter: Tissue Value: Aerial
  misc_feature: MA Experiment ID: 20000180 Result: Up-regulated in Transcription
  misc_feature: MA Experiment 20000180 PARAMETER Experiment Name: At_Germinating_Seeds_P Parameter: Age (hr) Value: 24 vs. 0
  misc_feature: MA Experiment 20000180 PARAMETER Experiment Name: At_Germinating_Seeds_P Parameter: Tissue Value: Germinating Seeds
  misc_feature: MA Experiment ID: 20000182 Result: Up-regulated in Transcription
  misc_feature: MA Experiment 20000182 PARAMETER Experiment Name: At_2mM_SA_P Parameter: Age (day) Value: 14
  misc_feature: MA Experiment 20000182 PARAMETER Experiment Name: At_2mM_SA_P Parameter: Organism Value: A. thaliana
  misc_feature: MA Experiment 20000182 PARAMETER Experiment Name: At_2mM_SA_P Parameter: Plant Line Value: WS
  misc_feature: MA Experiment 20000182 PARAMETER Experiment Name: At_2mM_SA_P Parameter: Timepoint (hr) Value: 6
  misc_feature: MA Experiment 20000182 PARAMETER Experiment Name: At_2mM_SA_P Parameter: Tissue Value: Aerial
  misc_feature: MA Experiment 20000182 PARAMETER Experiment Name: At_2mM_SA_P Parameter: Treatment Value: 2mM SA vs. No Treatment
  misc_feature: MA Experiment ID: 20000438 Result: Down-regulated in Transcription
  misc_feature: MA Experiment 20000438 PARAMETER Experiment Name: At_Shoots__P Parameter: Age (day) Value: 14
  misc_feature: MA Experiment 20000438 PARAMETER Experiment Name: At_Shoots__P Parameter: Tissue Value: Shoots vs. Whole Plant
aagatttttgtgctcttattttgtttgtatcccactagcagggaactcgggcatctcgaggtcggcgagtttagtttcttcaaccctgcaaagatgggtcaggcctttttcagctgaaactggagataccgtggaagcagttgtgcctcatatgggggaatcaattactgatggcaccttggccacctttctgaagaaacctggtgagagagtccaggctgatgaggctattgcacaaattgaaactgataaggtgacaatagatattgctagcccagcaagtggtgtaatccaagagtttctagtcaacgaaggagatactgtagaaccaggaaccaaggtcgctattatatcaaagtctgaggatactgcatctcaggttaccccctctcagaagataccagagacaactgataccaaaccttctcctcctgctgaagataagcagaagcccagagtggaaagtgctcctgtagcagagaaacccaaagcaccatcctcaccacctccacccaaacagtctgctaaagaaccgcagcttcctcctaaggaaagagaaagacgggttccgatgacaagacttcggaaacgagttgcaacaagattgaaagactctcaaaatactttcgcgttgctgacaactttcaatgaagttgatatgacaaatttgatgaagctccgatcccaatacaaggatgcattttatgaaaagcatggagtgaagttggggcttatgtctggatttattaaagctgctgttagcgcccttcagcatcaaccagttgtaaatgcagttattgacggggatgatatcatatacagagactatgtggatatcagtatcgctgttggtacctctaagggacttgtagtaccagtcataagaggtgctgataaaatgaactttgccgagatagagaagacgataaactcacttgccaagaaggcaaatgaaggaaccatatccatagatgagatggctggcggatcattcaccgtttcaaatggcggtgtctatggaagtctcataagcactccgatcattaatcctcctcagtctgccatactcggcatgcactcgattgtgtcacgtccaatggtagtaggaggaagcgtagtgcctagaccaatgatgtatgtcgcacttacgtatgatcacaggctgattgatggtagagaggctgtgtacttcctgcgccgtgtcaaggatgttgtggaggatccacaaaggcttcttcttgacatataaaagatttggtttcgaggagtcacaaagtgtctggcttttgccagttatagacctgcagtgtctttaaaacgtttgggggtaacaacaattcttatctttcaagtttctttacagtttcccgagtattgcgggattggaagaataggcctcagtgtctacgttcttactttttacacagtttgatacagatatgttcaattttgactgaataagatacccttttgaggtttttcgg

SEQ ID NO: 89018 - protein, 415 aa, Arabidopsis thaliana
  peptide (1)..(415): Ceres Seq. ID no. 12714755
  misc_feature (183)..(413): Pfam Name: 2-oxoacid dehydrogenases acyltransferase Pfam Description: 2-oxoacid dehydrogenases acyltransferase
  misc_feature (8)..(415): Homolog of NCBI NO: 18416889 NR Description: putative dihydrolipoamide succinyltransferase; id: At4g26910.1, supported by cDNA: 101175. [Arabidopsis
  misc_feature (10)..(415): Homolog of NCBI NO: 30687405 NR Description: dihydrolipoamide succinyltransferase -related thaliana] >gi|24030315|gb|AAN41326.1| putative dihydrolipoamide
  misc_feature (8)..(415): Homolog of NCBI NO: 21618217 NR Description: putative dihydrolipoamide succinyltransferase
  misc_feature (51)..(415): Homolog of NCBI NO: 30687411 NR Description: dihydrolipoamide succinyltransferase -related
  misc_feature (27)..(415): Homolog of NCBI NO: 4210332 NR Description: 2-oxoglutarate dehydrogenase E2 subunit
  misc_feature (100)..(415): Homolog of NCBI NO: 7484908 NR Description: dihydrolipoamide S-succinyltransferase homolog - Arabidopsis thaliana >gi|4455214|emb|CAB36537.1| putative succinyltransferase [Arabidopsis thaliana]
  misc_feature (27)..(415): Homolog of NCBI NO: 15240454 NR Description: 2-oxoglutarate dehydrogenase E2 subunit; protein At5g55070.1, supported by cDNA: gi_14596218 [Arabidopsis
  misc_feature (10)..(415): Homolog of NCBI NO: 21740743 NR Description: OSJNBa0072K14.8 [Oryza sativa (japonica
  misc_feature (164)..(414): Homolog of NCBI NO: 22967670 NR Description: hypothetical protein [Rhodospirillum rubrum]
  misc_feature (45)..(168): Homolog of NCBI NO: 22967670 NR Description: hypothetical protein [Rhodospirillum rubrum]
RFLCSYFVCIPLAGNSGISRSASLVSSTLQRWVRPFSAETGDTVEAVVPHMGESITDGTLATFLKKPGERVQADEAIAQIETDKVTIDIASPASGVIQEFLVNEGDTVEPGTKVAIISKSEDTASQVTPSQKIPETTDTKPSPPAEDKQKPRVESAPVAEKPKAPSSPPPPKQSAKEPQLPPKERERRVPMTRLRKRVATRLKDSQNTFALLTTFNEVDMTNLMKLRSQYKDAFYEKHGVKLGLMSGFIKAAVSALQHQPVVNAVIDGDDIIYRDYVDISIAVGTSKGLVVPVIRGADKMNFAEIEKTINSLAKKANEGTISIDEMAGGSFTVSNGGVYGSLISTPIINPPQSAILGMHSIVSRPMVVGGSVVPRPMMYVALTYDHRLIDGREAVYFLRRVKDVVEDPQRLLLDI

SEQ ID NO: 89019 - protein, 365 aa, Arabidopsis thaliana
  peptide (1)..(365): Ceres Seq. ID no. 12714756
  misc_feature (133)..(363): Pfam Name: 2-oxoacid dehydrogenases acyltransferase Pfam Description: 2-oxoacid dehydrogenases acyltransferase
  misc_feature (1)..(365): Homolog of NCBI NO: 18416889 NR Description: putative dihydrolipoamide succinyltransferase; id: At4g26910.1, supported by cDNA: 101175. [Arabidopsis
  misc_feature (1)..(365): Homolog of NCBI NO: 30687405 NR Description: dihydrolipoamide succinyltransferase -related thaliana] >gi|24030315|gb|AAN41326.1| putative dihydrolipoamide
  misc_feature (1)..(365): Homolog of NCBI NO: 21618217 NR Description: putative dihydrolipoamide succinyltransferase
  misc_feature (1)..(365): Homolog of NCBI NO: 30687411 NR Description: dihydrolipoamide succinyltransferase -related
  misc_feature (1)..(365): Homolog of NCBI NO: 4210332 NR Description: 2-oxoglutarate dehydrogenase E2 subunit
  misc_feature (50)..(365): Homolog of NCBI NO: 7484908 NR Description: dihydrolipoamide S-succinyltransferase homolog - Arabidopsis thaliana >gi|4455214|emb|CAB36537.1| putative succinyltransferase [Arabidopsis thaliana]
  misc_feature (1)..(365): Homolog of NCBI NO: 15240454 NR Description: 2-oxoglutarate dehydrogenase E2 subunit; protein At5g55070.1, supported by cDNA: gi_14596218 [Arabidopsis
  misc_feature (1)..(365): Homolog of NCBI NO: 21740743 NR Description: OSJNBa0072K14.8 [Oryza sativa (japonica
  misc_feature (114)..(364): Homolog of NCBI NO: 22967670 NR Description: hypothetical protein [Rhodospirillum rubrum]
  misc_feature (1)..(118): Homolog of NCBI NO: 22967670 NR Description: hypothetical protein [Rhodospirillum rubrum]
MGESITDGTLATFLKKPGERVQADEAIAQIETDKVTIDIASPASGVIQEFLVNEGDTVEPGTKVAIISKSEDTASQVTPSQKIPETTDTKPSPPAEDKQKPRVESAPVAEKPKAPSSPPPPKQSAKEPQLPPKERERRVPMTRLRKRVATRLKDSQNTFALLTTFNEVDMTNLMKLRSQYKDAFYEKHGVKLGLMSGFIKAAVSALQHQPVVNAVIDGDDIIYRDYVDISIAVGTSKGLVVPVIRGADKMNFAEIEKTINSLAKKANEGTISIDEMAGGSFTVSNGGVYGSLISTPIINPPQSAILGMHSIVSRPMVVGGSVVPRPMMYVALTYDHRLIDGREAVYFLRRVKDVVEDPQRLLLDI

SEQ ID NO: 89020 - protein, 225 aa, Arabidopsis thaliana
  peptide (1)..(225): Ceres Seq. ID no. 12714757
  misc_feature (1)..(223): Pfam Name: 2-oxoacid dehydrogenases acyltransferase Pfam Description: 2-oxoacid dehydrogenases acyltransferase
  misc_feature (1)..(225): Homolog of NCBI NO: 18416889 NR Description: putative dihydrolipoamide succinyltransferase; id: At4g26910.1, supported by cDNA: 101175. [Arabidopsis
  misc_feature (1)..(225): Homolog of NCBI NO: 30687405 NR Description: dihydrolipoamide succinyltransferase -related thaliana] >gi|24030315|gb|AAN41326.1| putative dihydrolipoamide
  misc_feature (1)..(225): Homolog of NCBI NO: 21618217 NR Description: putative dihydrolipoamide succinyltransferase
  misc_feature (1)..(225): Homolog of NCBI NO: 30687411 NR Description: dihydrolipoamide succinyltransferase -related
  misc_feature (1)..(225): Homolog of NCBI NO: 4210332 NR Description: 2-oxoglutarate dehydrogenase E2 subunit
  misc_feature (1)..(225): Homolog of NCBI NO: 7484908 NR Description: dihydrolipoamide S-succinyltransferase homolog - Arabidopsis thaliana >gi|4455214|emb|CAB36537.1| putative succinyltransferase [Arabidopsis thaliana]
  misc_feature (1)..(225): Homolog of NCBI NO: 15240454 NR Description: 2-oxoglutarate dehydrogenase E2 subunit; protein At5g55070.1, supported by cDNA: gi_14596218 [Arabidopsis
  misc_feature (1)..(225): Homolog of NCBI NO: 21740743 NR Description: OSJNBa0072K14.8 [Oryza sativa (japonica
  misc_feature (1)..(224): Homolog of NCBI NO: 22967670 NR Description: hypothetical protein [Rhodospirillum rubrum]
  misc_feature (1)..(225): Homolog of NCBI NO: 3914210 NR Description: Dihydrolipoamide succinyltransferase component of oxoglutarate dehydrogenase complex, mitochondrial precursor (E2)
MTRLRKRVATRLKDSQNTFALLTTFNEVDMTNLMKLRSQYKDAFYEKHGVKLGLMSGFIKAAVSALQHQPVVNAVIDGDDIIYRDYVDISIAVGTSKGLVVPVIRGADKMNFAEIEKTINSLAKKANEGTISIDEMAGGSFTVSNGGVYGSLISTPIINPPQSAILGMHSIVSRPMVVGGSVVPRPMMYVALTYDHRLIDGREAVYFLRRVKDVVEDPQRLLLDI

SEQ ID NO: 89021 - DNA, 983 bp, Arabidopsis thaliana
  misc_feature (1)..(983): Ceres Seq. ID no. 12714758
  misc_feature: MA Experiment ID: 20000173 Result: Down-regulated in Transcription
  misc_feature: MA Experiment 20000173 PARAMETER Experiment Name: At_42deg_Heat_P Parameter: Age (day) Value: 14
  misc_feature: MA Experiment 20000173 PARAMETER Experiment Name: At_42deg_Heat_P Parameter: Organism Value: A. thaliana
  misc_feature: MA Experiment 20000173 PARAMETER Experiment Name: At_42deg_Heat_P Parameter: Plant Line Value: WS
  misc_feature: MA Experiment 20000173 PARAMETER Experiment Name: At_42deg_Heat_P Parameter: Temperature (deg C) Value: 42 vs. 22
  misc_feature: MA Experiment 20000173 PARAMETER Experiment Name: At_42deg_Heat_P Parameter: Timepoint (hr) Value: 6
  misc_feature: MA Experiment 20000173 PARAMETER Experiment Name: At_42deg_Heat_P Parameter: Tissue Value: Aerial
gaacaattcattcttctgggtgtgttgtgtttgagtttttggatcatacgaagaagaaatcggcgggagaagctatgtcgaggctatgggcgagatttgcgggattgttcagtagcaagagttttatcggagtagacaagactggtaacaagtacttttccagaatggaggagattgacggattcgtgaaggagaaaagatgggtcaagtttagacgagaggaggacccaacctctattcctgttgaatggatttgttggctgaatgggcagcgaaaaagggctcctactcctgaggaaatgattgaacttgaagcaaggcgtgagcgtgtaaagcttaatgttgctcttctcaagaaggaagaggaggagaagaaagccagagtaggcaccggacgcaaaatcaccattggtaaagttgatggtccagatttgacaagctttgttcgccaatttccaccagattcaaaaggtggtgaaccagaggaagctagtgaagaagcagataaatcaagggccaaggaacatgaacccgagatagtttctgcagaaccacccgaaccaaagacaacagagccatcaggatctggatcatcatttaggcccgggacatggcagccaccatcctaaacacatctctcttcacgcagatgacaaaccaacatactattcaattattttgtttgttgtactctacacaaccgattggtttgagccttacagatgagccataagaccagagagcttttcaagaccctaaaattgtgtcctttcacgctgtcattgaggacttagaagagtcaaaatgagaagccatcttcttatactttgttttgtttagggtgtttgtctcttggcataatgcttgagacttttagcctgccttgtccttcatagctgaagaggagcctagctaccttttgtttctcttcgttgacttgaataaaacagtttgattgaataacagttattcattttcatgtc

SEQ ID NO: 89022 - protein, 208 aa, Arabidopsis thaliana
  peptide (1)..(208): Ceres Seq. ID no. 12714759
  misc_feature (25)..(208): Homolog of NCBI NO: 30687433 NR Description: NADH:ubiquinone oxidoreductase family thaliana] >gi|19347747|gb|AAL86298.1| unknown protein thaliana] >gi|22136740|gb|AAM91689.1| unknown protein
TIHSSGCVVFEFLDHTKKKSAGEAMSRLWARFAGLFSSKSFIGVDKTGNKYFSRMEEIDGFVKEKRWVKFRREEDPTSIPVEWICWLNGQRKRAPTPEEMIELEARRERVKLNVALLKKEEEEKKARVGTGRKITIGKVDGPDLTSFVRQFPPDSKGGEPEEASEEADKSRAKEHEPEIVSAEPPEPKTTEPSGSGSSFRPGTWQPPS

SEQ ID NO: 89023 - protein, 184 aa, Arabidopsis thaliana
  peptide (1)..(184): Ceres Seq. ID no. 12714760
  misc_feature (1)..(184): Homolog of NCBI NO: 30687433 NR Description: NADH:ubiquinone oxidoreductase family thaliana] >gi|19347747|gb|AAL86298.1| unknown protein thaliana] >gi|22136740|gb|AAM91689.1| unknown protein
MSRLWARFAGLFSSKSFIGVDKTGNKYFSRMEEIDGFVKEKRWVKFRREEDPTSIPVEWICWLNGQRKRAPTPEEMIELEARRERVKLNVALLKKEEEEKKARVGTGRKITIGKVDGPDLTSFVRQFPPDSKGGEPEEASEEADKSRAKEHEPEIVSAEPPEPKTTEPSGSGSSFRPGTWQPPS

SEQ ID NO: 89024 - protein, 154 aa, Arabidopsis thaliana
  peptide (1)..(154): Ceres Seq. ID no. 12714761
  misc_feature (1)..(154): Homolog of NCBI NO: 30687433 NR Description: NADH:ubiquinone oxidoreductase family thaliana] >gi|19347747|gb|AAL86298.1| unknown protein thaliana] >gi|22136740|gb|AAM91689.1| unknown protein
MEEIDGFVKEKRWVKFRREEDPTSIPVEWICWLNGQRKRAPTPEEMIELEARRERVKLNVALLKKEEEEKKARVGTGRKITIGKVDGPDLTSFVRQFPPDSKGGEPEEASEEADKSRAKEHEPEIVSAEPPEPKTTEPSGSGSSFRPGTWQPPS

SEQ ID NO: 89025 - DNA, 1096 bp, Arabidopsis thaliana
  misc_feature (1)..(1096): Ceres Seq. ID no. 12714770
  misc_feature: MA Experiment ID: 20000438 Result: Down-regulated in Transcription
  misc_feature: MA Experiment 20000438 PARAMETER Experiment Name: At_Shoots__P Parameter: Age (day) Value: 14
  misc_feature: MA Experiment 20000438 PARAMETER Experiment Name: At_Shoots__P Parameter: Tissue Value: Shoots vs. Whole Plant
atggaattgcaaggagaggaaagcaaaacggcgacgtattgcgtgacgggtgcaagtggatacatcggttcttggttggttaagtctcttctccaaagaggttacacagtccatgccactctcagagatcttgcaaaatctgaatactttcaatctaaatggaaggaaaatgaacggctcagattattccgagcggatcttcgagatgacggcagctttgacgacgccgttaagggttgtgacggcgtcttccatgtcgccgcttccatggagtttgatatctcatcagatcacgttaatctcgagagttatgtccagagcaaagtcatagaaccggcgctaaaaggcgtacggaatgtacttagttcttgtctaaagtcaaagtcagtcaaaagagttgtcttcacatcatccatcagcactctcactgctaaagatgagaatgaacggatgagatctttcgtggatgaaacatgcaaggctcatgttgatcatgtccttaaaacacaagcaagtggatggatttatgtattatcgaagctcgtatcagaggaagaagcatttcggtatgcgaaagagagaggaatggatcttgtttcagtcattacaacaactgtttcaggtccattccttactccatttgtcccatcaagcgttcaagttctcttgtctccaattacaggtgactcaaagttgtttgcgatattatcagctgtgaacaaaagaatgggttcgattgctttagtacacattgaagatatttgcagggctcatctgtttttgatggaacaaccaaaggctaaaggtcaatatatatgttgtgttgacaatattgatatgcatgagttgatgcttcatcacttctctaaggactatctttgtaaagttcaaaaggtaaatgaagacgaggaagagagagaatgtatgaagcctataatttcttcaaagaagttaagagaattggggtttgagtacaaatatggtattgaagaaattgttgatcaaaccattgatgcttctatcaagattaagttccctaccttgaaccacaaactcaggcagtgagaatgtgagatcaacaacgattgatgcttct

SEQ ID NO: 89026 - protein, 354 aa, Arabidopsis thaliana
  peptide (1)..(354): Ceres Seq. ID no. 12714771
  misc_feature (15)..(142): Pfam Name: NAD dependent epimerase/dehydratase family Pfam Description: NAD dependent epimerase/dehydratase family
  misc_feature (1)..(354): Homolog of NCBI NO: 30687527 NR Description: dihydroflavonol 4-reductase (dihydrokaempferol family [Arabidopsis thaliana] >gi|23296465|gb|AAN13064.1| unknown
  misc_feature (41)..(354): Homolog of NCBI NO: 7486807 NR Description: hypothetical protein M4I22.60 - Arabidopsis >gi|3269286|emb|CAA19719.1| putative protein [Arabidopsis >gi|7269578|emb|CAB79580.1| putative protein [Arabidopsis
  misc_feature (1)..(44): Homolog of NCBI NO: 7486807 NR Description: hypothetical protein M4I22.60 - Arabidopsis >gi|3269286|emb|CAA19719.1| putative protein [Arabidopsis >gi|7269578|emb|CAB79580.1| putative protein [Arabidopsis
MELQGEESKTATYCVTGASGYIGSWLVKSLLQRGYTVHATLRDLAKSEYFQSKWKENERLRLFRADLRDDGSFDDAVKGCDGVFHVAASMEFDISSDHVNLESYVQSKVIEPALKGVRNVLSSCLKSKSVKRVVFTSSISTLTAKDENERMRSFVDETCKAHVDHVLKTQASGWIYVLSKLVSEEEAFRYAKERGMDLVSVITTTVSGPFLTPFVPSSVQVLLSPITGDSKLFAILSAVNKRMGSIALVHIEDICRAHLFLMEQPKAKGQYICCVDNIDMHELMLHHFSKDYLCKVQKVNEDEEERECMKPIISSKKLRELGFEYKYGIEEIVDQTIDASIKIKFPTLNHKLRQ

SEQ ID NO: 89027 - protein, 265 aa, Arabidopsis thaliana
  peptide (1)..(265): Ceres Seq. ID no. 12714772
  misc_feature (1)..(53): Pfam Name: NAD dependent epimerase/dehydratase family Pfam Description: NAD dependent epimerase/dehydratase family
  misc_feature (1)..(265): Homolog of NCBI NO: 30687527 NR Description: dihydroflavonol 4-reductase (dihydrokaempferol family [Arabidopsis thaliana] >gi|23296465|gb|AAN13064.1| unknown
  misc_feature (1)..(265): Homolog of NCBI NO: 7486807 NR Description: hypothetical protein M4I22.60 - Arabidopsis >gi|3269286|emb|CAA19719.1| putative protein [Arabidopsis >gi|7269578|emb|CAB79580.1| putative protein [Arabidopsis
MEFDISSDHVNLESYVQSKVIEPALKGVRNVLSSCLKSKSVKRVVFTSSISTLTAKDENERMRSFVDETCKAHVDHVLKTQASGWIYVLSKLVSEEEAFRYAKERGMDLVSVITTTVSGPFLTPFVPSSVQVLLSPITGDSKLFAILSAVNKRMGSIALVHIEDICRAHLFLMEQPKAKGQYICCVDNIDMHELMLHHFSKDYLCKVQKVNEDEEERECMKPIISSKKLRELGFEYKYGIEEIVDQTIDASIKIKFPTLNHKLRQ

SEQ ID NO: 89028 - protein, 204 aa, Arabidopsis thaliana
  peptide (1)..(204): Ceres Seq. ID no. 12714773
  misc_feature (1)..(204): Homolog of NCBI NO: 30687527 NR Description: dihydroflavonol 4-reductase (dihydrokaempferol family [Arabidopsis thaliana] >gi|23296465|gb|AAN13064.1| unknown
  misc_feature (1)..(204): Homolog of NCBI NO: 7486807 NR Description: hypothetical protein M4I22.60 - Arabidopsis >gi|3269286|emb|CAA19719.1| putative protein [Arabidopsis >gi|7269578|emb|CAB79580.1| putative protein [Arabidopsis
MRSFVDETCKAHVDHVLKTQASGWIYVLSKLVSEEEAFRYAKERGMDLVSVITTTVSGPFLTPFVPSSVQVLLSPITGDSKLFAILSAVNKRMGSIALVHIEDICRAHLFLMEQPKAKGQYICCVDNIDMHELMLHHFSKDYLCKVQKVNEDEEERECMKPIISSKKLRELGFEYKYGIEEIVDQTIDASIKIKFPTLNHKLRQ

SEQ ID NO: 89029 - DNA, 1168 bp, Arabidopsis thaliana
  misc_feature (1)..(1168): Ceres Seq. ID no. 12714782
  misc_feature: MA Experiment ID: 108434 Result: Down-regulated in Transcription
  misc_feature: MA Experiment 108434 PARAMETER Experiment Name: At_Root_Tips_cDNA_P Parameter: Tissue Value: Root Tips
  misc_feature: MA Experiment ID: 108572 Result: Up-regulated in Transcription
  misc_feature: MA Experiment 108572 PARAMETER Experiment Name: At_Drought_cDNA_P Parameter: Timepoint (hr) Value: 1
  misc_feature: MA Experiment 108572 PARAMETER Experiment Name: At_Drought_cDNA_P Parameter: Tissue Value: Aerial
  misc_feature: MA Experiment 108572 PARAMETER Experiment Name: At_Drought_cDNA_P Parameter: Treatment Value: Drought vs. No Drought
  misc_feature: MA Experiment ID: 108574 Result: Up-regulated in Transcription
  misc_feature: MA Experiment 108574 PARAMETER Experiment Name: At_Wounding__cDNA_P Parameter: Timepoint (hr) Value: 1
  misc_feature: MA Experiment 108574 PARAMETER Experiment Name: At_Wounding__cDNA_P Parameter: Tissue Value: Aerial
  misc_feature: MA Experiment 108574 PARAMETER Experiment Name: At_Wounding__cDNA_P Parameter: Treatment Value: Wounding vs. No Wounding
  misc_feature: MA Experiment ID: 108577 Result: Up-regulated in Transcription
  misc_feature: MA Experiment 108577 PARAMETER Experiment Name: At_42deg_Heat_cDNA_P Parameter: Temperature (deg C) Value: 42 vs. 22
  misc_feature: MA Experiment 108577 PARAMETER Experiment Name: At_42deg_Heat_cDNA_P Parameter: Timepoint (hr) Value: 6
  misc_feature: MA Experiment 108577 PARAMETER Experiment Name: At_42deg_Heat_cDNA_P Parameter: Tissue Value: Aerial
  misc_feature: MA Experiment ID: 108585 Result: Up-regulated in Transcription
  misc_feature: MA Experiment 108585 PARAMETER Experiment Name: At_5mM_NaNP_cDNA_P Parameter: Timepoint (hr) Value: 6
  misc_feature: MA Experiment 108585 PARAMETER Experiment Name: At_5mM_NaNP_cDNA_P Parameter: Tissue Value: Aerial
  misc_feature: MA Experiment 108585 PARAMETER Experiment Name: At_5mM_NaNP_cDNA_P Parameter: Treatment Value: null
  misc_feature: MA Experiment ID: 108595 Result: Up-regulated in Transcription
  misc_feature: MA Experiment 108595 PARAMETER Experiment Name: At_Ler-pi_Ovule_cDNA_P Parameter: Plant Line Value: null
  misc_feature: MA Experiment ID: 108668 Result: Up-regulated in Transcription
  misc_feature: MA Experiment 108668 PARAMETER Experiment Name: At_2mM_SA_cDNA_P Parameter: Plant Line Value: WS
  misc_feature: MA Experiment 108668 PARAMETER Experiment Name: At_2mM_SA_cDNA_P Parameter: Timepoint (hr) Value: 6
  misc_feature: MA Experiment 108668 PARAMETER Experiment Name: At_2mM_SA_cDNA_P Parameter: Treatment Value: 2mM SA vs. No Treatment
  misc_feature: MA Experiment ID: 20000112 Result: Up-regulated in Transcription
  misc_feature: MA Experiment 20000112 PARAMETER Experiment Name: At_42deg_Heat_cDNA_P Parameter: Temperature (deg C) Value: 42 vs. 22
  misc_feature: MA Experiment 20000112 PARAMETER Experiment Name: At_42deg_Heat_cDNA_P Parameter: Timepoint (hr) Value: 2
  misc_feature: MA Experiment 20000112 PARAMETER Experiment Name: At_42deg_Heat_cDNA_P Parameter: Tissue Value: Aerial
  misc_feature: MA Experiment ID: 20000113 Result: Up-regulated in Transcription
  misc_feature: MA Experiment 20000113 PARAMETER Experiment Name: At_42deg_Heat_cDNA_P Parameter: Temperature (deg C) Value: 42 vs. 22
  misc_feature: MA Experiment 20000113 PARAMETER Experiment Name: At_42deg_Heat_cDNA_P Parameter: Timepoint (hr) Value: 8
  misc_feature: MA Experiment 20000113 PARAMETER Experiment Name: At_42deg_Heat_cDNA_P Parameter: Tissue Value: Aerial
  misc_feature: MA Experiment ID: 20000144 Result: Up-regulated in Transcription
  misc_feature: MA Experiment 20000144 PARAMETER Experiment Name: At_42deg_Heat_cDNA_P Parameter: Temperature (deg C) Value: 42 vs. 22
  misc_feature: MA Experiment 20000144 PARAMETER Experiment Name: At_42deg_Heat_cDNA_P Parameter: Timepoint (hr) Value: 1
  misc_feature: MA Experiment 20000144 PARAMETER Experiment Name: At_42deg_Heat_cDNA_P Parameter: Tissue Value: Aerial
  misc_feature: MA Experiment ID: 20000171 Result: Up-regulated in Transcription
  misc_feature: MA Experiment 20000171 PARAMETER Experiment Name: At_42deg_Heat_P Parameter: Age (day) Value: 14
  misc_feature: MA Experiment 20000171 PARAMETER Experiment Name: At_42deg_Heat_P Parameter: Organism Value: A. thaliana
  misc_feature: MA Experiment 20000171 PARAMETER Experiment Name: At_42deg_Heat_P Parameter: Plant Line Value: WS
  misc_feature: MA Experiment 20000171 PARAMETER Experiment Name: At_42deg_Heat_P Parameter: Temperature (deg C) Value: 42 vs. 22
  misc_feature: MA Experiment 20000171 PARAMETER Experiment Name: At_42deg_Heat_P Parameter: Timepoint (hr) Value: 1
  misc_feature: MA Experiment 20000171 PARAMETER Experiment Name: At_42deg_Heat_P Parameter: Tissue Value: Aerial
  misc_feature: MA Experiment ID: 20000173 Result: Up-regulated in Transcription
  misc_feature: MA Experiment 20000173 PARAMETER Experiment Name: At_42deg_Heat_P Parameter: Age (day) Value: 14
  misc_feature: MA Experiment 20000173 PARAMETER Experiment Name: At_42deg_Heat_P Parameter: Organism Value: A. thaliana
  misc_feature: MA Experiment 20000173 PARAMETER Experiment Name: At_42deg_Heat_P Parameter: Plant Line Value: WS
  misc_feature: MA Experiment 20000173 PARAMETER Experiment Name: At_42deg_Heat_P Parameter: Temperature (deg C) Value: 42 vs. 22
  misc_feature: MA Experiment 20000173 PARAMETER Experiment Name: At_42deg_Heat_P Parameter: Timepoint (hr) Value: 6
  misc_feature: MA Experiment 20000173 PARAMETER Experiment Name: At_42deg_Heat_P Parameter: Tissue Value: Aerial
  misc_feature: MA Experiment ID: 20001247 Result: Up-regulated in Transcription
  misc_feature: MA Experiment 20001247 PARAMETER Experiment Name: At_Far-red-induction_P Parameter: Age (day) Value: 7
  misc_feature: MA Experiment 20001247 PARAMETER Experiment Name: At_Far-red-induction_P Parameter: Light Value: Far-red vs. White
  misc_feature: MA Experiment 20001247 PARAMETER Experiment Name: At_Far-red-induction_P Parameter: Organism Value: A. thaliana
  misc_feature: MA Experiment 20001247 PARAMETER Experiment Name: At_Far-red-induction_P Parameter: Plant Line Value: Columbia
  misc_feature: MA Experiment 20001247 PARAMETER Experiment Name: At_Far-red-induction_P Parameter: Timepoint (hr) Value: 1
  misc_feature: MA Experiment 20001247 PARAMETER Experiment Name: At_Far-red-induction_P Parameter: Tissue Value: Whole Plant
ggtgccgctcgacgtgttaatcttcttcctcctgaagatctctctctgaaagacattctcaaattttctcgggaaaacacctttttctgattcgtttttctccagatcattccttctttcttatatccgatttcttcgggaggaggcgaagagacggtcaacaattttatccaatgtcgcgccgtcttttcgcctgtttcggcctcaagaaatcttcaactaaacctatctctggtggtaacaattccgccgccgtagccgcagaaattcccgccggagatggtcccgttctcgtccagctattctcgtctcagggatgtaaaacatcgcccgcggcggagatgttgatgtcccggctaggtcgaggtgatttcgacgctcagatccgtggcgaagatggtggatctggatctccgacgatggttttggtgtttcatgtggattattgggattacaaggggtggaaagatccgtatggatcgagccaatggacggtgaggcagaaggcgtatatagaggcgttgaatctggatacgatgtttactccgcagcttgtgatccaaggtcgttctcaattgatcggaaacgaagaggagacgctgctcaaatctatctccgaagcgcctaggtttccttctccagccttccgggcgactttccagagaccaacctcagagacactgcaagtatcactcaccggagctttgagaatgaaagtagacggagacggaatggacataatggtggcaatatacgaaaccgggcttgtgaacgactgtgcaagaggagagaacgaaggaagaatgttgtcgaatgattacgttgtaagaaagatggaaaagatgtgcactgtgaaagatgtagcaccgaagaagccagtctcggggactgctcattttacgctctgggatggattcaacagcagcaaatgtggagtcgccgtctttcttcagaactcttctcttcagatttttggtacacagagttttaaattacctgatgagatttgagttaatttccctaatatctgaaaaataaagaaaagaaaaccgatctttgtatcgtccatattttgcttgtgataatcattcgggttccactctgcttttgtacagttataaatgtgtgactacttataacttaatagggtttaaggtttcttctaatt

SEQ ID NO: 89030 - protein, 278 aa, Arabidopsis thaliana; identical to SEQ ID NO: 23190
  peptide (1)..(278): Ceres Seq. ID no. 12714783
  misc_feature (1)..(278): Homolog of NCBI NO: 15234089 NR Description: putative protein; protein id: At4g27350.1, by cDNA: 35749., supported by cDNA: gi_12597468, supported by gi_13265462, supported by cDNA: gi_21281146 [Arabidopsis
  misc_feature (1)..(278): Homolog of NCBI NO: 21593063 NR Description: unknown [Arabidopsis thaliana]
  misc_feature (1)..(278): Homolog of NCBI NO: 13265463 NR Description: AT4g27350 [Arabidopsis thaliana]
  misc_feature (1)..(278): Homolog of NCBI NO: 15239579 NR Description: putative protein; protein id: At5g54240.1 thaliana] >gi|9759497|dbj|BAB10747.1|
  misc_feature (1)..(278): Homolog of NCBI NO: 34394018 NR Description: membrane lipoprotein lipid attachment
  misc_feature (206)..(278): Homolog of NCBI NO: 28393652 NR Description: unknown protein [Arabidopsis thaliana]
  misc_feature (38)..(224): Homolog of NCBI NO: 23014426 NR Description: hypothetical protein [Magnetospirillum
  misc_feature (30)..(263): Homolog of NCBI NO: 22962198 NR Description: hypothetical protein [Rhodopseudomonas palustris]
  misc_feature (27)..(224): Homolog of NCBI NO: 13473812 NR Description: hypothetical protein [Mesorhizobium loti]
  misc_feature (2)..(213): Homolog of NCBI NO: 13473665 NR Description: hypothetical protein, - Arabidopsis thaliana loti] >gi|14024415|dbj|BAB51019.1| hypothetical protein

SEQ ID NO: 89031 - protein, 222 aa, Arabidopsis thaliana; identical to SEQ ID NO: 23191
  peptide (1)..(222): Ceres Seq. ID no. 12714784
  misc_feature (1)..(222): Homolog of NCBI NO: 15234089 NR Description: putative protein; protein id: At4g27350.1, by cDNA: 35749., supported by cDNA: gi_12597468, supported by gi_13265462, supported by cDNA: gi_21281146 [Arabidopsis
  misc_feature (1)..(222): Homolog of NCBI NO: 21593063 NR Description: unknown [Arabidopsis thaliana]
  misc_feature (1)..(222): Homolog of NCBI NO: 13265463 NR Description: AT4g27350 [Arabidopsis thaliana]
  misc_feature (1)..(222): Homolog of NCBI NO: 15239579 NR Description: putative protein; protein id: At5g54240.1 thaliana] >gi|9759497|dbj|BAB10747.1|
  misc_feature (1)..(222): Homolog of NCBI NO: 34394018 NR Description: membrane lipoprotein lipid attachment
  misc_feature (150)..(222): Homolog of NCBI NO: 28393652 NR Description: unknown protein [Arabidopsis thaliana]
  misc_feature (1)..(168): Homolog of NCBI NO: 23014426 NR Description: hypothetical protein [Magnetospirillum
  misc_feature (1)..(207): Homolog of NCBI NO: 22962198 NR Description: hypothetical protein [Rhodopseudomonas palustris]
  misc_feature (1)..(168): Homolog of NCBI NO: 13473812 NR Description: hypothetical protein [Mesorhizobium loti]
  misc_feature (1)..(157): Homolog of NCBI NO: 13473665 NR Description: hypothetical protein, - Arabidopsis thaliana loti] >gi|14024415|dbj|BAB51019.1| hypothetical protein

SEQ ID NO: 89032 - protein, 220 aa, Arabidopsis thaliana; identical to SEQ ID NO: 23192
  peptide (1)..(220): Ceres Seq. ID no. 12714785
  misc_feature (1)..(220): Homolog of NCBI NO: 15234089 NR Description: putative protein; protein id: At4g27350.1, by cDNA: 35749., supported by cDNA: gi_12597468, supported by gi_13265462, supported by cDNA: gi_21281146 [Arabidopsis
  misc_feature (1)..(220): Homolog of NCBI NO: 21593063 NR Description: unknown [Arabidopsis thaliana]
  misc_feature (1)..(220): Homolog of NCBI NO: 13265463 NR Description: AT4g27350 [Arabidopsis thaliana]
  misc_feature (1)..(220): Homolog of NCBI NO: 15239579 NR Description: putative protein; protein id: At5g54240.1 thaliana] >gi|9759497|dbj|BAB10747.1|
  misc_feature (1)..(220): Homolog of NCBI NO: 34394018 NR Description: membrane lipoprotein lipid attachment
  misc_feature (148)..(220): Homolog of NCBI NO: 28393652 NR Description: unknown protein [Arabidopsis thaliana]
  misc_feature (1)..(166): Homolog of NCBI NO: 23014426 NR Description: hypothetical protein [Magnetospirillum
  misc_feature (1)..(205): Homolog of NCBI NO: 22962198 NR Description: hypothetical protein [Rhodopseudomonas palustris]
  misc_feature (1)..(166): Homolog of NCBI NO: 13473812 NR Description: hypothetical protein [Mesorhizobium loti]
  misc_feature (1)..(155): Homolog of NCBI NO: 13473665 NR Description: hypothetical protein, - Arabidopsis thaliana loti] >gi|14024415|dbj|BAB51019.1| hypothetical protein

SEQ ID NO: 89033 - DNA, 1487 bp, Arabidopsis thaliana
  misc_feature (1)..(1487): Ceres Seq. ID no. 12714790
  misc_feature: MA Experiment ID: 108462 Result: Down-regulated in Transcription
  misc_feature: MA Experiment 108462 PARAMETER Experiment Name: At_Germinating_Seeds_cDNA_P Parameter: Age (day) Value: 2 vs. 0
  misc_feature: MA Experiment 108462 PARAMETER Experiment Name: At_Germinating_Seeds_cDNA_P Parameter: Tissue Value: Germinating Seeds
  misc_feature: MA Experiment ID: 108463 Result: Down-regulated in Transcription
  misc_feature: MA Experiment 108463 PARAMETER Experiment Name: At_Germinating_Seeds_cDNA_P Parameter: Age (day) Value: 3 vs. 0
  misc_feature: MA Experiment 108463 PARAMETER Experiment Name: At_Germinating_Seeds_cDNA_P Parameter: Tissue Value: Germinating Seeds
  misc_feature: MA Experiment ID: 108464 Result: Down-regulated in Transcription
  misc_feature: MA Experiment 108464 PARAMETER Experiment Name: At_Germinating_Seeds_cDNA_P Parameter: Age (day) Value: 4 vs. 0
  misc_feature: MA Experiment 108464 PARAMETER Experiment Name: At_Germinating_Seeds_cDNA_P Parameter: Tissue Value: Germinating Seeds
  misc_feature: MA Experiment ID: 108579 Result: Up-regulated in Transcription
  misc_feature: MA Experiment 108579 PARAMETER Experiment Name: At_4deg_Cold_cDNA_P Parameter: Temperature (deg C) Value: 4 vs. 22
  misc_feature: MA Experiment 108579 PARAMETER Experiment Name: At_4deg_Cold_cDNA_P Parameter: Timepoint (hr) Value: 6
  misc_feature: MA Experiment 108579 PARAMETER Experiment Name: At_4deg_Cold_cDNA_P Parameter: Tissue Value: Aerial
  misc_feature: MA Experiment ID: 108585 Result: Up-regulated in Transcription
  misc_feature: MA Experiment 108585 PARAMETER Experiment Name: At_5mM_NaNP_cDNA_P Parameter: Timepoint (hr) Value: 6
  misc_feature: MA Experiment 108585 PARAMETER Experiment Name: At_5mM_NaNP_cDNA_P Parameter: Tissue Value: Aerial
  misc_feature: MA Experiment 108585 PARAMETER Experiment Name: At_5mM_NaNP_cDNA_P Parameter: Treatment Value: null
  misc_feature: MA Experiment ID: 108595 Result: Down-regulated in Transcription
  misc_feature: MA Experiment 108595 PARAMETER Experiment Name: At_Ler-pi_Ovule_cDNA_P Parameter: Plant Line Value: null
  misc_feature: MA Experiment ID: 20000069 Result: Up-regulated in Transcription
  misc_feature: MA Experiment 20000069 PARAMETER Experiment Name: At_100uM_ABA_Mutants_cDNA_P Parameter: Plant Line Value: CS23
  misc_feature: MA Experiment 20000069 PARAMETER Experiment Name: At_100uM_ABA_Mutants_cDNA_P Parameter: Timepoint (hr) Value: 6
  misc_feature: MA Experiment 20000069 PARAMETER Experiment Name: At_100uM_ABA_Mutants_cDNA_P Parameter: Tissue Value: Aerial
  misc_feature: MA Experiment 20000069 PARAMETER Experiment Name: At_100uM_ABA_Mutants_cDNA_P Parameter: Treatment Value: 100uM ABA vs. No Treatment
  misc_feature: MA Experiment ID: 20000070 Result: Up-regulated in Transcription
  misc_feature: MA Experiment 20000070 PARAMETER Experiment Name: At_100uM_ABA_Mutants_cDNA_P Parameter: Plant Line Value: CS24
  misc_feature: MA Experiment 20000070 PARAMETER Experiment Name: At_100uM_ABA_Mutants_cDNA_P Parameter: Timepoint (hr) Value: 6
  misc_feature: MA Experiment 20000070 PARAMETER Experiment Name: At_100uM_ABA_Mutants_cDNA_P Parameter: Tissue Value: Aerial
  misc_feature: MA Experiment 20000070 PARAMETER Experiment Name: At_100uM_ABA_Mutants_cDNA_P Parameter: Treatment Value: 100uM ABA vs. No Treatment
  misc_feature: MA Experiment ID: 20000086 Result: Up-regulated in Transcription
  misc_feature: MA Experiment 20000086 PARAMETER Experiment Name: At_100uM_ABA_Mutants_cDNA_P Parameter: Plant Line Value: CS22
  misc_feature: MA Experiment 20000086 PARAMETER Experiment Name: At_100uM_ABA_Mutants_cDNA_P Parameter: Timepoint (hr) Value: 6
  misc_feature: MA Experiment 20000086 PARAMETER Experiment Name: At_100uM_ABA_Mutants_cDNA_P Parameter: Tissue Value: Aerial
  misc_feature: MA Experiment 20000086 PARAMETER Experiment Name: At_100uM_ABA_Mutants_cDNA_P Parameter: Treatment Value: 100uM ABA vs. No Treatment
  misc_feature: MA Experiment ID: 20000227 Result: Up-regulated in Transcription
  misc_feature: MA Experiment 20000227 PARAMETER Experiment Name: At_Root-Tips-vs-Tops_P Parameter: Tissue Value: Root Tips vs. Root Tops
  misc_feature: MA Experiment ID: 20000234 Result: Up-regulated in Transcription
  misc_feature: MA Experiment 20000234 PARAMETER Experiment Name: At_Siliques_P Parameter: Age (day) Value: 21
  misc_feature: MA Experiment 20000234 PARAMETER Experiment Name: At_Siliques_P Parameter: Organism Value: A. thaliana
  misc_feature: MA Experiment 20000234 PARAMETER Experiment Name: At_Siliques_P Parameter: Plant Line Value: WS
  misc_feature: MA Experiment 20000234 PARAMETER Experiment Name: At_Siliques_P Parameter: Tissue Value: Less Than 5mm Siliques vs. Whole Plant
  misc_feature: MA Experiment ID: 20001451 Result: Down-regulated in Transcription
  misc_feature: MA Experiment 20001451 PARAMETER Experiment Name: At_Far-red-induction_P Parameter: Age (day) Value: 7
  misc_feature: MA Experiment 20001451 PARAMETER Experiment Name: At_Far-red-induction_P Parameter: Light Value: Far-red vs. White
  misc_feature: MA Experiment 20001451 PARAMETER Experiment Name: At_Far-red-induction_P Parameter: Organism Value: A. thaliana
  misc_feature: MA Experiment 20001451 PARAMETER Experiment Name: At_Far-red-induction_P Parameter: Plant Line Value: Columbia
  misc_feature: MA Experiment 20001451 PARAMETER Experiment Name: At_Far-red-induction_P Parameter: Timepoint (hr) Value: 24
  misc_feature: MA Experiment 20001451 PARAMETER Experiment Name: At_Far-red-induction_P Parameter: Tissue Value: Whole Plant
  misc_feature: MA Experiment ID: 20001557 Result: Up-regulated in Transcription
  misc_feature: MA Experiment 20001557 PARAMETER Experiment Name: At_Drought_Soil_Dry_P Parameter: Age (day) Value: 27
  misc_feature: MA Experiment 20001557 PARAMETER Experiment Name: At_Drought_Soil_Dry_P Parameter: Organism Value: A. thaliana
  misc_feature: MA Experiment 20001557 PARAMETER Experiment Name: At_Drought_Soil_Dry_P Parameter: Plant Line Value: WS
  misc_feature: MA Experiment 20001557 PARAMETER Experiment Name: At_Drought_Soil_Dry_P Parameter: Post Timepoint (hr) Value: 3
  misc_feature: MA Experiment 20001557 PARAMETER Experiment Name: At_Drought_Soil_Dry_P Parameter: Post-Treatment Value: Re-Water vs. No Drought
  misc_feature: MA Experiment 20001557 PARAMETER Experiment Name: At_Drought_Soil_Dry_P Parameter: Timepoint (day) Value: 13
  misc_feature: MA Experiment 20001557 PARAMETER Experiment Name: At_Drought_Soil_Dry_P Parameter: Treatment Value: Drought vs. No Drought
  misc_feature: MA Experiment ID: 20001558 Result: Up-regulated in Transcription
  misc_feature: MA Experiment 20001558 PARAMETER Experiment Name: At_Drought_Soil_Dry_P Parameter: Age (day) Value: 27
  misc_feature: MA Experiment 20001558 PARAMETER Experiment Name: At_Drought_Soil_Dry_P Parameter: Organism Value: A. thaliana
  misc_feature: MA Experiment 20001558 PARAMETER Experiment Name: At_Drought_Soil_Dry_P Parameter: Plant Line Value: WS
  misc_feature: MA Experiment 20001558 PARAMETER Experiment Name: At_Drought_Soil_Dry_P Parameter: Post Timepoint (hr) Value: 6
  misc_feature: MA Experiment 20001558 PARAMETER Experiment Name: At_Drought_Soil_Dry_P Parameter: Post-Treatment Value: Re-Water vs. No Drought
  misc_feature: MA Experiment 20001558 PARAMETER Experiment Name: At_Drought_Soil_Dry_P Parameter: Timepoint (day) Value: 13
  misc_feature: MA Experiment 20001558 PARAMETER Experiment Name: At_Drought_Soil_Dry_P Parameter: Treatment Value: Drought vs. No Drought
  misc_feature: Pfam Name: Band_7 Pfam Description: SPFH domain / Band 7 family
acatatcatttttctgattctcccacgaagatgaaccacctcgttcgtaaaagctccgtcggttactccgccttgaggtccgtttcgtacctccgtcaatctgccgttacctctccacctccgattttctccgccgccgcttcaaccgttcgccagttcacttccgccggctatccttccaacagttttcaattgacgccgccgacgaattggggaatccggatagttccggagaggaaggcgtttgtgattgagcgattcggtaaatacgctacgacgttgccgtcggggattcatttcctcattccgttcgtggatcgtattgcttatgttcattctctcaaggaagaagctatcccgattccgaatcagactgcgattactaaagacaacgttagtatccacatcgatggtgttctctacgttaagattgtggatcctaagttagcttcttatggcgttgagagtcctatctatgctgttgtacagctggctcagaccacaatgcgtagtgagcttggtaagatcactcttgataagacctttgaggaacgagacactctcaacgagaagatagtggaagccatcaatgttgctgcaaaagactggggtcttcagtgccttcgttatgagataagggatattatgccccctcatggagtgcgagctgctatggaaatgcaagctgaagctgagcgtaaaaagagagcccagattcttgagtctgaaggagaaaggcaatcccatatcaacattgctgatggtaagaaaagttctgtaatcttggcatctgaagcagcaaagatggaccaggtgaatcgagcacaaggtgaggcagaagcaatactagctagagcacaagcaactgcgaaaggcctggtcttgttatctcagtccctcaaggaaactgggggagtagaggcggcgagtttgagagttgcagagcaatacattacagccttcggtaacattgccaaggagggtacgataatgttgcttccaagtggtgcttcaaatcctgctagcatgattgctcaagctttaacaatgtacaaaagccttgtcatcaatggtccaagcaaagatcaccaagaaacacaagcacttgatgaaacagatttggaagagttggaagacatgggtgagaaacatatatcagaaggctctaataaccgatcaggctcaatatcatttgacacagagaaaccaggtcacaccggtgaaccacgattttctcttcagaaccgcaacaaggatccgcagtaggcagccgaaccggggatgagataaattctttgggcttgagaaaactggaaaccatttttcatctttcaaatatgaggcagtaaccatcttttccgtttgaatagctagaatatcatcactttgcatatagaaacgaatctgaacatctgttctccgataagaattttcctactggatttgttatgaacatggtccttgtgttcttattcacctttattccc

SEQ ID NO: 89034 - protein, 421 aa, Arabidopsis thaliana
  peptide (1)..(421): Ceres Seq. ID no. 12714791
  misc_feature: Pfam Name: Band_7 Pfam Description: SPFH domain / Band 7 family
  misc_feature (11)..(421): Homolog of NCBI NO: 18417021 NR Description: putative protein; protein id: At4g27585.1, by cDNA: 20829., supported by cDNA: gi_14334465, supported by
  misc_feature (11)..(403): Homolog of NCBI NO: 7487517 NR Description: hypothetical protein T29A15.70 - Arabidopsis >gi|4469009|emb|CAB38270.1| putative protein [Arabidopsis >gi|7269612|emb|CAB81408.1| putative protein [Arabidopsis
  misc_feature (3)..(360): Homolog of NCBI NO: 15239547 NR Description: putative protein; protein id: At5g54100.1, by cDNA: 205622. [Arabidopsis thaliana] contains similarity to stomatin like protein~gene_id:MJP23.8
  misc_feature (3)..(360): Homolog of NCBI NO: 21554125 NR Description: stomatin-like protein [Arabidopsis thaliana]
  misc_feature (29)..(382): Homolog of NCBI NO: 7716464 NR Description: stomatin-like protein [Zea mays]
  misc_feature (51)..(354): Homolog of NCBI NO: 23394406 NR Description: unknown [Phytophthora infestans]
  misc_feature (73)..(361): Homolog of NCBI NO: 15604196 NR Description: unknown [Rickettsia prowazekii]
  misc_feature (73)..(354): Homolog of NCBI NO: 15892375 NR Description: unknown [Rickettsia conorii]
  misc_feature (68)..(383): Homolog of NCBI NO: 32766629 NR Description: Unknown (protein for MGC:63505) [Danio rerio]
  misc_feature (68)..(386): Homolog of NCBI NO: 12963591 NR Description: stomatin-like protein 2 [Mus musculus]
TYHFSDSPTKMNHLVRKSSVGYSALRSVSYLRQSAVTSPPPIFSAAASTVRQFTSAGYPSNSFQLTPPTNWGIRIVPERKAFVIERFGKYATTLPSGIHFLIPFVDRIAYVHSLKEEAIPIPNQTAITKDNVSIHIDGVLYVKIVDPKLASYGVESPIYAVVQLAQTTMRSELGKITLDKTFEERDTLNEKIVEAINVAAKDWGLQCLRYEIRDIMPPHGVRAAMEMQAEAERKKRAQILESEGERQSHINIADGKKSSVILASEAAKMDQVNRAQGEAEAILARAQATAKGLVLLSQSLKETGGVEAASLRVAEQYITAFGNIAKEGTIMLLPSGASNPASMIAQALTMYKSLVINGPSKDHQETQALDETDLEELEDMGEKHISEGSNNRSGSISFDTEKPGHTGEPRFSLQNRNKDPQ

SEQ ID NO: 89035 - protein, 411 aa, Arabidopsis thaliana; identical to SEQ ID NO: 34823
  peptide (1)..(411): Ceres Seq. ID no. 12714792
  misc_feature: Pfam Name: Band_7 Pfam Description: SPFH domain / Band 7 family
  misc_feature (1)..(411): Homolog of NCBI NO: 18417021 NR Description: putative protein; protein id: At4g27585.1, by cDNA: 20829., supported by cDNA: gi_14334465, supported by
  misc_feature (1)..(393): Homolog of NCBI NO: 7487517 NR Description: hypothetical protein T29A15.70 - Arabidopsis >gi|4469009|emb|CAB38270.1| putative protein [Arabidopsis >gi|7269612|emb|CAB81408.1| putative protein [Arabidopsis
  misc_feature (1)..(350): Homolog of NCBI NO: 15239547 NR Description: putative protein; protein id: At5g54100.1, by cDNA: 205622. [Arabidopsis thaliana] contains similarity to stomatin like protein~gene_id:MJP23.8
  misc_feature (1)..(350): Homolog of NCBI NO: 21554125 NR Description: stomatin-like protein [Arabidopsis thaliana]
  misc_feature (19)..(372): Homolog of NCBI NO: 7716464 NR Description: stomatin-like protein [Zea mays]
  misc_feature (41)..(344): Homolog of NCBI NO: 23394406 NR Description: unknown [Phytophthora infestans]
  misc_feature (63)..(351): Homolog of NCBI NO: 15604196 NR Description: unknown [Rickettsia prowazekii]
  misc_feature (63)..(344): Homolog of NCBI NO: 15892375 NR Description: unknown [Rickettsia conorii]
  misc_feature (58)..(373): Homolog of NCBI NO: 32766629 NR Description: Unknown (protein for MGC:63505) [Danio rerio]
  misc_feature (58)..(376): Homolog of NCBI NO: 12963591 NR Description: stomatin-like protein 2 [Mus musculus]

SEQ ID NO: 89036 - protein, 253 aa, Arabidopsis thaliana; identical to SEQ ID NO: 34824
  peptide (1)..(253): Ceres Seq. ID no. 12714793
  misc_feature: Pfam Name: Band_7 Pfam Description: SPFH domain / Band 7 family
  misc_feature (1)..(253): Homolog of NCBI NO: 18417021 NR Description: putative protein; protein id: At4g27585.1, by cDNA: 20829., supported by cDNA: gi_14334465, supported by
  misc_feature (1)..(235): Homolog of NCBI NO: 7487517 NR Description: hypothetical protein T29A15.70 - Arabidopsis >gi|4469009|emb|CAB38270.1| putative protein [Arabidopsis >gi|7269612|emb|CAB81408.1| putative protein [Arabidopsis
  misc_feature (1)..(192): Homolog of NCBI NO: 15239547 NR Description: putative protein; protein id: At5g54100.1, by cDNA: 205622. [Arabidopsis thaliana] contains similarity to stomatin like protein~gene_id:MJP23.8
  misc_feature (1)..(192): Homolog of NCBI NO: 21554125 NR Description: stomatin-like protein [Arabidopsis thaliana]
  misc_feature (1)..(214): Homolog of NCBI NO: 7716464 NR Description: stomatin-like protein [Zea mays]
  misc_feature (1)..(186): Homolog of NCBI NO: 23394406 NR Description: unknown [Phytophthora infestans]
  misc_feature (1)..(193): Homolog of NCBI NO: 15604196 NR Description: unknown [Rickettsia prowazekii]
  misc_feature (1)..(186): Homolog of NCBI NO: 15892375 NR Description: unknown [Rickettsia conorii]
  misc_feature (1)..(215): Homolog of NCBI NO: 32766629 NR Description: Unknown (protein for MGC:63505) [Danio rerio]
  misc_feature (1)..(218): Homolog of NCBI NO: 12963591 NR Description: stomatin-like protein 2 [Mus musculus]

SEQ ID NO: 89037 - DNA, 1500 bp, Arabidopsis thaliana
  misc_feature (1)..(1500): Ceres Seq. ID no. 12714802
  misc_feature: MA Experiment ID: 108461 Result: Down-regulated in Transcription
  misc_feature: MA Experiment 108461 PARAMETER Experiment Name: At_Germinating_Seeds_cDNA_P Parameter: Age (day) Value: 1 vs. 0
  misc_feature: MA Experiment 108461 PARAMETER Experiment Name: At_Germinating_Seeds_cDNA_P Parameter: Tissue Value: Germinating Seeds
  misc_feature: MA Experiment ID: 108462 Result: Down-regulated in Transcription
  misc_feature: MA Experiment 108462 PARAMETER Experiment Name: At_Germinating_Seeds_cDNA_P Parameter: Age (day) Value: 2 vs. 0
  misc_feature: MA Experiment 108462 PARAMETER Experiment Name: At_Germinating_Seeds_cDNA_P Parameter: Tissue Value: Germinating Seeds
  misc_feature: MA Experiment ID: 108573 Result: Up-regulated in Transcription
  misc_feature: MA Experiment 108573 PARAMETER Experiment Name: At_Drought_cDNA_P Parameter: Timepoint (hr) Value: 6
  misc_feature: MA Experiment 108573 PARAMETER Experiment Name: At_Drought_cDNA_P Parameter: Tissue Value: Aerial
  misc_feature: MA Experiment 108573 PARAMETER Experiment Name: At_Drought_cDNA_P Parameter: Treatment Value: Drought vs. No Drought
  misc_feature: MA Experiment ID: 108576 Result: Up-regulated in Transcription
  misc_feature: MA Experiment 108576 PARAMETER Experiment Name: At_42deg_Heat_cDNA_P Parameter: Temperature (deg C) Value: 42 vs. 22
  misc_feature: MA Experiment 108576 PARAMETER Experiment Name: At_42deg_Heat_cDNA_P Parameter: Timepoint (hr) Value: 1
  misc_feature: MA Experiment 108576 PARAMETER Experiment Name: At_42deg_Heat_cDNA_P Parameter: Tissue Value: Aerial
  misc_feature: MA Experiment ID: 108577 Result: Up-regulated in Transcription
  misc_feature: MA Experiment 108577 PARAMETER Experiment Name: At_42deg_Heat_cDNA_P Parameter: Temperature (deg C) Value: 42 vs. 22
  misc_feature: MA Experiment 108577 PARAMETER Experiment Name: At_42deg_Heat_cDNA_P Parameter: Timepoint (hr) Value: 6
  misc_feature: MA Experiment 108577 PARAMETER Experiment Name: At_42deg_Heat_cDNA_P Parameter: Tissue Value: Aerial
  misc_feature: MA Experiment ID: 108585 Result: Up-regulated in Transcription
  misc_feature: MA Experiment 108585 PARAMETER Experiment Name: At_5mM_NaNP_cDNA_P Parameter: Timepoint (hr) Value: 6
  misc_feature: MA Experiment 108585 PARAMETER Experiment Name: At_5mM_NaNP_cDNA_P Parameter: Tissue Value: Aerial
  misc_feature: MA Experiment 108585 PARAMETER Experiment Name: At_5mM_NaNP_cDNA_P Parameter: Treatment Value: null
  misc_feature: MA Experiment ID: 108595 Result: Down-regulated in Transcription
  misc_feature: MA Experiment 108595 PARAMETER Experiment Name: At_Ler-pi_Ovule_cDNA_P Parameter: Plant Line Value: null
  misc_feature: MA Experiment ID: 108668 Result: Up-regulated in Transcription
  misc_feature: MA Experiment 108668 PARAMETER Experiment Name: At_2mM_SA_cDNA_P Parameter: Plant Line Value: WS
  misc_feature: MA Experiment 108668 PARAMETER Experiment Name: At_2mM_SA_cDNA_P Parameter: Timepoint (hr) Value: 6
  misc_feature: MA Experiment 108668 PARAMETER Experiment Name: At_2mM_SA_cDNA_P Parameter: Treatment Value: 2mM SA vs. No Treatment
  misc_feature: MA Experiment ID: 20000093 Result: Up-regulated in Transcription
  misc_feature: MA Experiment 20000093 PARAMETER Experiment Name: At_42deg_Heat_cDNA_P Parameter: Temperature (deg C) Value: 42 vs. 22
  misc_feature: MA Experiment 20000093 PARAMETER Experiment Name: At_42deg_Heat_cDNA_P Parameter: Timepoint (hr) Value: 0.5
  misc_feature: MA Experiment 20000093 PARAMETER Experiment Name: At_42deg_Heat_cDNA_P Parameter: Tissue Value: Aerial
  misc_feature: MA Experiment ID: 20000111 Result: Up-regulated in Transcription
  misc_feature: MA Experiment 20000111 PARAMETER Experiment Name: At_42deg_Heat_cDNA_P Parameter: Temperature (deg C) Value: 42 vs. 22
  misc_feature: MA Experiment 20000111 PARAMETER Experiment Name: At_42deg_Heat_cDNA_P Parameter: Timepoint (hr) Value: 6
  misc_feature: MA Experiment 20000111 PARAMETER Experiment Name: At_42deg_Heat_cDNA_P Parameter: Tissue Value: Aerial
  misc_feature: MA Experiment ID: 20000144 Result: Up-regulated in Transcription
  misc_feature: MA Experiment 20000144 PARAMETER Experiment Name: At_42deg_Heat_cDNA_P Parameter: Temperature (deg C) Value: 42 vs. 22
  misc_feature: MA Experiment 20000144 PARAMETER Experiment Name: At_42deg_Heat_cDNA_P Parameter: Timepoint (hr) Value: 1
  misc_feature: MA Experiment 20000144 PARAMETER Experiment Name: At_42deg_Heat_cDNA_P Parameter: Tissue Value: Aerial
gtcgtcgtccacaagaacaaccaaatttgtttccgtcttctgctaacatatcctctttttcatctgggaaccctaatttcttgactaacttagggttttatttatccatttgagatactctgtaattgaaaggttgaatttttagaagagacatgggaggttcgtcggagacaaagatcttacaagaactcatactttacgcggcgagcgctgctttcagctgcttggttctctttgcgggtcttcgtcatctcgatcctaatcgtgaggcttctaaaaaagctctcgagcataagaaggaaatctctaaacgtttgggtcgtcctcttgttcagaccaatccatacgaggatgtaattgcatgtgatgtgataaatccagaccacattgatgtggagtttggttctattggagggttggagaccatcaagcaggctttgtatgagcttgtgattttaccactgaaaagacctgagctttttgcttacgggaagcttcttggacctcaaaaaggtgtcttgctctatggacctcctggtactggaaagactatgcttgctaaggctattgccaaagagtcaggagctgttttcattaatgttagggtttcaaacctgatgagcaagtggtttggagatgctcagaagcttgtttctgctgtgtttagcttggcctacaaactccaacctgctatcatttttattgatgaggttgagagctttcttggtcagcgccgttcaacagatcatgaagctatggccaacatgaagactgagtttatggctttatgggatggattctctactgatccgcatgcaagggttatggttcttgctgcaactaacagaccgtcagagcttgatgaagcaatattaaggcgtcttcctcaggcctttgagattggaatacctgatcgccgggagagagctgagatattgaaagtgactctgaaaggagagagggtggaacctgatattgactttgatcacatagctcgcttatgcgaaggctataccggatcagacatttttgagctatgcaagaaagcagcttacttccctatcagagaaatcctagatgcagagagaaaggggaaaccatgtttggaccctaggccattatcacagttagatttggagaaggttcttgcaacgtcaaagaagacacaagttgcagcaggcgagtactcattgagctcgcagtcctcggcttggagaggctcaagggaaccagatgaggtccaggcagcgataagtgggatctcgaagcttctagtttctcagatcattaacctacagtcagaatctcaggattcatggcagcgggatcccgaagaagattcccgatgaaattccggatcacttttataaacgttctggtgttttcattggaagtttagaatttgtcacacacttcagtttattctgtaaaacttttcttttctttttggtaggatcatttgataacttatgactgtactaaaaagtctctcaagtttct

SEQ ID NO: 89038 - protein, 398 aa, Arabidopsis thaliana; identical to SEQ ID NO: 42203
  peptide (1)..(398): Ceres Seq. ID no. 12714803
  misc_feature (121)..(305): Pfam Name: ATPase family associated with various cellular Pfam Description: ATPase family associated with various cellular
  misc_feature (1)..(398): Homolog of NCBI NO: 15234242 NR Description: putative protein; protein id: At4g27680.1, by cDNA: 142160., supported by cDNA: gi_20260327 [Arabidopsis
  misc_feature (3)..(397): Homolog of NCBI NO: 15238774 NR Description: 26S proteasome regulatory particle chain protein; protein id: At5g53540.1, supported by cDNA: 38213., by cDNA: gi_16604477 [Arabidopsis thaliana]
  misc_feature (49)..(352): Homolog of NCBI NO: 7487016 NR Description: hypothetical protein T14P8.7 - Arabidopsis >gi|3193292|gb|AAC19276.1| similar to ATPases associated with
  misc_feature (49)..(352): Homolog of NCBI NO: 20259341 NR Description: unknown protein [Arabidopsis thaliana]
  misc_feature (49)..(352): Homolog of NCBI NO: 30679158 NR Description: expressed protein [Arabidopsis thaliana]
  misc_feature (45)..(313): Homolog of NCBI NO: 30678418 NR Description: expressed protein [Arabidopsis thaliana]
  misc_feature (48)..(313): Homolog of NCBI NO: 33146850 NR Description: putative MSP1(mitochondrial sorting of proteins)
  misc_feature (55)..(313): Homolog of NCBI NO: 25518408 NR Description: hypothetical protein F22D16.11 - Arabidopsis >gi|6056413|gb|AAF02877.1|AC009525_11 Unknown protein
  misc_feature (57)..(313): Homolog of NCBI NO: 15234019 NR Description: putative protein; protein id: At4g24850.1
  misc_feature (34)..(342): Homolog of NCBI NO: 39794661 NR Description: Unknown (protein for IMAGE:4386512) [Homo sapiens]

SEQ ID NO: 89039 - protein, 265 aa, Arabidopsis thaliana; identical to SEQ ID NO: 42204
  peptide (1)..(265): Ceres Seq. ID no. 12714804
  misc_feature (1)..(172): Pfam Name: ATPase family associated with various cellular Pfam Description: ATPase family associated with various cellular
  misc_feature (1)..(265): Homolog of NCBI NO: 15234242 NR Description: putative protein; protein id: At4g27680.1, by cDNA: 142160., supported by cDNA: gi_20260327 [Arabidopsis
  misc_feature (1)..(264): Homolog of NCBI NO: 15238774 NR Description: 26S proteasome regulatory particle chain protein; protein id: At5g53540.1, supported by cDNA: 38213., by cDNA: gi_16604477 [Arabidopsis thaliana]
  misc_feature (1)..(219): Homolog of NCBI NO: 7487016 NR Description: hypothetical protein T14P8.7 - Arabidopsis >gi|3193292|gb|AAC19276.1| similar to ATPases associated with
  misc_feature (1)..(219): Homolog of NCBI NO: 20259341 NR Description: unknown protein [Arabidopsis thaliana]
  misc_feature (1)..(219): Homolog of NCBI NO: 30679158 NR Description: expressed protein [Arabidopsis thaliana]
  misc_feature (1)..(180): Homolog of NCBI NO: 30678418 NR Description: expressed protein [Arabidopsis thaliana]
  misc_feature (1)..(180): Homolog of NCBI NO: 33146850 NR Description: putative MSP1(mitochondrial sorting of proteins)
  misc_feature (1)..(180): Homolog of NCBI NO: 25518408 NR Description: hypothetical protein F22D16.11 - Arabidopsis >gi|6056413|gb|AAF02877.1|AC009525_11 Unknown protein
  misc_feature (1)..(180): Homolog of NCBI NO: 15234019 NR Description: putative protein; protein id: At4g24850.1
  misc_feature (1)..(209): Homolog of NCBI NO: 39794661 NR Description: Unknown (protein for IMAGE:4386512) [Homo sapiens]

SEQ ID NO: 89040 - protein, 243 aa, Arabidopsis thaliana; identical to SEQ ID NO: 42205
  peptide (1)..(243): Ceres Seq. ID no. 12714805
  misc_feature (1)..(150): Pfam Name: ATPase family associated with various cellular Pfam Description: ATPase family associated with various cellular
  misc_feature (1)..(243): Homolog of NCBI NO: 15234242 NR Description: putative protein; protein id: At4g27680.1, by cDNA: 142160., supported by cDNA: gi_20260327 [Arabidopsis
  misc_feature (1)..(242): Homolog of NCBI NO: 15238774 NR Description: 26S proteasome regulatory particle chain protein; protein id: At5g53540.1, supported by cDNA: 38213., by cDNA: gi_16604477 [Arabidopsis thaliana]
  misc_feature (1)..(197): Homolog of NCBI NO: 7487016 NR Description: hypothetical protein T14P8.7 - Arabidopsis >gi|3193292|gb|AAC19276.1| similar to ATPases associated with
  misc_feature (1)..(197): Homolog of NCBI NO: 20259341 NR Description: unknown protein [Arabidopsis thaliana]
  misc_feature (1)..(197): Homolog of NCBI NO: 30679158 NR Description: expressed protein [Arabidopsis thaliana]
  misc_feature (1)..(158): Homolog of NCBI NO: 30678418 NR Description: expressed protein [Arabidopsis thaliana]
  misc_feature (1)..(158): Homolog of NCBI NO: 33146850 NR Description: putative MSP1(mitochondrial sorting of proteins)
  misc_feature (1)..(158): Homolog of NCBI NO: 25518408 NR Description: hypothetical protein F22D16.11 - Arabidopsis >gi|6056413|gb|AAF02877.1|AC009525_11 Unknown protein
  misc_feature (1)..(158): Homolog of NCBI NO: 15234019 NR Description: putative protein; protein id: At4g24850.1
  misc_feature (1)..(187): Homolog of NCBI NO: 39794661 NR Description: Unknown (protein for IMAGE:4386512) [Homo sapiens]

SEQ ID NO: 89041 - DNA, 1616 bp, Arabidopsis thaliana
  misc_feature (1)..(1616): Ceres Seq. ID no. 12714839
  misc_feature: MA Experiment ID: 20000227 Result: Up-regulated in Transcription
  misc_feature: MA Experiment 20000227 PARAMETER Experiment Name: At_Root-Tips-vs-Tops_P Parameter: Tissue Value: Root Tips vs. Root Tops
  misc_feature: MA Experiment ID: 20000234 Result: Up-regulated in Transcription
  misc_feature: MA Experiment 20000234 PARAMETER Experiment Name: At_Siliques_P Parameter: Age (day) Value: 21
  misc_feature: MA Experiment 20000234 PARAMETER Experiment Name: At_Siliques_P Parameter: Organism Value: A. thaliana
  misc_feature: MA Experiment 20000234 PARAMETER Experiment Name: At_Siliques_P Parameter: Plant Line Value: WS
  misc_feature: MA Experiment 20000234 PARAMETER Experiment Name: At_Siliques_P Parameter: Tissue Value: Less Than 5mm Siliques vs. Whole Plant
  misc_feature: MA Experiment ID: 20000235 Result: Up-regulated in Transcription
  misc_feature: MA Experiment 20000235 PARAMETER Experiment Name: At_Siliques_P Parameter: Age (day) Value: 21
  misc_feature: MA Experiment 20000235 PARAMETER Experiment Name: At_Siliques_P Parameter: Organism Value: A. thaliana
  misc_feature: MA Experiment 20000235 PARAMETER Experiment Name: At_Siliques_P Parameter: Plant Line Value: WS
  misc_feature: MA Experiment 20000235 PARAMETER Experiment Name: At_Siliques_P Parameter: Tissue Value: 5-10mm Siliques vs. Whole Plant
  misc_feature: MA Experiment ID: 20000264 Result: Up-regulated in Transcription
  misc_feature: MA Experiment 20000264 PARAMETER Experiment Name: At_Open_Flower_P Parameter: Age (day) Value: 21
  misc_feature: MA Experiment 20000264 PARAMETER Experiment Name: At_Open_Flower_P Parameter: Plant Line Value: WS
  misc_feature: MA Experiment 20000264 PARAMETER Experiment Name: At_Open_Flower_P Parameter: Tissue Value: Open Flower vs. Whole Plant
  misc_feature: MA Experiment ID: 20000265 Result: Up-regulated in Transcription
  misc_feature: MA Experiment 20000265 PARAMETER Experiment Name: At_Open_Flower_P Parameter: Age (day) Value: 21
  misc_feature: MA Experiment 20000265 PARAMETER Experiment Name: At_Open_Flower_P Parameter: Plant Line Value: WS
  misc_feature: MA Experiment 20000265 PARAMETER Experiment Name: At_Open_Flower_P Parameter: Tissue Value: Closed Flower vs. Whole Plant
  misc_feature: MA Experiment ID: 20000286 Result: Up-regulated in Transcription
  misc_feature: MA Experiment 20000286 PARAMETER Experiment Name: At_Open_Flower_P Parameter: Age (day) Value: 21
  misc_feature: MA Experiment 20000286 PARAMETER Experiment Name: At_Open_Flower_P Parameter: Plant Line Value: WS
  misc_feature: MA Experiment 20000286 PARAMETER Experiment Name: At_Open_Flower_P Parameter: Tissue Value: Half Open vs. Whole Plant
  misc_feature: MA Experiment ID: 20000438 Result: Up-regulated in Transcription
  misc_feature: MA Experiment 20000438 PARAMETER Experiment Name: At_Shoots__P Parameter: Age (day) Value: 14
  misc_feature: MA Experiment 20000438 PARAMETER Experiment Name: At_Shoots__P Parameter: Tissue Value: Shoots vs. Whole Plant
  misc_feature: Pfam Name: Pkinase Pfam Description: Protein kinase domain
agtctacctgtaacgacgtcgtatcaccgatcatccgccggattcttatttggcggtgtaatcgttggagctcttctactaattctgttaggtcttctctttgtcttctacagagctaccagaaatagaaataacaacagcagctctgctcatcatcaatccaaaactccctcaaaagttcaacatcatcggggcggtaatgctggtacgaaccaggcacatgttatcacaatgccaccaccaatccatgctaaatatatatctagtggaggttgtgatacgaaggagaacaattctgttgcgaaaaacatttcaatgccatctggaatgttctcctacgaagaactttcaaaagcaactggtggattttcagaggagaaccttttgggagaaggcggtttcggatatgttcacaaaggagtgttgaaaaacgggacagaagttgcggtgaagcagctgaagattgggagctatcaaggggaaagagaattccaagctgaggttgacacaatcagtagggttcatcataagcacctcgtttcattggttggttattgcgttaatggagataaaagactcttggtttacgagtttgttcctaaagataccttggagttccacttgcatgagaacagaggaagcgtgttggaatgggaaatgaggctcaggattgctgtaggagcagcaaaaggattagcttatcttcatgaggattgcagtccaactataattcaccgtgatatcaaagcagctaatatccttctagattccaaatttgaggcaaaggtctctgactttggactagccaagtttttctcagacaccaattcatcattcactcatatctctactcgagtggtaggaactttcggatacatggctccagaatacgcgtccagtggtaaagtaactgataaatcagatgtatattcctttggggtcgtgcttctagaactcatcactggacgtccatcaattttcgccaaagattcttccacaaaccagagtttagtagactgggcgaggccattgcttacgaaagcaatctctggagaaagttttgactttcttgtagactcaaggttggagaagaattacgatacaactcagatggcaaacatggctgcttgtgctgctgcttgcatacgccaatcagcttggcttcggcctagaatgagccaggtagtacgtgctcttgaaggcgaggtggccctgagaaaggtcgaagagactgggaatagcgtgacctatagctcttctgaaaacccgaatgacatcacaccacggtatggaacaaataagaggagattcgacacaggttcaagcgatggttacacttcagaatatggagttaacccttctcagtcgagcagtgaacatcaacaggtgaatacttagttcacaggttcaatagggcaagtttcaccacaattattgggttttcggatacagtcatcttgggttaacataaaatgttgtaagaaattagactacttcattcatttgtagttaaggggtccgaagaacactgcttgtgttttgttaaatgtataaattggttgtaatattggggcacaagtttaattatgttgcaaatactttgtttgcttctgatc

SEQ ID NO: 89042 - protein, 465 aa, Arabidopsis thaliana
  peptide (1)..(465): Ceres Seq. ID no. 12714840
  misc_feature: Pfam Name: Pkinase Pfam Description: Protein kinase domain
  misc_feature (1)..(465): Homolog of NCBI NO: 22329101 NR Description: putative protein kinase; protein id: At4g32710.1
  misc_feature (79)..(461): Homolog of NCBI NO: 13877617 NR Description: protein kinase-like protein [Arabidopsis thaliana]
  misc_feature (79)..(461): Homolog of NCBI NO: 15230130 NR Description: protein kinase, putative; protein id: supported by cDNA: 17909., supported by cDNA: gi_13877616,
  misc_feature (79)..(461): Homolog of NCBI NO: 13447449 NR Description: receptor protein kinase PERK1 [Brassica napus]
  misc_feature (111)..(462): Homolog of NCBI NO: 29367569 NR Description: putative receptor protein kinase [Oryza sativa
  misc_feature (1)..(465): Homolog of NCBI NO: 15230108 NR Description: protein kinase, putative; protein id: At3g24400.1
  misc_feature (7)..(465): Homolog of NCBI NO: 30690042 NR Description: serine threonine protein kinase -related thaliana] >gi|26452004|dbj|BAC43092.1| putative serine/threonine kinase [Arabidopsis thaliana] >gi|29029022|gb|AAO64890.1|
  misc_feature (89)..(437): Homolog of NCBI NO: 34904234 NR Description: putative receptor protein kinase PERK1 [Oryza
  misc_feature (100)..(465): Homolog of NCBI NO: 11994703 NR Description: somatic embryogenesis receptor kinase-like
  misc_feature (99)..(463): Homolog of NCBI NO: 15222081 NR Description: hypothetical protein; protein id: At1g49270.1
SLPVTTSYHRSSAGFLFGGVIVGALLLILLGLLFVFYRATRNRNNNSSSAHHQSKTPSKVQHHRGGNAGTNQAHVITMPPPIHAKYISSGGCDTKENNSVAKNISMPSGMFSYEELSKATGGFSEENLLGEGGFGYVHKGVLKNGTEVAVKQLKIGSYQGEREFQAEVDTISRVHHKHLVSLVGYCVNGDKRLLVYEFVPKDTLEFHLHENRGSVLEWEMRLRIAVGAAKGLAYLHEDCSPTIIHRDIKAANILLDSKFEAKVSDFGLAKFFSDTNSSFTHISTRVVGTFGYMAPEYASSGKVTDKSDVYSFGVVLLELITGRPSIFAKDSSTNQSLVDWARPLLTKAISGESFDFLVDSRLEKNYDTTQMANMAACAAACIRQSAWLRPRMSQVVRALEGEVALRKVEETGNSVTYSSSENPNDITPRYGTNKRRFDTGSSDGYTSEYGVNPSQSSSEHQQVNT

SEQ ID NO: 89043 - protein, 388 aa, Arabidopsis thaliana; identical to SEQ ID NO: 80299
  peptide (1)..(388): Ceres Seq. ID no. 12714841
  misc_feature: Pfam Name: Pkinase Pfam Description: Protein kinase domain
  misc_feature (1)..(388): Homolog of NCBI NO: 22329101 NR Description: putative protein kinase; protein id: At4g32710.1
  misc_feature (2)..(384): Homolog of NCBI NO: 13877617 NR Description: protein kinase-like protein [Arabidopsis thaliana]
  misc_feature (2)..(384): Homolog of NCBI NO: 15230130 NR Description: protein kinase, putative; protein id: supported by cDNA: 17909., supported by cDNA: gi_13877616,
  misc_feature (2)..(384): Homolog of NCBI NO: 13447449 NR Description: receptor protein kinase PERK1 [Brassica napus]
  misc_feature (34)..(385): Homolog of NCBI NO: 29367569 NR Description: putative receptor protein kinase [Oryza sativa
  misc_feature (1)..(388): Homolog of NCBI NO: 15230108 NR Description: protein kinase, putative; protein id: At3g24400.1
  misc_feature (1)..(388): Homolog of NCBI NO: 30690042 NR Description: serine threonine protein kinase -related thaliana] >gi|26452004|dbj|BAC43092.1| putative serine/threonine kinase [Arabidopsis thaliana] >gi|29029022|gb|AAO64890.1|
  misc_feature (12)..(360): Homolog of NCBI NO: 34904234 NR Description: putative receptor protein kinase PERK1 [Oryza
  misc_feature (23)..(388): Homolog of NCBI NO: 11994703 NR Description: somatic embryogenesis receptor kinase-like
  misc_feature (22)..(386): Homolog of NCBI NO: 15222081 NR Description: hypothetical protein; protein id: At1g49270.1

SEQ ID NO: 89044 - protein, 360 aa, Arabidopsis thaliana
  peptide (1)..(360): Ceres Seq. ID no. 12714842
  misc_feature: Pfam Name: Pkinase Pfam Description: Protein kinase domain
  misc_feature (1)..(360): Homolog of NCBI NO: 22329101 NR Description: putative protein kinase; protein id: At4g32710.1
  misc_feature (1)..(356): Homolog of NCBI NO: 13877617 NR Description: protein kinase-like protein [Arabidopsis thaliana]
  misc_feature (1)..(356): Homolog of NCBI NO: 15230130 NR Description: protein kinase, putative; protein id: supported by cDNA: 17909., supported by cDNA: gi_13877616,
  misc_feature (1)..(356): Homolog of NCBI NO: 13447449 NR Description: receptor protein kinase PERK1 [Brassica napus]
  misc_feature (6)..(357): Homolog of NCBI NO: 29367569 NR Description: putative receptor protein kinase [Oryza sativa
  misc_feature (1)..(360): Homolog of NCBI NO: 15230108 NR Description: protein kinase, putative; protein id: At3g24400.1
  misc_feature (1)..(360): Homolog of NCBI NO: 30690042 NR Description: serine threonine protein kinase -related thaliana] >gi|26452004|dbj|BAC43092.1| putative serine/threonine kinase [Arabidopsis thaliana] >gi|29029022|gb|AAO64890.1|
  misc_feature (1)..(332): Homolog of NCBI NO: 34904234 NR Description: putative receptor protein kinase PERK1 [Oryza
  misc_feature (1)..(360): Homolog of NCBI NO: 11994703 NR Description: somatic embryogenesis receptor kinase-like
  misc_feature (1)..(358): Homolog of NCBI NO: 15222081 NR Description: hypothetical protein; protein id: At1g49270.1
MPSGMFSYEELSKATGGFSEENLLGEGGFGYVHKGVLKNGTEVAVKQLKIGSYQGEREFQAEVDTISRVHHKHLVSLVGYCVNGDKRLLVYEFVPKDTLEFHLHENRGSVLEWEMRLRIAVGAAKGLAYLHEDCSPTIIHRDIKAANILLDSKFEAKVSDFGLAKFFSDTNSSFTHISTRVVGTFGYMAPEYASSGKVTDKSDVYSFGVVLLELITGRPSIFAKDSSTNQSLVDWARPLLTKAISGESFDFLVDSRLEKNYDTTQMANMAACAAACIRQSAWLRPRMSQVVRALEGEVALRKVEETGNSVTYSSSENPNDITPRYGTNKRRFDTGSSDGYTSEYGVNPSQSSSEHQQVNT

SEQ ID NO: 89045 - DNA, 1029 bp, Arabidopsis thaliana
  misc_feature (1)..(1029): Ceres Seq. ID no. 12714859
  misc_feature: MA Experiment ID: 20001451 Result: Up-regulated in Transcription
  misc_feature: MA Experiment 20001451 PARAMETER Experiment Name: At_Far-red-induction_P Parameter: Age (day) Value: 7
  misc_feature: MA Experiment 20001451 PARAMETER Experiment Name: At_Far-red-induction_P Parameter: Light Value: Far-red vs. White
  misc_feature: MA Experiment 20001451 PARAMETER Experiment Name: At_Far-red-induction_P Parameter: Organism Value: A. thaliana
  misc_feature: MA Experiment 20001451 PARAMETER Experiment Name: At_Far-red-induction_P Parameter: Plant Line Value: Columbia
  misc_feature: MA Experiment 20001451 PARAMETER Experiment Name: At_Far-red-induction_P Parameter: Timepoint (hr) Value: 24
  misc_feature: MA Experiment 20001451 PARAMETER Experiment Name: At_Far-red-induction_P Parameter: Tissue Value: Whole Plant
atgaaagtgatggataagaatttagggttagaggaggttcagaaacttgaaggtcacactgatcgtgtttggaacgtcgcctggaatcccgccgctgacggtgttattgcttcctgcagtgccgataagaccgtacgaatctgggagcagagttctcttactcgttcctggacctgcaaggctgttttggaaggcgcgcacacaagaagtgtgaagtcgttacttggtcaccgtctgggaagtttcgatggcaatacttgcgtttgggaaaattttgctactgactccgagtctgtctctgttttacggggacatgaaagcgaagtcaaaagtgtatcatggaatgcatctggttcgttgcttgcaacttgtggtagagacaagtctgtctggatttgggaaatacaaccagaggaggacgatgaatttgatactattgcagtgttaactggtcattcagaagatgttaagatggtcttgtggcatcccaccatggatgttttgttctcttgcagttatgataacactatcaagatttggtgctctgaggatgaagatggtgattataattgtgtacaaaccttaagtgaacttaacaatggtcattcttctaccgtctggagtatctcttttaatgctgcaggggacaagatggtcacttgtagtgatgatctagcagtgaaaatatggaagacagatatttcaaggatgcaatctggtgaaggatatgtaccctggactcatgtttgtacactctctggttttcacgatcgtaccatatattcagttcattggtcaagggacggtgttattgctagtggagcaggcgatgatactatacagttatttgtggacagcgacagtgactctgttgatggaccttcatacaaacttttggttaagaaggagaaagcacatgaaatggatgtaaattcggtccaatgggcacctgataaggaaagccggttgcttgcctcggccagcgacgataaaatggttaaaatttggaaacttgcctcggagccatga

SEQ ID NO: 89046 - protein, 342 aa, Arabidopsis thaliana
  peptide (1)..(342): Ceres Seq. ID no. 12714860
  misc_feature (1)..(321): Homolog of NCBI NO: 22329107 NR Description: G-protein beta family; protein id: At4g32990.1
  misc_feature (1)..(342): Homolog of NCBI NO: 18401018 NR Description: G-protein beta family; protein id: At2g26060.1, by cDNA: 142426., supported by cDNA: gi_20260509 [Arabidopsis >gi|20197268|gb|AAC31230.2| expressed protein [Arabidopsis
  misc_feature (4)..(269): Homolog of NCBI NO: 7446121 NR Description: hypothetical protein At2g26060 [imported] -
  misc_feature (268)..(342): Homolog of NCBI NO: 7446121 NR Description: hypothetical protein At2g26060 [imported] -
  misc_feature (10)..(338): Homolog of NCBI NO: 34394959 NR Description: putative WD40 protein Ciao1 [Oryza sativa
  misc_feature (16)..(338): Homolog of NCBI NO: 19922278 NR Description: CG12797-PA [Drosophila melanogaster]
  misc_feature (15)..(337): Homolog of NCBI NO: 4757988 NR Description: WD40 protein Ciao1 [Homo sapiens]
  misc_feature (10)..(340): Homolog of NCBI NO: 28279952 NR Description: Similar to WD40 protein Ciao1 [Danio rerio]
  misc_feature (20)..(338): Homolog of NCBI NO: 32698449 NR Description: Hypothetical protein Y18D10A.9 [Caenorhabditis
  misc_feature (10)..(336): Homolog of NCBI NO: 19113764 NR Description: WD domian, G-beta repeat protein
MKVMDKNLGLEEVQKLEGHTDRVWNVAWNPAADGVIASCSADKTVRIWEQSSLTRSWTCKAVLEGAHTRSVKSLLGHRLGSFDGNTCVWENFATDSESVSVLRGHESEVKSVSWNASGSLLATCGRDKSVWIWEIQPEEDDEFDTIAVLTGHSEDVKMVLWHPTMDVLFSCSYDNTIKIWCSEDEDGDYNCVQTLSELNNGHSSTVWSISFNAAGDKMVTCSDDLAVKIWKTDISRMQSGEGYVPWTHVCTLSGFHDRTIYSVHWSRDGVIASGAGDDTIQLFVDSDSDSVDGPSYKLLVKKEKAHEMDVNSVQWAPDKESRLLASASDDKMVKIWKLASEP

SEQ ID NO: 89047 - protein, 339 aa, Arabidopsis thaliana
  peptide (1)..(339): Ceres Seq. ID no. 12714861
  misc_feature (1)..(318): Homolog of NCBI NO: 22329107 NR Description: G-protein beta family; protein id: At4g32990.1
  misc_feature (1)..(339): Homolog of NCBI NO: 18401018 NR Description: G-protein beta family; protein id: At2g26060.1, by cDNA: 142426., supported by cDNA: gi_20260509 [Arabidopsis >gi|20197268|gb|AAC31230.2| expressed protein [Arabidopsis
  misc_feature (1)..(266): Homolog of NCBI NO: 7446121 NR Description: hypothetical protein At2g26060 [imported] -
  misc_feature (265)..(339): Homolog of NCBI NO: 7446121 NR Description: hypothetical protein At2g26060 [imported] -
  misc_feature (7)..(335): Homolog of NCBI NO: 34394959 NR Description: putative WD40 protein Ciao1 [Oryza sativa
  misc_feature (13)..(335): Homolog of NCBI NO: 19922278 NR Description: CG12797-PA [Drosophila melanogaster]
  misc_feature (12)..(334): Homolog of NCBI NO: 4757988 NR Description: WD40 protein Ciao1 [Homo sapiens]
  misc_feature (7)..(337): Homolog of NCBI NO: 28279952 NR Description: Similar to WD40 protein Ciao1 [Danio rerio]
  misc_feature (17)..(335): Homolog of NCBI NO: 32698449 NR Description: Hypothetical protein Y18D10A.9 [Caenorhabditis
  misc_feature (7)..(333): Homolog of NCBI NO: 19113764 NR Description: WD domian, G-beta repeat protein
MDKNLGLEEVQKLEGHTDRVWNVAWNPAADGVIASCSADKTVRIWEQSSLTRSWTCKAVLEGAHTRSVKSLLGHRLGSFDGNTCVWENFATDSESVSVLRGHESEVKSVSWNASGSLLATCGRDKSVWIWEIQPEEDDEFDTIAVLTGHSEDVKMVLWHPTMDVLFSCSYDNTIKIWCSEDEDGDYNCVQTLSELNNGHSSTVWSISFNAAGDKMVTCSDDLAVKIWKTDISRMQSGEGYVPWTHVCTLSGFHDRTIYSVHWSRDGVIASGAGDDTIQLFVDSDSDSVDGPSYKLLVKKEKAHEMDVNSVQWAPDKESRLLASASDDKMVKIWKLASEP

SEQ ID NO: 89048 - protein, 185 aa, Arabidopsis thaliana
  peptide (1)..(185): Ceres Seq. ID no. 12714862
  misc_feature (1)..(164): Homolog of NCBI NO: 22329107 NR Description: G-protein beta family; protein id: At4g32990.1
  misc_feature (1)..(185): Homolog of NCBI NO: 18401018 NR Description: G-protein beta family; protein id: At2g26060.1, by cDNA: 142426., supported by cDNA: gi_20260509 [Arabidopsis >gi|20197268|gb|AAC31230.2| expressed protein [Arabidopsis
  misc_feature (1)..(112): Homolog of NCBI NO: 7446121 NR Description: hypothetical protein At2g26060 [imported] -
  misc_feature (111)..(185): Homolog of NCBI NO: 7446121 NR Description: hypothetical protein At2g26060 [imported] -
  misc_feature (1)..(181): Homolog of NCBI NO: 34394959 NR Description: putative WD40 protein Ciao1 [Oryza sativa
  misc_feature (1)..(181): Homolog of NCBI NO: 19922278 NR Description: CG12797-PA [Drosophila melanogaster]
  misc_feature (1)..(180): Homolog of NCBI NO: 4757988 NR Description: WD40 protein Ciao1 [Homo sapiens]
  misc_feature (1)..(183): Homolog of NCBI NO: 28279952 NR Description: Similar to WD40 protein Ciao1 [Danio rerio]
  misc_feature (1)..(181): Homolog of NCBI NO: 32698449 NR Description: Hypothetical protein Y18D10A.9 [Caenorhabditis
  misc_feature (1)..(179): Homolog of NCBI NO: 19113764 NR Description: WD domian, G-beta repeat protein
MVLWHPTMDVLFSCSYDNTIKIWCSEDEDGDYNCVQTLSELNNGHSSTVWSISFNAAGDKMVTCSDDLAVKIWKTDISRMQSGEGYVPWTHVCTLSGFHDRTIYSVHWSRDGVIASGAGDDTIQLFVDSDSDSVDGPSYKLLVKKEKAHEMDVNSVQWAPDKESRLLASASDDKMVKIWKLASEP

SEQ ID NO: 89049 - DNA, 1536 bp, Arabidopsis thaliana
  misc_feature (1)..(1536): Ceres Seq. ID no. 12714870
  misc_feature: MA Experiment ID: 108569 Result: Up-regulated in Transcription
  misc_feature: MA Experiment 108569 PARAMETER Experiment Name: At_0.001%_MeJA__cDNA_P Parameter: Timepoint (hr) Value: 6
  misc_feature: MA Experiment 108569 PARAMETER Experiment Name: At_0.001%_MeJA__cDNA_P Parameter: Tissue Value: Aerial
  misc_feature: MA Experiment 108569 PARAMETER Experiment Name: At_0.001%_MeJA__cDNA_P Parameter: Treatment Value: 0.001% MeJA vs. No Treatment
  misc_feature: MA Experiment ID: 108573 Result: Up-regulated in Transcription
  misc_feature: MA Experiment 108573 PARAMETER Experiment Name: At_Drought_cDNA_P Parameter: Timepoint (hr) Value: 6
  misc_feature: MA Experiment 108573 PARAMETER Experiment Name: At_Drought_cDNA_P Parameter: Tissue Value: Aerial
  misc_feature: MA Experiment 108573 PARAMETER Experiment Name: At_Drought_cDNA_P Parameter: Treatment Value: Drought vs. No Drought
  misc_feature: MA Experiment ID: 108576 Result: Down-regulated in Transcription
  misc_feature: MA Experiment 108576 PARAMETER Experiment Name: At_42deg_Heat_cDNA_P Parameter: Temperature (deg C) Value: 42 vs. 22
  misc_feature: MA Experiment 108576 PARAMETER Experiment Name: At_42deg_Heat_cDNA_P Parameter: Timepoint (hr) Value: 1
  misc_feature: MA Experiment 108576 PARAMETER Experiment Name: At_42deg_Heat_cDNA_P Parameter: Tissue Value: Aerial
  misc_feature: MA Experiment ID: 108577 Result: Down-regulated in Transcription
  misc_feature: MA Experiment 108577 PARAMETER Experiment Name: At_42deg_Heat_cDNA_P Parameter: Temperature (deg C) Value: 42 vs. 22
  misc_feature: MA Experiment 108577 PARAMETER Experiment Name: At_42deg_Heat_cDNA_P Parameter: Timepoint (hr) Value: 6
  misc_feature: MA Experiment 108577 PARAMETER Experiment Name: At_42deg_Heat_cDNA_P Parameter: Tissue Value: Aerial
  misc_feature: MA Experiment ID: 108595 Result: Down-regulated in Transcription
  misc_feature: MA Experiment 108595 PARAMETER Experiment Name: At_Ler-pi_Ovule_cDNA_P Parameter: Plant Line Value: null
  misc_feature: MA Experiment ID: 20000087 Result: Down-regulated in Transcription
  misc_feature: MA Experiment 20000087 PARAMETER Experiment Name: At_100uM_ABA_Mutants_cDNA_P Parameter: Plant Line Value: WS
  misc_feature: MA Experiment 20000087 PARAMETER Experiment Name: At_100uM_ABA_Mutants_cDNA_P Parameter: Timepoint (hr) Value: 6
  misc_feature: MA Experiment 20000087 PARAMETER Experiment Name: At_100uM_ABA_Mutants_cDNA_P Parameter: Tissue Value: Aerial
  misc_feature: MA Experiment 20000087 PARAMETER Experiment Name: At_100uM_ABA_Mutants_cDNA_P Parameter: Treatment Value: 100uM ABA vs. No Treatment
  misc_feature: MA Experiment ID: 20000093 Result: Down-regulated in Transcription
  misc_feature: MA Experiment 20000093 PARAMETER Experiment Name: At_42deg_Heat_cDNA_P Parameter: Temperature (deg C) Value: 42 vs. 22
  misc_feature: MA Experiment 20000093 PARAMETER Experiment Name: At_42deg_Heat_cDNA_P Parameter: Timepoint (hr) Value: 0.5
  misc_feature: MA Experiment 20000093 PARAMETER Experiment Name: At_42deg_Heat_cDNA_P Parameter: Tissue Value: Aerial
  misc_feature: MA Experiment ID: 20000111 Result: Down-regulated in Transcription
  misc_feature: MA Experiment 20000111 PARAMETER Experiment Name: At_42deg_Heat_cDNA_P Parameter: Temperature (deg C) Value: 42 vs. 22
  misc_feature: MA Experiment 20000111 PARAMETER Experiment Name: At_42deg_Heat_cDNA_P Parameter: Timepoint (hr) Value: 6
  misc_feature: MA Experiment 20000111 PARAMETER Experiment Name: At_42deg_Heat_cDNA_P Parameter: Tissue Value: Aerial
  misc_feature: MA Experiment ID: 20000112 Result: Down-regulated in Transcription
  misc_feature: MA Experiment 20000112 PARAMETER Experiment Name: At_42deg_Heat_cDNA_P Parameter: Temperature (deg C) Value: 42 vs. 22
  misc_feature: MA Experiment 20000112 PARAMETER Experiment Name: At_42deg_Heat_cDNA_P Parameter: Timepoint (hr) Value: 2
  misc_feature: MA Experiment 20000112 PARAMETER Experiment Name: At_42deg_Heat_cDNA_P Parameter: Tissue Value: Aerial
  misc_feature: MA Experiment ID: 20000113 Result: Down-regulated in Transcription
  misc_feature: MA Experiment 20000113 PARAMETER Experiment Name: At_42deg_Heat_cDNA_P Parameter: Temperature (deg C) Value: 42 vs. 22
  misc_feature: MA Experiment 20000113 PARAMETER Experiment Name: At_42deg_Heat_cDNA_P Parameter: Timepoint (hr) Value: 8
  misc_feature: MA Experiment 20000113 PARAMETER Experiment Name: At_42deg_Heat_cDNA_P Parameter: Tissue Value: Aerial
  misc_feature: MA Experiment ID: 20000117 Result: Down-regulated in Transcription
  misc_feature: MA Experiment 20000117 PARAMETER Experiment Name: At_100uM_ABA_Mutants_cDNA_P Parameter: Plant Line Value: Columbia
  misc_feature: MA Experiment 20000117 PARAMETER Experiment Name: At_100uM_ABA_Mutants_cDNA_P Parameter: Timepoint (hr) Value: 6
  misc_feature: MA Experiment 20000117 PARAMETER Experiment Name: At_100uM_ABA_Mutants_cDNA_P Parameter: Tissue Value: Aerial
  misc_feature: MA Experiment 20000117 PARAMETER Experiment Name: At_100uM_ABA_Mutants_cDNA_P Parameter: Treatment Value: 100uM ABA vs. No Treatment
  misc_feature: MA Experiment ID: 20000144 Result: Down-regulated in Transcription
  misc_feature: MA Experiment 20000144 PARAMETER Experiment Name: At_42deg_Heat_cDNA_P Parameter: Temperature (deg C) Value: 42 vs. 22
  misc_feature: MA Experiment 20000144 PARAMETER Experiment Name: At_42deg_Heat_cDNA_P Parameter: Timepoint (hr) Value: 1
  misc_feature: MA Experiment 20000144 PARAMETER Experiment Name: At_42deg_Heat_cDNA_P Parameter: Tissue Value: Aerial
atgtcatgtttgaagtatttcttgatcttattgatgttgggactgtttccggcaagcgagtttgtgagctccataaacacaattgtggtagtgataagacaagtgagttcaattttgtctcagttcgctgatttcagcggagatcgccggctgcagaatgcggtttccgattgccttgatctgcttgacttttcttcagaggagctcacttggtctgcttctgcttctgagaatccaaaaggtaagggcaacggaacaggggacgttggatcggacacaaggacatggttaagtgctgctctctccaaccaagccacttgtatggaaggcttcgatggtacctctggtctcgtaaaatcccttgtcgctggcagtctcgatcaactatattctatgcttagggaattgttaccacttgtgcaaccagagcagaaacccaaggctgtttctaaacctggccctattgctaaaggaccgaaggcaccacctggccgtaaactcagagacaccgacgaagacgaaagccttcaattcccagactgggtcagaccggacgatcgtaaactattagaatcaaacggtaggacttacgacgttagtgtagcattggatgggacaggcaacttcacaaagataatggacgccataaagaaagctcctgattatagctcgacacgtttcgtcatatacattaaaaaaggtttatatttggagaatgttgagatcaagaagaagaaatggaacattgtaatgttaggtgatggcattgacgtgactgttatttccggtaaccgcagcttcatcgatggttggaccactttccgatcagctacattcgcggtaagcggaagaggattcttagcaagagatataacgttccagaacacagcagggccagagaagcatcaggcggtagcactgagatcagactctgacctctctgtgttcttcagatgtgcgatgaggggttatcaagatacactctacacgcacaccatgcgtcagttctaccgtgagtgcaccatcacgggaacagtagattttatatttggggatgggactgttgtgtttcaaaactgtcaaattttggctaaaagaggactccctaaccaaaagaacaccatcactgcacaaggccggaaagatgtcaaccaaccctcaggattctcaattcaattcagcaatatctcggcggacgcagatttggtcccatacctaaacacgacaaggacgtatctaggaaggccatggaagctatattcgagaacggttttcattaggaacaatatgagcgacgttgtgagacccgaaggatggcttgagtggaacgctgattttgcgttggacacactcttctacggagagttcatgaactacgggcctggttcaggactcagcagccgagtcaaatggcctggttaccacgtctttaacaactcggatcaggctaacaacttcaccgtttctcagttcattaaaggaaatctttggctgccttctacgggagtaacgtttagtgatggcttgtatatctaa

SEQ ID NO: 89050 - protein, 511 aa, Arabidopsis thaliana
  peptide (1)..(511): Ceres Seq. ID no. 12714871
  misc_feature (198)..(495): Pfam Name: Pectinesterase Pfam Description: Pectinesterase
  misc_feature (1)..(511): Homolog of NCBI NO: 14190429 NR Description: AT4g33220/F4I10_150 [Arabidopsis thaliana]
  misc_feature (42)..(511): Homolog of NCBI NO: 7447375 NR Description: pectinesterase homolog F4I10.150 - Arabidopsis
  misc_feature (108)..(511): Homolog of NCBI NO: 18418172 NR Description: pectinesterase family; protein id: At4g33220.1,
  misc_feature (177)..(506): Homolog of NCBI NO: 6093744 NR Description: Pectinesterase PPE8B precursor (Pectin
  misc_feature (18)..(171): Homolog of NCBI NO: 6093744 NR Description: Pectinesterase PPE8B precursor (Pectin
  misc_feature (17)..(509): Homolog of NCBI NO: 30690925 NR Description: pectinesterase family [Arabidopsis thaliana]
  misc_feature (17)..(511): Homolog of NCBI NO: 15081598 NR Description: pectin methylesterase PME1 [Vitis vinifera]
  misc_feature (169)..(508): Homolog of NCBI NO: 33520429 NR Description: pectinesterase [Fragaria x ananassa]
  misc_feature (17)..(142): Homolog of NCBI NO: 33520429 NR Description: pectinesterase [Fragaria x ananassa]
  misc_feature (50)..(509): Homolog of NCBI NO: 15230020 NR Description: pectinesterase family; protein id: At3g05620.1 thaliana] >gi|6714448|gb|AAF26135.1|AC011620_11 putative
MSCLKYFLILLMLGLFPASEFVSSINTIVVVIRQVSSILSQFADFSGDRRLQNAVSDCLDLLDFSSEELTWSASASENPKGKGNGTGDVGSDTRTWLSAALSNQATCMEGFDGTSGLVKSLVAGSLDQLYSMLRELLPLVQPEQKPKAVSKPGPIAKGPKAPPGRKLRDTDEDESLQFPDWVRPDDRKLLESNGRTYDVSVALDGTGNFTKIMDAIKKAPDYSSTRFVIYIKKGLYLENVEIKKKKWNIVMLGDGIDVTVISGNRSFIDGWTTFRSATFAVSGRGFLARDITFQNTAGPEKHQAVALRSDSDLSVFFRCAMRGYQDTLYTHTMRQFYRECTITGTVDFIFGDGTVVFQNCQILAKRGLPNQKNTITAQGRKDVNQPSGFSIQFSNISADADLVPYLNTTRTYLGRPWKLYSRTVFIRNNMSDVVRPEGWLEWNADFALDTLFYGEFMNYGPGSGLSSRVKWPGYHVFNNSDQANNFTVSQFIKGNLWLPSTGVTFSDGLYI

SEQ ID NO: 89051 - protein, 500 aa, Arabidopsis thaliana
  peptide (1)..(500): Ceres Seq. ID no. 12714872
  misc_feature (187)..(484): Pfam Name: Pectinesterase Pfam Description: Pectinesterase
  misc_feature (1)..(500): Homolog of NCBI NO: 14190429 NR Description: AT4g33220/F4I10_150 [Arabidopsis thaliana]
  misc_feature (31)..(500): Homolog of NCBI NO: 7447375 NR Description: pectinesterase homolog F4I10.150 - Arabidopsis
  misc_feature (97)..(500): Homolog of NCBI NO: 18418172 NR Description: pectinesterase family; protein id: At4g33220.1,
  misc_feature (166)..(495): Homolog of NCBI NO: 6093744 NR Description: Pectinesterase PPE8B precursor (Pectin
  misc_feature (7)..(160): Homolog of NCBI NO: 6093744 NR Description: Pectinesterase PPE8B precursor (Pectin
  misc_feature (6)..(498): Homolog of NCBI NO: 30690925 NR Description: pectinesterase family [Arabidopsis thaliana]
  misc_feature (6)..(500): Homolog of NCBI NO: 15081598 NR Description: pectin methylesterase PME1 [Vitis vinifera]
  misc_feature (158)..(497): Homolog of NCBI NO: 33520429 NR Description: pectinesterase [Fragaria x ananassa]
  misc_feature (6)..(131): Homolog of NCBI NO: 33520429 NR Description: pectinesterase [Fragaria x ananassa]
  misc_feature (39)..(498): Homolog of NCBI NO: 15230020 NR Description: pectinesterase family; protein id: At3g05620.1 thaliana] >gi|6714448|gb|AAF26135.1|AC011620_11 putative
MLGLFPASEFVSSINTIVVVIRQVSSILSQFADFSGDRRLQNAVSDCLDLLDFSSEELTWSASASENPKGKGNGTGDVGSDTRTWLSAALSNQATCMEGFDGTSGLVKSLVAGSLDQLYSMLRELLPLVQPEQKPKAVSKPGPIAKGPKAPPGRKLRDTDEDESLQFPDWVRPDDRKLLESNGRTYDVSVALDGTGNFTKIMDAIKKAPDYSSTRFVIYIKKGLYLENVEIKKKKWNIVMLGDGIDVTVISGNRSFIDGWTTFRSATFAVSGRGFLARDITFQNTAGPEKHQAVALRSDSDLSVFFRCAMRGYQDTLYTHTMRQFYRECTITGTVDFIFGDGTVVFQNCQILAKRGLPNQKNTITAQGRKDVNQPSGFSIQFSNISADADLVPYLNTTRTYLGRPWKLYSRTVFIRNNMSDVVRPEGWLEWNADFALDTLFYGEFMNYGPGSGLSSRVKWPGYHVFNNSDQANNFTVSQFIKGNLWLPSTGVTFSDGLYI

SEQ ID NO: 89052 - protein, 404 aa, Arabidopsis thaliana
  peptide (1)..(404): Ceres Seq. ID no. 12714873
  misc_feature (91)..(388): Pfam Name: Pectinesterase Pfam Description: Pectinesterase
  misc_feature (1)..(404): Homolog of NCBI NO: 14190429 NR Description: AT4g33220/F4I10_150 [Arabidopsis thaliana]
  misc_feature (1)..(404): Homolog of NCBI NO: 7447375 NR Description: pectinesterase homolog F4I10.150 - Arabidopsis
  misc_feature (1)..(404): Homolog of NCBI NO: 18418172 NR Description: pectinesterase family; protein id: At4g33220.1,
  misc_feature (70)..(399): Homolog of NCBI NO: 6093744 NR Description: Pectinesterase PPE8B precursor (Pectin
  misc_feature (1)..(64): Homolog of NCBI NO: 6093744 NR Description: Pectinesterase PPE8B precursor (Pectin
  misc_feature (1)..(402): Homolog of NCBI NO: 30690925 NR Description: pectinesterase family [Arabidopsis thaliana]
  misc_feature (1)..(404): Homolog of NCBI NO: 15081598 NR Description: pectin methylesterase PME1 [Vitis vinifera]
  misc_feature (62)..(401): Homolog of NCBI NO: 33520429 NR Description: pectinesterase [Fragaria x ananassa]
  misc_feature (1)..(35): Homolog of NCBI NO: 33520429 NR Description: pectinesterase [Fragaria x ananassa]
  misc_feature (1)..(402): Homolog of NCBI NO: 15230020 NR Description: pectinesterase family; protein id: At3g05620.1 thaliana] >gi|6714448|gb|AAF26135.1|AC011620_11 putative
MEGFDGTSGLVKSLVAGSLDQLYSMLRELLPLVQPEQKPKAVSKPGPIAKGPKAPPGRKLRDTDEDESLQFPDWVRPDDRKLLESNGRTYDVSVALDGTGNFTKIMDAIKKAPDYSSTRFVIYIKKGLYLENVEIKKKKWNIVMLGDGIDVTVISGNRSFIDGWTTFRSATFAVSGRGFLARDITFQNTAGPEKHQAVALRSDSDLSVFFRCAMRGYQDTLYTHTMRQFYRECTITGTVDFIFGDGTVVFQNCQILAKRGLPNQKNTITAQGRKDVNQPSGFSIQFSNISADADLVPYLNTTRTYLGRPWKLYSRTVFIRNNMSDVVRPEGWLEWNADFALDTLFYGEFMNYGPGSGLSSRVKWPGYHVFNNSDQANNFTVSQFIKGNLWLPSTGVTFSDGLYI

SEQ ID NO: 89053 - DNA, 2451 bp, Arabidopsis thaliana
  misc_feature (1)..(2451): Ceres Seq. ID no. 12714886
  misc_feature: MA Experiment ID: 20000315 Result: Down-regulated in Transcription
  misc_feature: MA Experiment 20000315 PARAMETER Experiment Name: At_14day_Shoots-Roots_Sub_P Parameter: Age (day) Value: 14
  misc_feature: MA Experiment 20000315 PARAMETER Experiment Name: At_14day_Shoots-Roots_Sub_P Parameter: Organism Value: A. thaliana
  misc_feature: MA Experiment 20000315 PARAMETER Experiment Name: At_14day_Shoots-Roots_Sub_P Parameter: Plant Line Value: WS
  misc_feature: MA Experiment 20000315 PARAMETER Experiment Name: At_14day_Shoots-Roots_Sub_P Parameter: Tissue Value: Shoots vs. Whole Plant
  misc_feature: MA Experiment ID: 20000327 Result: Down-regulated in Transcription
  misc_feature: MA Experiment 20000327 PARAMETER Experiment Name: At_42deg_Heat_Sub_P Parameter: Age (day) Value: 14
  misc_feature: MA Experiment 20000327 PARAMETER Experiment Name: At_42deg_Heat_Sub_P Parameter: Organism Value: A. thaliana
  misc_feature: MA Experiment 20000327 PARAMETER Experiment Name: At_42deg_Heat_Sub_P Parameter: Plant Line Value: WS
  misc_feature: MA Experiment 20000327 PARAMETER Experiment Name: At_42deg_Heat_Sub_P Parameter: Temperature (deg C) Value: 42 vs. 22
  misc_feature: MA Experiment 20000327 PARAMETER Experiment Name: At_42deg_Heat_Sub_P Parameter: Timepoint (hr) Value: 1
  misc_feature: MA Experiment 20000327 PARAMETER Experiment Name: At_42deg_Heat_Sub_P Parameter: Tissue Value: Aerial
  misc_feature: MA Experiment ID: 20000328 Result: Down-regulated in Transcription
  misc_feature: MA Experiment 20000328 PARAMETER Experiment Name: At_42deg_Heat_Sub_P Parameter: Age (day) Value: 14
  misc_feature: MA Experiment 20000328 PARAMETER Experiment Name: At_42deg_Heat_Sub_P Parameter: Organism Value: A. thaliana
  misc_feature: MA Experiment 20000328 PARAMETER Experiment Name: At_42deg_Heat_Sub_P Parameter: Plant Line Value: WS
  misc_feature: MA Experiment 20000328 PARAMETER Experiment Name: At_42deg_Heat_Sub_P Parameter: Temperature (deg C) Value: 42 vs. 22
  misc_feature: MA Experiment 20000328 PARAMETER Experiment Name: At_42deg_Heat_Sub_P Parameter: Timepoint (hr) Value: 6
  misc_feature: MA Experiment 20000328 PARAMETER Experiment Name: At_42deg_Heat_Sub_P Parameter: Tissue Value: Aerial
  misc_feature: MA Experiment ID: 20000347 Result: Up-regulated in Transcription
  misc_feature: MA Experiment 20000347 PARAMETER Experiment Name: At_2mM_SA_Sub_P Parameter: Age (day) Value: 14
  misc_feature: MA Experiment 20000347 PARAMETER Experiment Name: At_2mM_SA_Sub_P Parameter: Organism Value: A. thaliana
  misc_feature: MA Experiment 20000347 PARAMETER Experiment Name: At_2mM_SA_Sub_P Parameter: Plant Line Value: WS
  misc_feature: MA Experiment 20000347 PARAMETER Experiment Name: At_2mM_SA_Sub_P Parameter: Timepoint (hr) Value: 6
  misc_feature: MA Experiment 20000347 PARAMETER Experiment Name: At_2mM_SA_Sub_P Parameter: Tissue Value: Aerial
  misc_feature: MA Experiment 20000347 PARAMETER Experiment Name: At_2mM_SA_Sub_P Parameter: Treatment Value: 2mM SA vs. No Treatment
  misc_feature: MA Experiment ID: 20000355 Result: Down-regulated in Transcription
  misc_feature: MA Experiment 20000355 PARAMETER Experiment Name: At_Siliques_Sub_P Parameter: Age (day) Value: 21
  misc_feature: MA Experiment 20000355 PARAMETER Experiment Name: At_Siliques_Sub_P Parameter: Organism Value: A. thaliana
  misc_feature: MA Experiment 20000355 PARAMETER Experiment Name: At_Siliques_Sub_P Parameter: Plant Line Value: WS
  misc_feature: MA Experiment 20000355 PARAMETER Experiment Name: At_Siliques_Sub_P Parameter: Tissue Value: Less Than 5mm Siliques vs. Whole Plant
  misc_feature: MA Experiment ID: 20000440 Result: Down-regulated in Transcription
  misc_feature: MA Experiment 20000440 PARAMETER Experiment Name: At_Closed-Flower__Sub_P Parameter: Tissue Value: Closed Flower vs. Whole Plant
atggccatcaccgattttttcgccggtgaaattgcgacggagctcctgaagcagctctttacgatatctacaacggcgtggagatacaaaaacaccgccaaacaactcctcaccttgatcgatagcattcgaccgacgatcaaggagattcaatacagcggcgtggagcttcctgctcaccgccaagctcaaatcggtatgctcttcgatactttagagaaaggcaagaagctcactgacaaagtccttagctctaagcgatggaatttatatcgacagctaaccctagccagaaaaatggagaagctagagaagaccatctctaatttccttaaaaatgaggtctttacacatatcctcgctgacgttcatcatctccgggccgataccagtgtgcgtttggatcgggttgacatgagcctcgacagggtgattcagcaagtgggttccatgaaaattgggggaggtggcttgatatcagaggccatgaagagagccgaggctatggagattgagaccaacgacgattcggagaaatttggggttggattggaattgggaaaggttaaggttaagaagatgatgttcgaatctcaaggaggggtttttgggatcagtggaatgggcggtgttggtaaaaccactcttgccaaagaacttcaacgggaccatgaagtccaatgtcactttgagaaccggattttgtttctgactgtatcacaatctccgcttcttgaggagctgagggaacttatatggggtttcttatctggttgtgaagctggaaatcctgttcctgactgtaattttccgtttgatggcgcgcgtaagctcgtgattcttgatgatgtttggaccacacaggccctggaccgcttgacctcgtttaagtttcctggttgcacaactcttgtggtctcacgatccaaactcactgagcctaaattcacttatgatgtcgaagtactgagtgaagatgaagcaatctctctcttctgtctctgtgctttcggtcagaaatctatccctcttggtttctgcaaagatctggttaagcaggttgctaatgaatgtaaagggcttcctttagctctcaaagtcacgggtgcttcattaaatggcaaacctgaaatgtactggaagggcgtattgcagaggttatcaaaaggtgaacctgctgatgactctcacgagagtagattgcttcgtcaaatggaagctagtctagacaatctcgaccagacgaccaaagattgtttcttggatcttggcgccttccctgaagacaggaagattcctcttgatgttctcatcaacatttggattgagttacatgatatagatgaaggaaatgcttttgccatccttgttgatttgtcacacaagaatctccttactcttgggaaggatccacggcttggctctttgtacgcaagccactatgatatatttgtgacacagcatgatgttctgcgagacctagctcttcatttaagcaatgcagggaaagtaaacagaagaaagcggttgctgatgccgaaaagagagttagatcttccaggagattgggaaaggaacaatgatgagcattacattgcccagattgtctctattcatactggggaaatgaatgaaatgcaatggtttgacatggagttccccaaggcagagattctaatattgaacttctcttcagacaagtatgttcttccgccttttatcagtaagatgagccggcttaaggtcctagtgattatcaacaacggcatgtctcccgcggttctccatgacttttcaatatttgctcatttgtcgaaactaagaagtctctggctagagagggttcacgtccctcaactctccaactcaaccacccccttgaaaaatctccacaagatgtctttgattctgtgcaagatcaataaaagttttgatcaaaccggacttgacgtggcagatatcttcccaaaattgggcgatctgacaatagatcactgtgatgatctcgtggcactaccttcaagcatttgcggactgacctcccttagctgcttaagcataacaaattgtccacgcctcggtgaattgcccaagaacctcagtaagctacaagctctcgaaatcttaaggctatatgcttgccctgagctaaagacattacctggagaaatatgtgagcttcctgggcttaagtatctcgacatctcacaatgtgtcagcctgagttgtcttccagaggaaataggaaagctaaagaagcttgagaagatcgacatgagagaatgttgcttctcggatagaccgagctctgctgtttcactgaagtctctgcgccatgtaatctgcgataccgacgttgcatttatgtgggaagaagttgagaaggctgttccagggttaaagatcgaagctgctgagaaatgcttcagcctagactggcttgacgaataa

SEQ ID NO: 89054 - protein, 816 aa, Arabidopsis thaliana
  peptide (1)..(816): Ceres Seq. ID no. 12714887
  misc_feature (182)..(293): Pfam Name: NB-ARC domain Pfam Description: NB-ARC domain
  misc_feature (3)..(816): Homolog of NCBI NO: 15238281 NR Description: disease resistance protein (CC-NBS-LRR class), protein id: At5g04720.1, supported by cDNA: gi_15292720,
  misc_feature (194)..(816): Homolog of NCBI NO: 15238054 NR Description: disease resistance protein (NBS-LRR class), protein id: At5g47280.1 [Arabidopsis thaliana]
  misc_feature (169)..(816): Homolog of NCBI NO: 30692890 NR Description: disease resistance protein (CC-NBS-LRR class),
  misc_feature (169)..(816): Homolog of NCBI NO: 25403197 NR Description: probable disease resistance protein [imported] - thaliana >gi|10998939|gb|AAG26078.1|AC069299_4 disease resistance putative [Arabidopsis thaliana]
  misc_feature (539)..(816): Homolog of NCBI NO: 7485661 NR Description: hypothetical protein F17M5.60 - Arabidopsis >gi|4490297|emb|CAB38788.1| putative protein [Arabidopsis >gi|7270278|emb|CAB80047.1| putative protein [Arabidopsis
  misc_feature (8)..(806): Homolog of NCBI NO: 15240127 NR Description: disease resistance protein (CC-NBS-LRR class), protein id: At5g66910.1, supported by cDNA: gi_18087525
  misc_feature (348)..(816): Homolog of NCBI NO: 21655203 NR Description: NBS/LRR [Pinus taeda]
  misc_feature (9)..(806): Homolog of NCBI NO: 15240126 NR Description: disease resistance protein (CC-NBS-LRR class), protein id: At5g66900.1 [Arabidopsis thaliana]
  misc_feature (408)..(802): Homolog of NCBI NO: 15240125 NR Description: disease resistance protein (NBS-LRR class), protein id: At5g66890.1 [Arabidopsis thaliana] contains similarity to disease resistance
  misc_feature (176)..(759): Homolog of NCBI NO: 34391519 NR Description: disease resistance protein-like protein MsR1
MAITDFFAGEIATELLKQLFTISTTAWRYKNTAKQLLTLIDSIRPTIKEIQYSGVELPAHRQAQIGMLFDTLEKGKKLTDKVLSSKRWNLYRQLTLARKMEKLEKTISNFLKNEVFTHILADVHHLRADTSVRLDRVDMSLDRVIQQVGSMKIGGGGLISEAMKRAEAMEIETNDDSEKFGVGLELGKVKVKKMMFESQGGVFGISGMGGVGKTTLAKELQRDHEVQCHFENRILFLTVSQSPLLEELRELIWGFLSGCEAGNPVPDCNFPFDGARKLVILDDVWTTQALDRLTSFKFPGCTTLVVSRSKLTEPKFTYDVEVLSEDEAISLFCLCAFGQKSIPLGFCKDLVKQVANECKGLPLALKVTGASLNGKPEMYWKGVLQRLSKGEPADDSHESRLLRQMEASLDNLDQTTKDCFLDLGAFPEDRKIPLDVLINIWIELHDIDEGNAFAILVDLSHKNLLTLGKDPRLGSLYASHYDIFVTQHDVLRDLALHLSNAGKVNRRKRLLMPKRELDLPGDWERNNDEHYIAQIVSIHTGEMNEMQWFDMEFPKAEILILNFSSDKYVLPPFISKMSRLKVLVIINNGMSPAVLHDFSIFAHLSKLRSLWLERVHVPQLSNSTTPLKNLHKMSLILCKINKSFDQTGLDVADIFPKLGDLTIDHCDDLVALPSSICGLTSLSCLSITNCPRLGELPKNLSKLQALEILRLYACPELKTLPGEICELPGLKYLDISQCVSLSCLPEEIGKLKKLEKIDMRECCFSDRPSSAVSLKSLRHVICDTDVAFMWEEVEKAVPGLKIEAAEKCFSLDWLDE

SEQ ID NO: 89055 - protein, 750 aa, Arabidopsis thaliana
  peptide (1)..(750): Ceres Seq. ID no. 12714888
  misc_feature (116)..(227): Pfam Name: NB-ARC domain Pfam Description: NB-ARC domain
  misc_feature (1)..(750): Homolog of NCBI NO: 15238281 NR Description: disease resistance protein (CC-NBS-LRR class), protein id: At5g04720.1, supported by cDNA: gi_15292720,
  misc_feature (128)..(750): Homolog of NCBI NO: 15238054 NR Description: disease resistance protein (NBS-LRR class), protein id: At5g47280.1 [Arabidopsis thaliana]
  misc_feature (103)..(750): Homolog of NCBI NO: 30692890 NR Description: disease resistance protein (CC-NBS-LRR class),
  misc_feature (103)..(750): Homolog of NCBI NO: 25403197 NR Description: probable disease resistance protein [imported] - thaliana >gi|10998939|gb|AAG26078.1|AC069299_4 disease resistance putative [Arabidopsis thaliana]
  misc_feature (473)..(750): Homolog of NCBI NO: 7485661 NR Description: hypothetical protein F17M5.60 - Arabidopsis >gi|4490297|emb|CAB38788.1| putative protein [Arabidopsis >gi|7270278|emb|CAB80047.1| putative protein [Arabidopsis
  misc_feature (1)..(740): Homolog of NCBI NO: 15240127 NR Description: disease resistance protein (CC-NBS-LRR class), protein id: At5g66910.1, supported by cDNA: gi_18087525
  misc_feature (282)..(750): Homolog of NCBI NO: 21655203 NR Description: NBS/LRR [Pinus taeda]
  misc_feature (1)..(740): Homolog of NCBI NO: 15240126 NR Description: disease resistance protein (CC-NBS-LRR class), protein id: At5g66900.1 [Arabidopsis thaliana]
  misc_feature (342)..(736): Homolog of NCBI NO: 15240125 NR Description: disease resistance protein (NBS-LRR class), protein id: At5g66890.1 [Arabidopsis thaliana] contains similarity to disease resistance
  misc_feature (110)..(693): Homolog of NCBI NO: 34391519 NR Description: disease resistance protein-like protein MsR1
MLFDTLEKGKKLTDKVLSSKRWNLYRQLTLARKMEKLEKTISNFLKNEVFTHILADVHHLRADTSVRLDRVDMSLDRVIQQVGSMKIGGGGLISEAMKRAEAMEIETNDDSEKFGVGLELGKVKVKKMMFESQGGVFGISGMGGVGKTTLAKELQRDHEVQCHFENRILFLTVSQSPLLEELRELIWGFLSGCEAGNPVPDCNFPFDGARKLVILDDVWTTQALDRLTSFKFPGCTTLVVSRSKLTEPKFTYDVEVLSEDEAISLFCLCAFGQKSIPLGFCKDLVKQVANECKGLPLALKVTGASLNGKPEMYWKGVLQRLSKGEPADDSHESRLLRQMEASLDNLDQTTKDCFLDLGAFPEDRKIPLDVLINIWIELHDIDEGNAFAILVDLSHKNLLTLGKDPRLGSLYASHYDIFVTQHDVLRDLALHLSNAGKVNRRKRLLMPKRELDLPGDWERNNDEHYIAQIVSIHTGEMNEMQWFDMEFPKAEILILNFSSDKYVLPPFISKMSRLKVLVIINNGMSPAVLHDFSIFAHLSKLRSLWLERVHVPQLSNSTTPLKNLHKMSLILCKINKSFDQTGLDVADIFPKLGDLTIDHCDDLVALPSSICGLTSLSCLSITNCPRLGELPKNLSKLQALEILRLYACPELKTLPGEICELPGLKYLDISQCVSLSCLPEEIGKLKKLEKIDMRECCFSDRPSSAVSLKSLRHVICDTDVAFMWEEVEKAVPGLKIEAAEKCFSLDWLDE

SEQ ID NO: 89056 - protein, 717 aa, Arabidopsis thaliana
  peptide (1)..(717): Ceres Seq. ID no. 12714889
  misc_feature (83)..(194): Pfam Name: NB-ARC domain Pfam Description: NB-ARC domain
  misc_feature (1)..(717): Homolog of NCBI NO: 15238281 NR Description: disease resistance protein (CC-NBS-LRR class), protein id: At5g04720.1, supported by cDNA: gi_15292720,
  misc_feature (95)..(717): Homolog of NCBI NO: 15238054 NR Description: disease resistance protein (NBS-LRR class), protein id: At5g47280.1 [Arabidopsis thaliana]
  misc_feature (70)..(717): Homolog of NCBI NO: 30692890 NR Description: disease resistance protein (CC-NBS-LRR class),
  misc_feature (70)..(717): Homolog of NCBI NO: 25403197 NR Description: probable disease resistance protein [imported] - thaliana >gi|10998939|gb|AAG26078.1|AC069299_4 disease resistance putative [Arabidopsis thaliana]
  misc_feature (440)..(717): Homolog of NCBI NO: 7485661 NR Description: hypothetical protein F17M5.60 - Arabidopsis >gi|4490297|emb|CAB38788.1| putative protein [Arabidopsis >gi|7270278|emb|CAB80047.1| putative protein [Arabidopsis
  misc_feature (1)..(707): Homolog of NCBI NO: 15240127 NR Description: disease resistance protein (CC-NBS-LRR class), protein id: At5g66910.1, supported by cDNA: gi_18087525
  misc_feature (249)..(717): Homolog of NCBI NO: 21655203 NR Description: NBS/LRR [Pinus taeda]
  misc_feature (1)..(707): Homolog of NCBI NO: 15240126 NR Description: disease resistance protein (CC-NBS-LRR class), protein id: At5g66900.1 [Arabidopsis thaliana]
  misc_feature (309)..(703): Homolog of NCBI NO: 15240125 NR Description: disease resistance protein (NBS-LRR class), protein id: At5g66890.1 [Arabidopsis thaliana] contains similarity to disease resistance
  misc_feature (77)..(660): Homolog of NCBI NO: 34391519 NR Description: disease resistance protein-like protein MsR1
MEKLEKTISNFLKNEVFTHILADVHHLRADTSVRLDRVDMSLDRVIQQVGSMKIGGGGLISEAMKRAEAMEIETNDDSEKFGVGLELGKVKVKKMMFESQGGVFGISGMGGVGKTTLAKELQRDHEVQCHFENRILFLTVSQSPLLEELRELIWGFLSGCEAGNPVPDCNFPFDGARKLVILDDVWTTQALDRLTSFKFPGCTTLVVSRSKLTEPKFTYDVEVLSEDEAISLFCLCAFGQKSIPLGFCKDLVKQVANECKGLPLALKVTGASLNGKPEMYWKGVLQRLSKGEPADDSHESRLLRQMEASLDNLDQTTKDCFLDLGAFPEDRKIPLDVLINIWIELHDIDEGNAFAILVDLSHKNLLTLGKDPRLGSLYASHYDIFVTQHDVLRDLALHLSNAGKVNRRKRLLMPKRELDLPGDWERNNDEHYIAQIVSIHTGEMNEMQWFDMEFPKAEILILNFSSDKYVLPPFISKMSRLKVLVIINNGMSPAVLHDFSIFAHLSKLRSLWLERVHVPQLSNSTTPLKNLHKMSLILCKINKSFDQTGLDVADIFPKLGDLTIDHCDDLVALPSSICGLTSLSCLSITNCPRLGELPKNLSKLQALEILRLYACPELKTLPGEICELPGLKYLDISQCVSLSCLPEEIGKLKKLEKIDMRECCFSDRPSSAVSLKSLRHVICDTDVAFMWEEVEKAVPGLKIEAAEKCFSLDWLDE

SEQ ID NO: 89057 - DNA, 945 bp, Arabidopsis thaliana
  misc_feature (1)..(945): Ceres Seq. ID no. 12714906
  misc_feature: MA Experiment ID: 108434 Result: Down-regulated in Transcription
  misc_feature: MA Experiment 108434 PARAMETER Experiment Name: At_Root_Tips_cDNA_P Parameter: Tissue Value: Root Tips
  misc_feature: MA Experiment ID: 108462 Result: Up-regulated in Transcription
  misc_feature: MA Experiment 108462 PARAMETER Experiment Name: At_Germinating_Seeds_cDNA_P Parameter: Age (day) Value: 2 vs. 0
  misc_feature: MA Experiment 108462 PARAMETER Experiment Name: At_Germinating_Seeds_cDNA_P Parameter: Tissue Value: Germinating Seeds
  misc_feature: MA Experiment ID: 108463 Result: Up-regulated in Transcription
  misc_feature: MA Experiment 108463 PARAMETER Experiment Name: At_Germinating_Seeds_cDNA_P Parameter: Age (day) Value: 3 vs. 0
  misc_feature: MA Experiment 108463 PARAMETER Experiment Name: At_Germinating_Seeds_cDNA_P Parameter: Tissue Value: Germinating Seeds
  misc_feature: MA Experiment ID: 108464 Result: Up-regulated in Transcription
  misc_feature: MA Experiment 108464 PARAMETER Experiment Name: At_Germinating_Seeds_cDNA_P Parameter: Age (day) Value: 4 vs. 0
  misc_feature: MA Experiment 108464 PARAMETER Experiment Name: At_Germinating_Seeds_cDNA_P Parameter: Tissue Value: Germinating Seeds
  misc_feature: MA Experiment ID: 108473 Result: Up-regulated in Transcription
  misc_feature: MA Experiment 108473 PARAMETER Experiment Name: At_Drought_Flowers_cDNA_P Parameter: Timepoint (hr) Value: 7 d
  misc_feature: MA Experiment 108473 PARAMETER Experiment Name: At_Drought_Flowers_cDNA_P Parameter: Tissue Value: Flower
  misc_feature: MA Experiment 108473 PARAMETER Experiment Name: At_Drought_Flowers_cDNA_P Parameter: Treatment Value: Drought vs. No Drought
  misc_feature: MA Experiment ID: 108488 Result: Down-regulated in Transcription
  misc_feature: MA Experiment ID: 108609 Result: Up-regulated in Transcription
  misc_feature: MA Experiment 108609 PARAMETER Experiment Name: At_100uM_ABA_cDNA_P Parameter: Timepoint (hr) Value: 24
  misc_feature: MA Experiment 108609 PARAMETER Experiment Name: At_100uM_ABA_cDNA_P Parameter: Tissue Value: Aerial
  misc_feature: MA Experiment 108609 PARAMETER Experiment Name: At_100uM_ABA_cDNA_P Parameter: Treatment Value: 100uM ABA vs. No Treatment
  misc_feature: MA Experiment ID: 20000144 Result: Up-regulated in Transcription
  misc_feature: MA Experiment 20000144 PARAMETER Experiment Name: At_42deg_Heat_cDNA_P Parameter: Temperature (deg C) Value: 42 vs. 22
  misc_feature: MA Experiment 20000144 PARAMETER Experiment Name: At_42deg_Heat_cDNA_P Parameter: Timepoint (hr) Value: 1
  misc_feature: MA Experiment 20000144 PARAMETER Experiment Name: At_42deg_Heat_cDNA_P Parameter: Tissue Value: Aerial
atggttagggcaaatatagtgagcatggttctgttgatgcatgccatcgttgggtttccttttcatgcgaggggattaagtatgacttactacatgatgagctgtcctttcgctgaacagattgtgaagaacagtgttaacaatgctcttcaagccgatcccactttagccgctggtcttatccgtatgttgttccacgactgtttcatcgagggatgtgatgcgtcaattctgctagattcaacgaaagacaacactgcggaaaaggattcgcctgcgaatctgagtctacgtggctacgagatcatcgatgatgcaaaggagaaaatcgagaatagatgtccaggagttgtatcatgcgcagatatagttgccatggctgctagagatgctgtcttttgggctggtggtccatattatgacataccgaaaggaaggtttgatggtaaaagatcaaagatagaagatacaagaaatctaccttcaccttttcttaatgcctctcaactcattcaaacttttggccaacgtggtttcactccacaagatgttgttgctctctctggagcacataccctaggagttgcacgatgctcctccttcaaggctagacttaccgtcccagactcttcattagactcgacttttgcaaacactctctctaaaacatgcagcgcgggtgacaatgcagagcaaccctttgatgctacgcgcaacgatttcgacaatgcttacttcaatgcgcttcagatgaaatcaggagtcctcttttcagaccaaactttattcaacacaccaaggaccaggaatcttgttaacggctatgcacttaaccaagccaagttcttctttgatttccaacaggccatgcgcaagatgagcaatcttgatgttaaacttggctctcaaggtgaagtccgtcaaaattgtcggagtattaattag

SEQ ID NO: 89058 - protein, 314 aa, Arabidopsis thaliana; identical to SEQ ID NO: 21993
  peptide (1)..(314): Ceres Seq. ID no. 12714907
  misc_feature (42)..(278): Pfam Name: Peroxidase Pfam Description: Peroxidase
  misc_feature (1)..(314): Homolog of NCBI NO: 18418208 NR Description: peroxidase, putative; protein id: At4g33420.1, by cDNA: 32346., supported by cDNA: gi_17530546 [Arabidopsis
  misc_feature (1)..(314): Homolog of NCBI NO: 26397921 NR Description: Peroxidase 47 precursor (Atperox P47) (ATP32)
  misc_feature (6)..(314): Homolog of NCBI NO: 7484677 NR Description: peroxidase (EC 1.11.1.7) prx11 precursor - spinach
  misc_feature (6)..(314): Homolog of NCBI NO: 15242213 NR Description: peroxidase, putative; protein id: At5g51890.1, by cDNA: gi_18175872 [Arabidopsis thaliana] Peroxidase 66 precursor (Atperox P66) (ATP27a)
  misc_feature (41)..(314): Homolog of NCBI NO: 2956707 NR Description: peroxidase [Spinacia oleracea]
  misc_feature (2)..(313): Homolog of NCBI NO: 15238309 NR Description: peroxidase, putative; protein id: At5g42180.1, by cDNA: gi_17381011, supported by cDNA: gi_20465876 [Arabidopsis >gi|26397658|sp|Q43872|PE64_ARATH Peroxidase 64 precursor
  misc_feature (26)..(314): Homolog of NCBI NO: 34902232 NR Description: Putative peroxidase [Oryza sativa (japonica >gi|21426121|gb|AAM52318.1| Putative peroxidase [Oryza sativa
  misc_feature (24)..(310): Homolog of NCBI NO: 14031049 NR Description: peroxidase [Nicotiana tabacum]

SEQ ID NO: 89059 - protein, 306 aa, Arabidopsis thaliana; identical to SEQ ID NO: 21994
  peptide (1)..(306): Ceres Seq. ID no. 12714908
  misc_feature (34)..(270): Pfam Name: Peroxidase Pfam Description: Peroxidase
  misc_feature (1)..(306): Homolog of NCBI NO: 18418208 NR Description: peroxidase, putative; protein id: At4g33420.1, by cDNA: 32346., supported by cDNA: gi_17530546 [Arabidopsis
  misc_feature (1)..(306): Homolog of NCBI NO: 26397921 NR Description: Peroxidase 47 precursor (Atperox P47) (ATP32)
  misc_feature (1)..(306): Homolog of NCBI NO: 7484677 NR Description: peroxidase (EC 1.11.1.7) prx11 precursor - spinach
  misc_feature (1)..(306): Homolog of NCBI NO: 15242213 NR Description: peroxidase, putative; protein id: At5g51890.1, by cDNA: gi_18175872 [Arabidopsis thaliana] Peroxidase 66 precursor (Atperox P66) (ATP27a)
  misc_feature (33)..(306): Homolog of NCBI NO: 2956707 NR Description: peroxidase [Spinacia oleracea]
  misc_feature (1)..(305): Homolog of NCBI NO: 15238309 NR Description: peroxidase, putative; protein id: At5g42180.1, by cDNA: gi_17381011, supported by cDNA: gi_20465876 [Arabidopsis >gi|26397658|sp|Q43872|PE64_ARATH Peroxidase 64 precursor
  misc_feature (18)..(306): Homolog of NCBI NO: 34902232 NR Description: Putative peroxidase [Oryza sativa (japonica >gi|21426121|gb|AAM52318.1| Putative peroxidase [Oryza sativa
  misc_feature (16)..(302): Homolog of NCBI NO: 14031049 NR Description: peroxidase [Nicotiana tabacum]

SEQ ID NO: 89060 - protein, 302 aa, Arabidopsis thaliana; identical to SEQ ID NO: 21995
  peptide (1)..(302): Ceres Seq. ID no. 12714909
  misc_feature (30)..(266): Pfam Name: Peroxidase Pfam Description: Peroxidase
  misc_feature (1)..(302): Homolog of NCBI NO: 18418208 NR Description: peroxidase, putative; protein id: At4g33420.1, by cDNA: 32346., supported by cDNA: gi_17530546 [Arabidopsis
  misc_feature (1)..(302): Homolog of NCBI NO: 26397921 NR Description: Peroxidase 47 precursor (Atperox P47) (ATP32)
  misc_feature (1)..(302): Homolog of NCBI NO: 7484677 NR Description: peroxidase (EC 1.11.1.7) prx11 precursor - spinach
  misc_feature (1)..(302): Homolog of NCBI NO: 15242213 NR Description: peroxidase, putative; protein id: At5g51890.1, by cDNA: gi_18175872 [Arabidopsis thaliana] Peroxidase 66 precursor (Atperox P66) (ATP27a)
  misc_feature (29)..(302): Homolog of NCBI NO: 2956707 NR Description: peroxidase [Spinacia oleracea]
  misc_feature (1)..(301): Homolog of NCBI NO: 15238309 NR Description: peroxidase, putative; protein id: At5g42180.1, by cDNA: gi_17381011, supported by cDNA: gi_20465876 [Arabidopsis >gi|26397658|sp|Q43872|PE64_ARATH Peroxidase 64 precursor
  misc_feature (14)..(302): Homolog of NCBI NO: 34902232 NR Description: Putative peroxidase [Oryza sativa (japonica >gi|21426121|gb|AAM52318.1| Putative peroxidase [Oryza sativa
  misc_feature (12)..(298): Homolog of NCBI NO: 14031049 NR Description: peroxidase [Nicotiana tabacum]

SEQ ID NO: 89061 - DNA, 1482 bp, Arabidopsis thaliana
  misc_feature (1)..(1482): Ceres Seq. ID no. 12714914
  misc_feature: MA Experiment ID: 20000173 Result: Down-regulated in Transcription
  misc_feature: MA Experiment 20000173 PARAMETER Experiment Name: At_42deg_Heat_P Parameter: Age (day) Value: 14
  misc_feature: MA Experiment 20000173 PARAMETER Experiment Name: At_42deg_Heat_P Parameter: Organism Value: A. thaliana
  misc_feature: MA Experiment 20000173 PARAMETER Experiment Name: At_42deg_Heat_P Parameter: Plant Line Value: WS
  misc_feature: MA Experiment 20000173 PARAMETER Experiment Name: At_42deg_Heat_P Parameter: Temperature (deg C) Value: 42 vs. 22
  misc_feature: MA Experiment 20000173 PARAMETER Experiment Name: At_42deg_Heat_P Parameter: Timepoint (hr) Value: 6
  misc_feature: MA Experiment 20000173 PARAMETER Experiment Name: At_42deg_Heat_P Parameter: Tissue Value: Aerial
  misc_feature: MA Experiment ID: 20000184 Result: Down-regulated in Transcription
  misc_feature: MA Experiment 20000184 PARAMETER Experiment Name: At_Shoots__P Parameter: Age (day) Value: 7
  misc_feature: MA Experiment 20000184 PARAMETER Experiment Name: At_Shoots__P Parameter: Tissue Value: Shoots vs. Whole Plant
  misc_feature: MA Experiment ID: 20000185 Result: Down-regulated in Transcription
  misc_feature: MA Experiment 20000185 PARAMETER Experiment Name: At_Roots__P Parameter: Age (day) Value: 7 vs. 21
  misc_feature: MA Experiment 20000185 PARAMETER Experiment Name: At_Roots__P Parameter: Organism Value: A. thaliana
  misc_feature: MA Experiment 20000185 PARAMETER Experiment Name: At_Roots__P Parameter: Tissue Value: Roots vs. Whole Plant
  misc_feature: MA Experiment ID: 20000437 Result: Down-regulated in Transcription
  misc_feature: MA Experiment 20000437 PARAMETER Experiment Name: At_Drought_P Parameter: Age (day) Value: 8
  misc_feature: MA Experiment 20000437 PARAMETER Experiment Name: At_Drought_P Parameter: Organism Value: A. thaliana
  misc_feature: MA Experiment 20000437 PARAMETER Experiment Name: At_Drought_P Parameter: Plant Line Value: WS
  misc_feature: MA Experiment 20000437 PARAMETER Experiment Name: At_Drought_P Parameter: Timepoint (hr) Value: 24
  misc_feature: MA Experiment 20000437 PARAMETER Experiment Name: At_Drought_P Parameter: Tissue Value: Whole Plant
  misc_feature: MA Experiment 20000437 PARAMETER Experiment Name: At_Drought_P Parameter: Treatment Value: Drought vs. No Drought
  misc_feature: MA Experiment ID: 20000439 Result: Down-regulated in Transcription
  misc_feature: MA Experiment 20000439 PARAMETER Experiment Name: At_Roots__P Parameter: Age (day) Value: 14 vs. 21
  misc_feature: MA Experiment 20000439 PARAMETER Experiment Name: At_Roots__P Parameter: Organism Value: A. thaliana
  misc_feature: MA Experiment 20000439 PARAMETER Experiment Name: At_Roots__P Parameter: Tissue Value: Roots vs. Whole Plant
  misc_feature: MA Experiment ID: 20001557 Result: Down-regulated in Transcription
  misc_feature: MA Experiment 20001557 PARAMETER Experiment Name: At_Drought_Soil_Dry_P Parameter: Age (day) Value: 27
  misc_feature: MA Experiment 20001557 PARAMETER Experiment Name: At_Drought_Soil_Dry_P Parameter: Organism Value: A. thaliana
  misc_feature: MA Experiment 20001557 PARAMETER Experiment Name: At_Drought_Soil_Dry_P Parameter: Plant Line Value: WS
  misc_feature: MA Experiment 20001557 PARAMETER Experiment Name: At_Drought_Soil_Dry_P Parameter: Post Timepoint (hr) Value: 3
  misc_feature: MA Experiment 20001557 PARAMETER Experiment Name: At_Drought_Soil_Dry_P Parameter: Post-Treatment Value: Re-Water vs. No Drought
  misc_feature: MA Experiment 20001557 PARAMETER Experiment Name: At_Drought_Soil_Dry_P Parameter: Timepoint (day) Value: 13
  misc_feature: MA Experiment 20001557 PARAMETER Experiment Name: At_Drought_Soil_Dry_P Parameter: Treatment Value: Drought vs. No Drought
  misc_feature: MA Experiment ID: 20001905 Result: Down-regulated in Transcription
  misc_feature: MA Experiment 20001905 PARAMETER Experiment Name: At_Drought_Reproduction_P Parameter: Age (day) Value: 40
  misc_feature: MA Experiment 20001905 PARAMETER Experiment Name: At_Drought_Reproduction_P Parameter: Organism Value: A. thaliana
  misc_feature: MA Experiment 20001905 PARAMETER Experiment Name: At_Drought_Reproduction_P Parameter: Plant Line Value: WS
  misc_feature: MA Experiment 20001905 PARAMETER Experiment Name: At_Drought_Reproduction_P Parameter: Timepoint (day) Value: 10
  misc_feature: MA Experiment 20001905 PARAMETER Experiment Name: At_Drought_Reproduction_P Parameter: Tissue Value: Rosettes
  misc_feature: MA Experiment 20001905 PARAMETER Experiment Name: At_Drought_Reproduction_P Parameter: Treatment Value: Drought vs. No Drought
atgaagaaagtttctgtcaataaaataggagactgtgagacaaatggttatcaagagaatcgtatggaggttcaggcaagaccgtcattgtctacacaacaggaaattacgcctgtatccaccattgaaattgatgacaatttggatgtgacggaaaagcctattgaagctgaggagaatcttgtcgcggaaccaacagctacagatgatttgtctcctgatgaactcctttcaacttcagaagcaacacatcgcagcgttgatgagattgctcaaaaacctgtaattgatacgtctgaggaaaaccttctgaacacttttgaagctgaggagaatcctgtagttgaaccaacagctacagctgctgtctcttctgatgaactcatttcaacttcagaagcaacacgtcacagcgttgatgagatcgctcaaaagcctattattgatacgtctgagaaaaaccctatggaaacttttgttgaaccagaagcagtgcatagtagcgttgacgagagcactgaaaagcttgtagttgttacgtctgatgtggaaaatgatggagaaaatgtagcttcaaccacagaagatgaaataactgtgagggacacaataactgatagtggtagcatatccaataatgatgacacaaaagtggaagatctccaacttcctgtacctgaaacggccagtcttgaacccattaaagcggcttctggcagggaagaacttgtgtccaaagcattttacttggactctggttttgcttcactccaaagcccctttaaggcattggcaggtcgggaagatgcttattttatctctcaccacaattggataggtattgctgatggagtctctcagtggtcatttgaaggaatcaataagggaatgtatgctcaagaactcatgagcaactgtgaaaagattatttccaatgaaactgctaagataagtgacccagttcaagttctccatagaagtgtcaatgagactaagtcctctggatcatcaacagccttaattgctcatcttgacaataatgaactccacatagccaatattggagattcgggattcatggtcattagggatggcacagtattgcagaattcgtctccaatgtttcatcatttttgttttcccttgcatattacgcaaggctgtgatgtcctaaaacttgcagaggtttaccatgtgaacctggaagaaggcgatgttgtcatcgcagcaactgatgggctctttgataacttatacgaaaaagaaatcgtttcaatagtttgcgggtcactgaaacagagtctggaacctcagaaaatagcagagttggtagctgcaaaagcacaagaagtaggacgatctaagacagagagaacgccatttgctgacgcagctaaagaagaaggatacaatggacacaaaggtggtaaacttgatgctgttaccgtcatcatttcattcgtgaaaattgtctctacataa

SEQ ID NO: 89062 - protein, 493 aa, Arabidopsis thaliana; identical to SEQ ID NO: 77351
  peptide (1)..(493): Ceres Seq. ID no. 12714915
  misc_feature (257)..(457): Pfam Name: Protein phosphatase 2C Pfam Description: Protein phosphatase 2C
  misc_feature (1)..(493): Homolog of NCBI NO: 18418226 NR Description: putative protein; protein id: At4g33500.1, by cDNA: gi_15293236 [Arabidopsis thaliana] unknown protein [Arabidopsis thaliana]
  misc_feature (45)..(490): Homolog of NCBI NO: 7485658 NR Description: hypothetical protein F17M5.260 - Arabidopsis >gi|4490317|emb|CAB38808.1| putative protein [Arabidopsis >gi|7270298|emb|CAB80067.1| putative protein [Arabidopsis
  misc_feature (1)..(240): Homolog of NCBI NO: 7485658 NR Description: hypothetical protein F17M5.260 - Arabidopsis >gi|4490317|emb|CAB38808.1| putative protein [Arabidopsis >gi|7270298|emb|CAB80067.1| putative protein [Arabidopsis
  misc_feature (116)..(489): Homolog of NCBI NO: 37533570 NR Description: putative protein phosphatase 2C [Oryza sativa
  misc_feature (242)..(488): Homolog of NCBI NO: 25366932 NR Description: hypothetical protein dl4315c [imported] - thaliana >gi|5302796|emb|CAB46038.1| hypothetical protein thaliana] >gi|7268408|emb|CAB78700.1| hypothetical protein
  misc_feature (242)..(488): Homolog of NCBI NO: 30683717 NR Description: expressed protein [Arabidopsis thaliana] unknown protein [Arabidopsis thaliana]
  misc_feature (224)..(488): Homolog of NCBI NO: 15240071 NR Description: putative protein; protein id: At5g66720.1 thaliana] >gi|8843730|dbj|BAA97278.1| contains similarity to protein~emb|CAB46038.1~gene_id:MSN2.11 [Arabidopsis thaliana]
  misc_feature (218)..(493): Homolog of NCBI NO: 18402284 NR Description: expressed protein; protein id: At2g30170.1, by cDNA: gi_13878070, supported by cDNA: gi_17104662 [Arabidopsis >gi|13878071|gb|AAK44113.1|AF370298_1 unknown protein
  misc_feature (216)..(491): Homolog of NCBI NO: 34896100 NR Description: B1189A09.35 [Oryza sativa (japonica
  misc_feature (268)..(488): Homolog of NCBI NO: 28893291 NR Description: RIKEN cDNA 9130017A15 gene [Mus musculus]

SEQ ID NO: 89063 - protein, 472 aa, Arabidopsis thaliana; identical to SEQ ID NO: 77352
  peptide (1)..(472): Ceres Seq. ID no. 12714916
  misc_feature (236)..(436): Pfam Name: Protein phosphatase 2C Pfam Description: Protein phosphatase 2C
  misc_feature (1)..(472): Homolog of NCBI NO: 18418226 NR Description: putative protein; protein id: At4g33500.1, by cDNA: gi_15293236 [Arabidopsis thaliana] unknown protein [Arabidopsis thaliana]
  misc_feature (24)..(469): Homolog of NCBI NO: 7485658 NR Description: hypothetical protein F17M5.260 - Arabidopsis >gi|4490317|emb|CAB38808.1| putative protein [Arabidopsis >gi|7270298|emb|CAB80067.1| putative protein [Arabidopsis
  misc_feature (1)..(219): Homolog of NCBI NO: 7485658 NR Description: hypothetical protein F17M5.260 - Arabidopsis >gi|4490317|emb|CAB38808.1| putative protein [Arabidopsis >gi|7270298|emb|CAB80067.1| putative protein [Arabidopsis
  misc_feature (95)..(468): Homolog of NCBI NO: 37533570 NR Description: putative protein phosphatase 2C [Oryza sativa
  misc_feature (221)..(467): Homolog of NCBI NO: 25366932 NR Description: hypothetical protein dl4315c [imported] - thaliana >gi|5302796|emb|CAB46038.1| hypothetical protein thaliana] >gi|7268408|emb|CAB78700.1| hypothetical protein
  misc_feature (221)..(467): Homolog of NCBI NO: 30683717 NR Description: expressed protein [Arabidopsis thaliana] unknown protein [Arabidopsis thaliana]
  misc_feature (203)..(467): Homolog of NCBI NO: 15240071 NR Description: putative protein; protein id: At5g66720.1 thaliana] >gi|8843730|dbj|BAA97278.1| contains similarity to protein~emb|CAB46038.1~gene_id:MSN2.11 [Arabidopsis thaliana]
  misc_feature (197)..(472): Homolog of NCBI NO: 18402284 NR Description: expressed protein; protein id: At2g30170.1, by cDNA: gi_13878070, supported by cDNA: gi_17104662 [Arabidopsis >gi|13878071|gb|AAK44113.1|AF370298_1 unknown protein
  misc_feature (195)..(470): Homolog of NCBI NO: 34896100 NR Description: B1189A09.35 [Oryza sativa (japonica
  misc_feature (247)..(467): Homolog of NCBI NO: 28893291 NR Description: RIKEN cDNA 9130017A15 gene [Mus musculus]

SEQ ID NO: 89064 - protein, 338 aa, Arabidopsis thaliana
  peptide (1)..(338): Ceres Seq. ID no. 12714917
  misc_feature (102)..(302): Pfam Name: Protein phosphatase 2C Pfam Description: Protein phosphatase 2C
  misc_feature (1)..(338): Homolog of NCBI NO: 18418226 NR Description: putative protein; protein id: At4g33500.1, by cDNA: gi_15293236 [Arabidopsis thaliana] unknown protein [Arabidopsis thaliana]
  misc_feature (1)..(335): Homolog of NCBI NO: 7485658 NR Description: hypothetical protein F17M5.260 - Arabidopsis >gi|4490317|emb|CAB38808.1| putative protein [Arabidopsis >gi|7270298|emb|CAB80067.1| putative protein [Arabidopsis
  misc_feature (1)..(85): Homolog of NCBI NO: 7485658 NR Description: hypothetical protein F17M5.260 - Arabidopsis >gi|4490317|emb|CAB38808.1| putative protein [Arabidopsis >gi|7270298|emb|CAB80067.1| putative protein [Arabidopsis
  misc_feature (1)..(334): Homolog of NCBI NO: 37533570 NR Description: putative protein phosphatase 2C [Oryza sativa
  misc_feature (87)..(333): Homolog of NCBI NO: 25366932 NR Description: hypothetical protein dl4315c [imported] - thaliana >gi|5302796|emb|CAB46038.1| hypothetical protein thaliana] >gi|7268408|emb|CAB78700.1| hypothetical protein
  misc_feature (87)..(333): Homolog of NCBI NO: 30683717 NR Description: expressed protein [Arabidopsis thaliana] unknown protein [Arabidopsis thaliana]
  misc_feature (69)..(333): Homolog of NCBI NO: 15240071 NR Description: putative protein; protein id: At5g66720.1 thaliana] >gi|8843730|dbj|BAA97278.1| contains similarity to protein~emb|CAB46038.1~gene_id:MSN2.11 [Arabidopsis thaliana]
  misc_feature (63)..(338): Homolog of NCBI NO: 18402284 NR Description: expressed protein; protein id: At2g30170.1, by cDNA: gi_13878070, supported by cDNA: gi_17104662 [Arabidopsis >gi|13878071|gb|AAK44113.1|AF370298_1 unknown protein
  misc_feature (61)..(336): Homolog of NCBI NO: 34896100 NR Description: B1189A09.35 [Oryza sativa (japonica
  misc_feature (113)..(333): Homolog of NCBI NO: 28893291 NR Description: RIKEN cDNA 9130017A15 gene [Mus musculus]
METFVEPEAVHSSVDESTEKLVVVTSDVENDGENVASTTEDEITVRDTITDSGSISNNDDTKVEDLQLPVPETASLEPIKAASGREELVSKAFYLDSGFASLQSPFKALAGREDAYFISHHNWIGIADGVSQWSFEGINKGMYAQELMSNCEKIISNETAKISDPVQVLHRSVNETKSSGSSTALIAHLDNNELHIANIGDSGFMVIRDGTVLQNSSPMFHHFCFPLHITQGCDVLKLAEVYHVNLEEGDVVIAATDGLFDNLYEKEIVSIVCGSLKQSLEPQKIAELVAAKAQEVGRSKTERTPFADAAKEEGYNGHKGGKLDAVTVIISFVKIVST

SEQ ID NO: 89065 - DNA, 1736 bp, Arabidopsis thaliana
  misc_feature (1)..(1736): Ceres Seq. ID no. 12714918
  misc_feature: MA Experiment ID: 108434 Result: Down-regulated in Transcription
  misc_feature: MA Experiment 108434 PARAMETER Experiment Name: At_Root_Tips_cDNA_P Parameter: Tissue Value: Root Tips
  misc_feature: MA Experiment ID: 108435 Result: Down-regulated in Transcription
  misc_feature: MA Experiment 108435 PARAMETER Experiment Name: At_stm_Mutants_cDNA_P Parameter: Plant Line Value: wt Landsburg vs stm
  misc_feature: MA Experiment 108435 PARAMETER Experiment Name: At_stm_Mutants_cDNA_P Parameter: Tissue Value: Shoot Apical Meristem Region
  misc_feature: MA Experiment ID: 108573 Result: Up-regulated in Transcription
  misc_feature: MA Experiment 108573 PARAMETER Experiment Name: At_Drought_cDNA_P Parameter: Timepoint (hr) Value: 6
  misc_feature: MA Experiment 108573 PARAMETER Experiment Name: At_Drought_cDNA_P Parameter: Tissue Value: Aerial
  misc_feature: MA Experiment 108573 PARAMETER Experiment Name: At_Drought_cDNA_P Parameter: Treatment Value: Drought vs. No Drought
  misc_feature: MA Experiment ID: 108595 Result: Down-regulated in Transcription
  misc_feature: MA Experiment 108595 PARAMETER Experiment Name: At_Ler-pi_Ovule_cDNA_P Parameter: Plant Line Value: null
  misc_feature: MA Experiment ID: 20000088 Result: Up-regulated in Transcription
  misc_feature: MA Experiment 20000088 PARAMETER Experiment Name: At_100uM_ABA_Mutants_cDNA_P Parameter: Plant Line Value: Landsberg
  misc_feature: MA Experiment 20000088 PARAMETER Experiment Name: At_100uM_ABA_Mutants_cDNA_P Parameter: Timepoint (hr) Value: 6
  misc_feature: MA Experiment 20000088 PARAMETER Experiment Name: At_100uM_ABA_Mutants_cDNA_P Parameter: Tissue Value: Aerial
  misc_feature: MA Experiment 20000088 PARAMETER Experiment Name: At_100uM_ABA_Mutants_cDNA_P Parameter: Treatment Value: 100uM ABA vs. No Treatment
  misc_feature: MA Experiment ID: 20000090 Result: Up-regulated in Transcription
  misc_feature: MA Experiment ID: 20000227 Result: Down-regulated in Transcription
  misc_feature: MA Experiment 20000227 PARAMETER Experiment Name: At_Root-Tips-vs-Tops_P Parameter: Tissue Value: Root Tips vs. Root Tops
  misc_feature: MA Experiment ID: 20000439 Result: Down-regulated in Transcription
  misc_feature: MA Experiment 20000439 PARAMETER Experiment Name: At_Roots__P Parameter: Age (day) Value: 14 vs. 21
  misc_feature: MA Experiment 20000439 PARAMETER Experiment Name: At_Roots__P Parameter: Organism Value: A. thaliana
  misc_feature: MA Experiment 20000439 PARAMETER Experiment Name: At_Roots__P Parameter: Tissue Value: Roots vs. Whole Plant
  misc_feature: MA Experiment ID: 20000496 Result: Up-regulated in Transcription
  misc_feature: MA Experiment 20000496 PARAMETER Experiment Name: At_Guard_Cells_P Parameter: Harvest Date Value: 7/19/2002
  misc_feature: MA Experiment 20000496 PARAMETER Experiment Name: At_Guard_Cells_P Parameter: Organism Value: Canola
  misc_feature: MA Experiment 20000496 PARAMETER Experiment Name: At_Guard_Cells_P Parameter: Tissue Value: Guard Cells vs. Leaves
atccattctctgccgaactagtcgtcaatcgaaatcccaaagatcagcgatggtgactctaaacgcttcttctcctctcacgaccaagtcgttcctcccctaccgtcacgctcctcgccgtccaatctctttctcccctgtcttcgccgttcattcgactgaccccaagaaatctacccaatcagcctccgcttcggttaaatggagtctagagagttggaagtcgaagaaagctttgcaattgccggattatcctgatcagaaggatgttgattcggttctacagacgctttcttcttttcctcctatagttttcgctggtgaggctaggaaactagaggataagcttggtcaagcggctatgggtcaagcctttatgcttcaaggtggtgattgtgctgagagtttcaaggaatttaacgctaataacattagagacacctttagggttcttcttcagatgggtgttgttctcatgttcggtggccagttaccagttatcaaggtgggaagaatggctggtcagtttgcgaagccgagatcagacccatttgaggagaaagatggtgtgaagctgccgagttacagaggagataacataaatggtgatgcttttgatgagaaatcgaggattcctgatcctcataggatggttagagcgtacacacagtctgtggctacgttgaatctcttgagagcatttgctactggaggttatgcagctatgcagagagttagccagtggaaccttgatttcacgcaacatagtgaacagggtgacaggtaccgtgaattggctaatagagttgatgaggctttgggattcatgggtgcagctggacttactagtgctcacccgatcatgactactactgagttttggacatcccatgagtgtttgttattgccttatgagcaagcactcacaagagaggattcaacatctggactttactatgattgctctgcgcacatgctttgggttggagaacgaactcgccaacttgatggtgctcatgttgagtttctgaggggaatcgctaaccccctcggaatcaaggtgagtgataaaatggtccctagtgaactggttaagctgatagagatactaaaccctcagaacaagcctggaaggattacggttatagtgagaatgggagctgagaatatgcgggtcaagcttcctaatttgatcagagcagtccgtggagccggtcagattgtgacttgggttagtgatccaatgcacggaaacacaatcatggctcctggtgggctaaaaactcgttctttcgatgcaatcagggcggaattgagagcgttcttcgacgtccatgatcaagaagggagtttccctggcggggttcatttagaaatgactggtcaaaacgtgacagaatgtgtcggagggtcacgcaccatcacttacaacgatctaagctcacgctaccacactcactgtgacccaagactcaacgcatctcagtctctggagcttgcattcatcattgcagagcgtctgcgaaagagaaggcttggttccgggaatcttccgtcatctattggagtctagagaacaagaaaatacttatccgagctaggatgtgtgtgtatagaggctgatctctacttattaagttgccaagttaaatgagcttgtgtactgttaaaagtaagatattgttgtttttgtgtgttgggttatgattttgtctgaaataagtggctgactttat

SEQ ID NO: 89066 - protein, 523 aa, Arabidopsis thaliana; identical to SEQ ID NO: 24003
  peptide (1)..(523): Ceres Seq. ID no. 12714919
  misc_feature (67)..(504): Pfam Name: Class-II DAHP synthetase family Pfam Description: Class-II DAHP synthetase family
  misc_feature (17)..(523): Homolog of NCBI NO: 15234217 NR Description: 2-dehydro-3-deoxyphosphoheptonate aldolase; id: At4g33510.1, supported by cDNA: 37432., supported by cDNA: supported by cDNA: gi_166689 [Arabidopsis thaliana]
  misc_feature (17)..(523): Homolog of NCBI NO: 166690 NR Description: 3-deoxy-D-arabino-heptulosonate 7-phosphate
  misc_feature (17)..(523): Homolog of NCBI NO: 21593248 NR Description: 2-dehydro-3-deoxyphosphoheptonate aldolase
  misc_feature (21)..(511): Homolog of NCBI NO: 2398681 NR Description: 3-deoxy-D-arabino-heptulosonate 7-phosphate
  misc_feature (3)..(514): Homolog of NCBI NO: 2398679 NR Description: 3-deoxy-D-arabino-heptulosonate 7-phosphate
  misc_feature (40)..(514): Homolog of NCBI NO: 584778 NR Description: Phospho-2-dehydro-3-deoxyheptonate aldolase 2,
  misc_feature (40)..(514): Homolog of NCBI NO: 2546988 NR Description: 2-dehydro-3-deoxyphosphoheptonate aldolase;
  misc_feature (40)..(514): Homolog of NCBI NO: 584777 NR Description: Phospho-2-dehydro-3-deoxyheptonate aldolase 1,
  misc_feature (40)..(514): Homolog of NCBI NO: 24745903 NR Description: 3-deoxy-D-arabino-heptulosonate 7-phosphate
  misc_feature (11)..(519): Homolog of NCBI NO: 7488957 NR Description: probable 2-dehydro-3-deoxy-phosphoheptonate

SEQ ID NO: 89067 - protein, 507 aa, Arabidopsis thaliana; identical to SEQ ID NO: 24004
  peptide (1)..(507): Ceres Seq. ID no. 12714920
  misc_feature (51)..(488): Pfam Name: Class-II DAHP synthetase family Pfam Description: Class-II DAHP synthetase family
  misc_feature (1)..(507): Homolog of NCBI NO: 15234217 NR Description: 2-dehydro-3-deoxyphosphoheptonate aldolase; id: At4g33510.1, supported by cDNA: 37432., supported by cDNA: supported by cDNA: gi_166689 [Arabidopsis thaliana]
  misc_feature (1)..(507): Homolog of NCBI NO: 166690 NR Description: 3-deoxy-D-arabino-heptulosonate 7-phosphate
  misc_feature (1)..(507): Homolog of NCBI NO: 21593248 NR Description: 2-dehydro-3-deoxyphosphoheptonate aldolase
  misc_feature (5)..(495): Homolog of NCBI NO: 2398681 NR Description: 3-deoxy-D-arabino-heptulosonate 7-phosphate
  misc_feature (1)..(498): Homolog of NCBI NO: 2398679 NR Description: 3-deoxy-D-arabino-heptulosonate 7-phosphate
  misc_feature (24)..(498): Homolog of NCBI NO: 584778 NR Description: Phospho-2-dehydro-3-deoxyheptonate aldolase 2,
  misc_feature (24)..(498): Homolog of NCBI NO: 2546988 NR Description: 2-dehydro-3-deoxyphosphoheptonate aldolase;
  misc_feature (24)..(498): Homolog of NCBI NO: 584777 NR Description: Phospho-2-dehydro-3-deoxyheptonate aldolase 1,
  misc_feature (24)..(498): Homolog of NCBI NO: 24745903 NR Description: 3-deoxy-D-arabino-heptulosonate 7-phosphate
  misc_feature (1)..(503): Homolog of NCBI NO: 7488957 NR Description: probable 2-dehydro-3-deoxy-phosphoheptonate

SEQ ID NO: 89068 - protein, 403 aa, Arabidopsis thaliana; identical to SEQ ID NO: 24005
  peptide (1)..(403): Ceres Seq. ID no. 12714921
  misc_feature (1)..(384): Pfam Name: Class-II DAHP synthetase family Pfam Description: Class-II DAHP synthetase family
  misc_feature (1)..(403): Homolog of NCBI NO: 15234217 NR Description: 2-dehydro-3-deoxyphosphoheptonate aldolase; id: At4g33510.1, supported by cDNA: 37432., supported by cDNA: supported by cDNA: gi_166689 [Arabidopsis thaliana]
  misc_feature (1)..(403): Homolog of NCBI NO: 166690 NR Description: 3-deoxy-D-arabino-heptulosonate 7-phosphate
  misc_feature (1)..(403): Homolog of NCBI NO: 21593248 NR Description: 2-dehydro-3-deoxyphosphoheptonate aldolase
  misc_feature (1)..(391): Homolog of NCBI NO: 2398681 NR Description: 3-deoxy-D-arabino-heptulosonate 7-phosphate
  misc_feature (1)..(394): Homolog of NCBI NO: 2398679 NR Description: 3-deoxy-D-arabino-heptulosonate 7-phosphate
  misc_feature (1)..(394): Homolog of NCBI NO: 584778 NR Description: Phospho-2-dehydro-3-deoxyheptonate aldolase 2,
  misc_feature (1)..(394): Homolog of NCBI NO: 2546988 NR Description: 2-dehydro-3-deoxyphosphoheptonate aldolase;
  misc_feature (1)..(394): Homolog of NCBI NO: 584777 NR Description: Phospho-2-dehydro-3-deoxyheptonate aldolase 1,
  misc_feature (1)..(394): Homolog of NCBI NO: 24745903 NR Description: 3-deoxy-D-arabino-heptulosonate 7-phosphate
  misc_feature (1)..(399): Homolog of NCBI NO: 7488957 NR Description: probable 2-dehydro-3-deoxy-phosphoheptonate

SEQ ID NO: 89069 - DNA, 1220 bp, Arabidopsis thaliana
  misc_feature (1)..(1220): Ceres Seq. ID no. 12714933
  misc_feature: MA Experiment ID: 108434 Result: Up-regulated in Transcription
  misc_feature: MA Experiment 108434 PARAMETER Experiment Name: At_Root_Tips_cDNA_P Parameter: Tissue Value: Root Tips
  misc_feature: MA Experiment ID: 108435 Result: Down-regulated in Transcription
  misc_feature: MA Experiment 108435 PARAMETER Experiment Name: At_stm_Mutants_cDNA_P Parameter: Plant Line Value: wt Landsburg vs stm
  misc_feature: MA Experiment 108435 PARAMETER Experiment Name: At_stm_Mutants_cDNA_P Parameter: Tissue Value: Shoot Apical Meristem Region
  misc_feature: MA Experiment ID: 108579 Result: Down-regulated in Transcription
  misc_feature: MA Experiment 108579 PARAMETER Experiment Name: At_4deg_Cold_cDNA_P Parameter: Temperature (deg C) Value: 4 vs. 22
  misc_feature: MA Experiment 108579 PARAMETER Experiment Name: At_4deg_Cold_cDNA_P Parameter: Timepoint (hr) Value: 6
  misc_feature: MA Experiment 108579 PARAMETER Experiment Name: At_4deg_Cold_cDNA_P Parameter: Tissue Value: Aerial
  misc_feature: MA Experiment ID: 108585 Result: Down-regulated in Transcription
  misc_feature: MA Experiment 108585 PARAMETER Experiment Name: At_5mM_NaNP_cDNA_P Parameter: Timepoint (hr) Value: 6
  misc_feature: MA Experiment 108585 PARAMETER Experiment Name: At_5mM_NaNP_cDNA_P Parameter: Tissue Value: Aerial
  misc_feature: MA Experiment 108585 PARAMETER Experiment Name: At_5mM_NaNP_cDNA_P Parameter: Treatment Value: null
  misc_feature: MA Experiment ID: 108595 Result: Down-regulated in Transcription
  misc_feature: MA Experiment 108595 PARAMETER Experiment Name: At_Ler-pi_Ovule_cDNA_P Parameter: Plant Line Value: null
  misc_feature: MA Experiment ID: 20000071 Result: Up-regulated in Transcription
  misc_feature: MA Experiment 20000071 PARAMETER Experiment Name: At_100uM_ABA_Mutants_cDNA_P Parameter: Plant Line Value: CS8104
  misc_feature: MA Experiment 20000071 PARAMETER Experiment Name: At_100uM_ABA_Mutants_cDNA_P Parameter: Timepoint (hr) Value: 6
  misc_feature: MA Experiment 20000071 PARAMETER Experiment Name: At_100uM_ABA_Mutants_cDNA_P Parameter: Tissue Value: Aerial
  misc_feature: MA Experiment 20000071 PARAMETER Experiment Name: At_100uM_ABA_Mutants_cDNA_P Parameter: Treatment Value: 100uM ABA vs. No Treatment
  misc_feature: MA Experiment ID: 20000072 Result: Up-regulated in Transcription
  misc_feature: MA Experiment 20000072 PARAMETER Experiment Name: At_100uM_ABA_Mutants_cDNA_P Parameter: Plant Line Value: CS8105
  misc_feature: MA Experiment 20000072 PARAMETER Experiment Name: At_100uM_ABA_Mutants_cDNA_P Parameter: Timepoint (hr) Value: 6
  misc_feature: MA Experiment 20000072 PARAMETER Experiment Name: At_100uM_ABA_Mutants_cDNA_P Parameter: Tissue Value: Aerial
  misc_feature: MA Experiment 20000072 PARAMETER Experiment Name: At_100uM_ABA_Mutants_cDNA_P Parameter: Treatment Value: 100uM ABA vs. No Treatment
  misc_feature: MA Experiment ID: 20000185 Result: Down-regulated in Transcription
  misc_feature: MA Experiment 20000185 PARAMETER Experiment Name: At_Roots__P Parameter: Age (day) Value: 7 vs. 21
  misc_feature: MA Experiment 20000185 PARAMETER Experiment Name: At_Roots__P Parameter: Organism Value: A. thaliana
  misc_feature: MA Experiment 20000185 PARAMETER Experiment Name: At_Roots__P Parameter: Tissue Value: Roots vs. Whole Plant
  misc_feature: MA Experiment ID: 20000439 Result: Down-regulated in Transcription
  misc_feature: MA Experiment 20000439 PARAMETER Experiment Name: At_Roots__P Parameter: Age (day) Value: 14 vs. 21
  misc_feature: MA Experiment 20000439 PARAMETER Experiment Name: At_Roots__P Parameter: Organism Value: A. thaliana
  misc_feature: MA Experiment 20000439 PARAMETER Experiment Name: At_Roots__P Parameter: Tissue Value: Roots vs. Whole Plant
aatttaggcttgttgagccaccgtgtgggcaaaaatatccaaaaacacaacacaagtgttgtcttctcgcgtctctcatcaacgagaaccagtttttttgttgatcctatcaacaatgacgaaaatagagcttcgagctttggggaacacagggcttaaggttagcgccgttggttttggtgcctctccgctcggaagtgtcttcggtccagtcgccgaagatgatgccgtcgccaccgtgcgcgaggctttccgtctcggtatcaacttcttcgacacctccccgtattatggaggaacactgtctgagaaaatgcttggtaagggactaaaggctttgcaagtccctagaagtgactacattgtggctactaagtgtggtagatataaagaaggttttgatttcagtgctgagagagtaagaaagagtattgacgagagcttggagaggcttcagcttgattatgttgacatacttcattgccatgacattgagttcgggtctcttgatcagattgtgagtgaaacaattcctgctcttcagaaactgaaacaagaggggaagacccggttcattggtatcactggtcttccgttagatattttcacttatgttcttgatcgagtgcctccagggactgtcgatgtgatattgtcatactgtcattacggcgttaatgattcgacgttgctggatttactaccttacttgaagagcaaaggtgtgggtgtgataagtgcttctccattagcaatgggcctccttacagaacaaggtcctcctgaatggcaccctgcttcccctgagctcaagtctgcaagcaaagccgcagttgctcactgcaaatcaaagggcaagaagatcacaaagttagctctgcaatacagtttagcaaacaaggagatttcgtcggtgttggttgggatgagctctgtctcacaggtagaagaaaatgttgcagcagttacagagcttgaaagtctggggatggatcaagaaactctgtctgaggttgaagctattctcgagcctgtaaagaatctgacatggccaagtggaatccatcagaactaaaagaagctctttgtgtttctggtaaactcttgtcttgcttcttgtaatgcttatgcattcgttgttgtgtcattgtgttaataagagtgtaagtttggttggtatgattaataaagtttcttagatatcaaaatcagtcggaaca

SEQ ID NO: 89070 - protein, 319 aa, Arabidopsis thaliana; identical to SEQ ID NO: 21407
  peptide (1)..(319): Ceres Seq. ID no. 12714934
  misc_feature (1)..(319): Homolog of NCBI NO: 15235040 NR Description: putative protein; protein id: At4g33670.1, by cDNA: gi_15215697, supported by cDNA: gi_19699263 [Arabidopsis
  misc_feature (1)..(318): Homolog of NCBI NO: 27728731 NR Description: galactose dehydrogenase [Actinidia deliciosa]
  misc_feature (1)..(319): Homolog of NCBI NO: 30267886 NR Description: L-galactose dehydrogenase [Malus x domestica]
  misc_feature (4)..(312): Homolog of NCBI NO: 29349022 NR Description: putative oxidoreductase [Bacteroides VPI- 5482] >gi|29340929|gb|AAO78719.1| putative oxidoreductase
  misc_feature (3)..(312): Homolog of NCBI NO: 24646155 NR Description: CG18547-PA [Drosophila melanogaster]
  misc_feature (1)..(319): Homolog of NCBI NO: 39594041 NR Description: Hypothetical protein CBG16615 [Caenorhabditis
  misc_feature (3)..(314): Homolog of NCBI NO: 24646159 NR Description: CG3397-PA [Drosophila melanogaster]
  misc_feature (1)..(319): Homolog of NCBI NO: 17553316 NR Description: Aldo keto reductase family [Caenorhabditis
  misc_feature (72)..(297): Homolog of NCBI NO: 24646157 NR Description: CG12224-PA [Drosophila melanogaster]
  misc_feature (42)..(259): Homolog of NCBI NO: 40742617 NR Description: hypothetical protein AN7621.2 [Aspergillus

SEQ ID NO: 89071 - protein, 253 aa, Arabidopsis thaliana; identical to SEQ ID NO: 21408
  peptide (1)..(253): Ceres Seq. ID no. 12714935
  misc_feature (1)..(253): Homolog of NCBI NO: 15235040 NR Description: putative protein; protein id: At4g33670.1, by cDNA: gi_15215697, supported by cDNA: gi_19699263 [Arabidopsis
  misc_feature (1)..(252): Homolog of NCBI NO: 27728731 NR Description: galactose dehydrogenase [Actinidia deliciosa]
  misc_feature (1)..(253): Homolog of NCBI NO: 30267886 NR Description: L-galactose dehydrogenase [Malus x domestica]
  misc_feature (1)..(246): Homolog of NCBI NO: 29349022 NR Description: putative oxidoreductase [Bacteroides VPI- 5482] >gi|29340929|gb|AAO78719.1| putative oxidoreductase
  misc_feature (1)..(246): Homolog of NCBI NO: 24646155 NR Description: CG18547-PA [Drosophila melanogaster]
  misc_feature (1)..(253): Homolog of NCBI NO: 39594041 NR Description: Hypothetical protein CBG16615 [Caenorhabditis
  misc_feature (1)..(248): Homolog of NCBI NO: 24646159 NR Description: CG3397-PA [Drosophila melanogaster]
  misc_feature (1)..(253): Homolog of NCBI NO: 17553316 NR Description: Aldo keto reductase family [Caenorhabditis
  misc_feature (6)..(231): Homolog of NCBI NO: 24646157 NR Description: CG12224-PA [Drosophila melanogaster]
  misc_feature (1)..(193): Homolog of NCBI NO: 40742617 NR Description: hypothetical protein AN7621.2 [Aspergillus

SEQ ID NO: 89072 - DNA, 1482 bp, Arabidopsis thaliana
  misc_feature (1)..(1482): Ceres Seq. ID no. 12714949
  misc_feature: MA Experiment ID: 108434 Result: Up-regulated in Transcription
  misc_feature: MA Experiment 108434 PARAMETER Experiment Name: At_Root_Tips_cDNA_P Parameter: Tissue Value: Root Tips
  misc_feature: MA Experiment ID: 108573 Result: Down-regulated in Transcription
  misc_feature: MA Experiment 108573 PARAMETER Experiment Name: At_Drought_cDNA_P Parameter: Timepoint (hr) Value: 6
  misc_feature: MA Experiment 108573 PARAMETER Experiment Name: At_Drought_cDNA_P Parameter: Tissue Value: Aerial
  misc_feature: MA Experiment 108573 PARAMETER Experiment Name: At_Drought_cDNA_P Parameter: Treatment Value: Drought vs. No Drought
atgtcgacagaaatggaggtcgttagtgttcttaagtaccttgacaacaaatccatattggtcgttggaactgctgggttcttagcaaatatctttgtggagaagatattaagggtggcaccaaacgtgaagaaactctatctccttctaagagcatcaaaaggaaaatctgctacccagaggtttaacgacgagattttgaagaaagatttgttcaaggtgctgaaggagaagtatggtcccaatctaaatcaacttacatcagagaaaatcactattgtcgacggagacatttgccttgaggatttaggtcttcaagacttcgacttggctcatgagatgatccaccaagttgatgccattgttaatttagctgcaactactaagtttgatgaaagatacgatgtagctcttgggatcaacacattgggtgctctcaatgtcttgaactttgccaagagatgtgcaaaggttaagatccttgttcatgtatcaacagcttacgtgtgcggagaaaaatctggcttgataatggaaacaccgtaccgtatgggtgagacgttgaatggaaccaccggtttagacatcaactacgagaaaaaattggttcaggagaaacttgaccagctccgagtaatcggagccgctcctgaaaccatcacggaaaccatgaaggatctcggactcagacgggcaaagatgtacggatggccaaacacatatgtgttcaccaaagcaatgggggagatgatggtagggacaaaaagagaaaatctgtcacttgtgttgcttcgtccttcaattattaccagcacattcaaagaaccatttcctggttggactgagggcatcaggactattgatagtttagctgttggatatggcaaaggcaaactcacgtgcttcctctgtgatcttgatgctgtttctgatgtgatgccggcagatatggtagtaaattcgattcttgtatcaatggccgctcaagccggtaaacaagaagagattatttaccatgtgggttcttcacttagaaatccgatgaaaaattcaaagtttcctgaattagcgtatcggtatttctcaatcaaaccgtggaccaacaaagaagggaaggtcgttaaggtcggggccattgagatcctgagttctatgcgtagtttccatagatacatgaccatacgctacttgattgcattgaagggacttgaattggtaaacataatactttgcaagttgtttgagaaggaatttcagtatttcaataagaaaataaattttatattccggcttgttgatctctatcagccttacctctttttctatggaatatttgatgattcaaacacagaaaaattgcgaaaaatggtatcgaagacgggagtcgaaaacgagatgttttatttcgatccaaaggttctcgattgggacgactattttttgaacacacatgttattgggctgcttaagtatgtcttctaa

SEQ ID NO: 89073 - protein, 493 aa, Arabidopsis thaliana
  peptide (1)..(493): Ceres Seq. ID no. 12714950
  misc_feature (291)..(493): Pfam Name: Male sterility protein Pfam Description: Male sterility protein
  misc_feature (1)..(493): Homolog of NCBI NO: 16323107 NR Description: AT4g33790/T16L1_280 [Arabidopsis thaliana]
  misc_feature (5)..(493): Homolog of NCBI NO: 25354587 NR Description: male sterility 2-like protein [imported] -
  misc_feature (31)..(493): Homolog of NCBI NO: 7487952 NR Description: male sterility protein 2 homolog T16L1.280 -
  misc_feature (114)..(493): Homolog of NCBI NO: 30689818 NR Description: male sterility 2-related protein [Arabidopsis
  misc_feature (6)..(492): Homolog of NCBI NO: 5020215 NR Description: acyl CoA reductase [Simmondsia chinensis]
  misc_feature (11)..(492): Homolog of NCBI NO: 15242260 NR Description: male sterility 2-like protein (emb|CAA68191.1); id: At5g22500.1, supported by cDNA: gi_14334737, supported by
  misc_feature (11)..(492): Homolog of NCBI NO: 11357157 NR Description: acyl CoA reductase-protein - Arabidopsis thaliana
  misc_feature (5)..(492): Homolog of NCBI NO: 35215152 NR Description: putative fatty acyl coA reductase [Oryza sativa
  misc_feature (9)..(373): Homolog of NCBI NO: 15229993 NR Description: acyl CoA reductase -like protein; protein id:
  misc_feature (417)..(492): Homolog of NCBI NO: 15229993 NR Description: acyl CoA reductase -like protein; protein id:
MSTEMEVVSVLKYLDNKSILVVGTAGFLANIFVEKILRVAPNVKKLYLLLRASKGKSATQRFNDEILKKDLFKVLKEKYGPNLNQLTSEKITIVDGDICLEDLGLQDFDLAHEMIHQVDAIVNLAATTKFDERYDVALGINTLGALNVLNFAKRCAKVKILVHVSTAYVCGEKSGLIMETPYRMGETLNGTTGLDINYEKKLVQEKLDQLRVIGAAPETITETMKDLGLRRAKMYGWPNTYVFTKAMGEMMVGTKRENLSLVLLRPSIITSTFKEPFPGWTEGIRTIDSLAVGYGKGKLTCFLCDLDAVSDVMPADMVVNSILVSMAAQAGKQEEIIYHVGSSLRNPMKNSKFPELAYRYFSIKPWTNKEGKVVKVGAIEILSSMRSFHRYMTIRYLIALKGLELVNIILCKLFEKEFQYFNKKINFIFRLVDLYQPYLFFYGIFDDSNTEKLRKMVSKTGVENEMFYFDPKVLDWDDYFLNTHVIGLLKYVF

SEQ ID NO: 89074 - protein, 489 aa, Arabidopsis thaliana
  peptide (1)..(489): Ceres Seq. ID no. 12714951
  misc_feature (287)..(489): Pfam Name: Male sterility protein Pfam Description: Male sterility protein
  misc_feature (1)..(489): Homolog of NCBI NO: 16323107 NR Description: AT4g33790/T16L1_280 [Arabidopsis thaliana]
  misc_feature (1)..(489): Homolog of NCBI NO: 25354587 NR Description: male sterility 2-like protein [imported] -
  misc_feature (27)..(489): Homolog of NCBI NO: 7487952 NR Description: male sterility protein 2 homolog T16L1.280 -
  misc_feature (110)..(489): Homolog of NCBI NO: 30689818 NR Description: male sterility 2-related protein [Arabidopsis
  misc_feature (2)..(488): Homolog of NCBI NO: 5020215 NR Description: acyl CoA reductase [Simmondsia chinensis]
  misc_feature (7)..(488): Homolog of NCBI NO: 15242260 NR Description: male sterility 2-like protein (emb|CAA68191.1); id: At5g22500.1, supported by cDNA: gi_14334737, supported by
  misc_feature (7)..(488): Homolog of NCBI NO: 11357157 NR Description: acyl CoA reductase-protein - Arabidopsis thaliana
  misc_feature (1)..(488): Homolog of NCBI NO: 35215152 NR Description: putative fatty acyl coA reductase [Oryza sativa
  misc_feature (5)..(369): Homolog of NCBI NO: 15229993 NR Description: acyl CoA reductase -like protein; protein id:
  misc_feature (413)..(488): Homolog of NCBI NO: 15229993 NR Description: acyl CoA reductase -like protein; protein id:
MEVVSVLKYLDNKSILVVGTAGFLANIFVEKILRVAPNVKKLYLLLRASKGKSATQRFNDEILKKDLFKVLKEKYGPNLNQLTSEKITIVDGDICLEDLGLQDFDLAHEMIHQVDAIVNLAATTKFDERYDVALGINTLGALNVLNFAKRCAKVKILVHVSTAYVCGEKSGLIMETPYRMGETLNGTTGLDINYEKKLVQEKLDQLRVIGAAPETITETMKDLGLRRAKMYGWPNTYVFTKAMGEMMVGTKRENLSLVLLRPSIITSTFKEPFPGWTEGIRTIDSLAVGYGKGKLTCFLCDLDAVSDVMPADMVVNSILVSMAAQAGKQEEIIYHVGSSLRNPMKNSKFPELAYRYFSIKPWTNKEGKVVKVGAIEILSSMRSFHRYMTIRYLIALKGLELVNIILCKLFEKEFQYFNKKINFIFRLVDLYQPYLFFYGIFDDSNTEKLRKMVSKTGVENEMFYFDPKVLDWDDYFLNTHVIGLLKYVF

SEQ ID NO: 89075 - protein, 380 aa, Arabidopsis thaliana; identical to SEQ ID NO: 27534
  peptide (1)..(380): Ceres Seq. ID no. 12714952
  misc_feature (178)..(380): Pfam Name: Male sterility protein Pfam Description: Male sterility protein
  misc_feature (1)..(380): Homolog of NCBI NO: 16323107 NR Description: AT4g33790/T16L1_280 [Arabidopsis thaliana]
  misc_feature (1)..(380): Homolog of NCBI NO: 25354587 NR Description: male sterility 2-like protein [imported] -
  misc_feature (1)..(380): Homolog of NCBI NO: 7487952 NR Description: male sterility protein 2 homolog T16L1.280 -
  misc_feature (1)..(380): Homolog of NCBI NO: 30689818 NR Description: male sterility 2-related protein [Arabidopsis
  misc_feature (1)..(379): Homolog of NCBI NO: 5020215 NR Description: acyl CoA reductase [Simmondsia chinensis]
  misc_feature (1)..(379): Homolog of NCBI NO: 15242260 NR Description: male sterility 2-like protein (emb|CAA68191.1); id: At5g22500.1, supported by cDNA: gi_14334737, supported by
  misc_feature (1)..(379): Homolog of NCBI NO: 11357157 NR Description: acyl CoA reductase-protein - Arabidopsis thaliana
  misc_feature (1)..(379): Homolog of NCBI NO: 35215152 NR Description: putative fatty acyl coA reductase [Oryza sativa
  misc_feature (1)..(260): Homolog of NCBI NO: 15229993 NR Description: acyl CoA reductase -like protein; protein id:
  misc_feature (304)..(379): Homolog of NCBI NO: 15229993 NR Description: acyl CoA reductase -like protein; protein id:

SEQ ID NO: 89076 - DNA, 1710 bp, Arabidopsis thaliana
  misc_feature (1)..(1710): Ceres Seq. ID no. 12714956
atgaagaacatcaacaatggcttcttcctctgcatgcttttactcctctggtgttttgtgcattcggggatttcaattgatcctttctccccaagcgactcactcaaaacagagtgtgtaatgaagcctccacgaagcagtgaaacgaaaggattattacaatttagccgctctgtcgaagatgactctgatgaagaatggaaaatagatggaagtggatccataagagaaatgacacagagaattcagcttcacgaaggaaacatttacagcttctctgcttgggtgaagttgagagaaggaaacaataagaaagtaggagttgtgtttaggacagaaaatggaagatttgttcatggaggtgaagttagggcaaagaaaagatgttggactttgcttaaaggtggcattgtgccagatgtttcaggctctgtagatattttcttcgagagtgatgacaaagaagcaaagatttctgcaagcgatgtgtccctgaaacagttcagtaaacaagaatggaaactgaaacaagaccaactaattgaaaagataaggaagagcaaggtgagatttgaagtaacttatcagaacaaaactgcggtaaaaggcgcagtgatatctatagaacaaaccaaaccatctttcctattaggctgcgcaatgaatttccggatcctacaaagcgaagggtacagaaattggtttgcgtcgcggtttaaaatcacatccttcaccaatgaaatgaaatggtatacaacggagaaagaacgtggtcacgagaactacacggcagctgattcaatgttaaaatttgcggaagagaatggaatattggttagaggtcatactgtgttgtgggatgaccctttaatgcagccaacttgggtgccaaaaatagaagatccaaacgatttgatgaatgtgacattgaaccggataaactcggttatgacgagatacaaagggaagttaaccgggtgggacgtggttaatgagaacgtgcattgggattactttgagaaaatgcttggtgccaacgcttcgtcaagtttctacaatttggcttttaagcttgatcctgatgtgacaatgttcgttaacgagtacaacacgatagagaaccgtgtagaggttaccgcgacgccggttaaggtgaaggagaagatggaggagattcttgcttacccaggtaacatgaacattaaaggagctattggagctcaaggtcactttcgtccaactcagcctaacttagcttacatgagatctgcattggatactttaggctcactaggtttgcctatctggcttacagaggttgatatgcctaagtgccctaatcaggaggtatacattgaagaaattttgagggaagcgtattcgcatcctgcggttaaaggcatcataatatttgctgggcctgaggtgtctggtttcgacaagctgacacttgcggacaaatacttcaacaacactgcaacaggagatgtaattgacaagttgctcaaggagtggcagcaatcttcagagattcccaagattttcatgacggattccgagaatgatgaagaagaggtctcattgttgcatggacattacaatgtgaatgtaagtcatccatggatgaagaacatgtcaaccagtttcagcttggaggtaactaaggagatgggtcagcgtcaggtggttagagttgtaattaatgcttga

SEQ ID NO: 89077 - protein, 569 aa, Arabidopsis thaliana
  peptide (1)..(569): Ceres Seq. ID no. 12714957
  misc_feature (206)..(502): Pfam Name: Glycosyl hydrolase family 10 Pfam Description: Glycosyl hydrolase family 10
  misc_feature (41)..(569): Homolog of NCBI NO: 15235098 NR Description: glycosyl hydrolase family 10; protein id:
  misc_feature (1)..(569): Homolog of NCBI NO: 22329138 NR Description: glycosyl hydrolase family 10; protein id: [Arabidopsis thaliana] >gi|27754330|gb|AAO22618.1| putative
  misc_feature (41)..(569): Homolog of NCBI NO: 25407718 NR Description: hypothetical protein AT4g33820 [imported] - thaliana >gi|7270331|emb|CAB80099.1| putative protein
  misc_feature (41)..(536): Homolog of NCBI NO: 7485608 NR Description: hypothetical protein F17I5.10 - Arabidopsis (fragment) >gi|4455150|emb|CAA19864.1| putative protein
  misc_feature (65)..(569): Homolog of NCBI NO: 34365757 NR Description: At2g14690 [Arabidopsis thaliana]
  misc_feature (142)..(569): Homolog of NCBI NO: 15225988 NR Description: glycosyl hydrolase family 10; protein id:
  misc_feature (9)..(556): Homolog of NCBI NO: 23429644 NR Description: endoxylanase [Carica papaya]
  misc_feature (78)..(556): Homolog of NCBI NO: 7485619 NR Description: hypothetical protein F17I5.30 - Arabidopsis >gi|3297808|emb|CAA19866.1| putative protein [Arabidopsis >gi|7270333|emb|CAB80101.1| putative protein [Arabidopsis
  misc_feature (78)..(556): Homolog of NCBI NO: 30689830 NR Description: glycosyl hydrolase family 10 [Arabidopsis
  misc_feature (78)..(556): Homolog of NCBI NO: 15235131 NR Description: glycosyl hydrolase family 10; protein id:
MKNINNGFFLCMLLLLWCFVHSGISIDPFSPSDSLKTECVMKPPRSSETKGLLQFSRSVEDDSDEEWKIDGSGSIREMTQRIQLHEGNIYSFSAWVKLREGNNKKVGVVFRTENGRFVHGGEVRAKKRCWTLLKGGIVPDVSGSVDIFFESDDKEAKISASDVSLKQFSKQEWKLKQDQLIEKIRKSKVRFEVTYQNKTAVKGAVISIEQTKPSFLLGCAMNFRILQSEGYRNWFASRFKITSFTNEMKWYTTEKERGHENYTAADSMLKFAEENGILVRGHTVLWDDPLMQPTWVPKIEDPNDLMNVTLNRINSVMTRYKGKLTGWDVVNENVHWDYFEKMLGANASSSFYNLAFKLDPDVTMFVNEYNTIENRVEVTATPVKVKEKMEEILAYPGNMNIKGAIGAQGHFRPTQPNLAYMRSALDTLGSLGLPIWLTEVDMPKCPNQEVYIEEILREAYSHPAVKGIIIFAGPEVSGFDKLTLADKYFNNTATGDVIDKLLKEWQQSSEIPKIFMTDSENDEEEVSLLHGHYNVNVSHPWMKNMSTSFSLEVTKEMGQRQVVRVVINA

SEQ ID NO: 89078 - protein, 558 aa, Arabidopsis thaliana
  peptide (1)..(558): Ceres Seq. ID no. 12714958
  misc_feature (195)..(491): Pfam Name: Glycosyl hydrolase family 10 Pfam Description: Glycosyl hydrolase family 10
  misc_feature (30)..(558): Homolog of NCBI NO: 15235098 NR Description: glycosyl hydrolase family 10; protein id:
  misc_feature (1)..(558): Homolog of NCBI NO: 22329138 NR Description: glycosyl hydrolase family 10; protein id: [Arabidopsis thaliana] >gi|27754330|gb|AAO22618.1| putative
  misc_feature (30)..(558): Homolog of NCBI NO: 25407718 NR Description: hypothetical protein AT4g33820 [imported] - thaliana >gi|7270331|emb|CAB80099.1| putative protein
  misc_feature (30)..(525): Homolog of NCBI NO: 7485608 NR Description: hypothetical protein F17I5.10 - Arabidopsis (fragment) >gi|4455150|emb|CAA19864.1| putative protein
  misc_feature (54)..(558): Homolog of NCBI NO: 34365757 NR Description: At2g14690 [Arabidopsis thaliana]
  misc_feature (131)..(558): Homolog of NCBI NO: 15225988 NR Description: glycosyl hydrolase family 10; protein id:
  misc_feature (1)..(545): Homolog of NCBI NO: 23429644 NR Description: endoxylanase [Carica papaya]
  misc_feature (67)..(545): Homolog of NCBI NO: 7485619 NR Description: hypothetical protein F17I5.30 - Arabidopsis >gi|3297808|emb|CAA19866.1| putative protein [Arabidopsis >gi|7270333|emb|CAB80101.1| putative protein [Arabidopsis
  misc_feature (67)..(545): Homolog of NCBI NO: 30689830 NR Description: glycosyl hydrolase family 10 [Arabidopsis
  misc_feature (67)..(545): Homolog of NCBI NO: 15235131 NR Description: glycosyl hydrolase family 10; protein id:
MLLLLWCFVHSGISIDPFSPSDSLKTECVMKPPRSSETKGLLQFSRSVEDDSDEEWKIDGSGSIREMTQRIQLHEGNIYSFSAWVKLREGNNKKVGVVFRTENGRFVHGGEVRAKKRCWTLLKGGIVPDVSGSVDIFFESDDKEAKISASDVSLKQFSKQEWKLKQDQLIEKIRKSKVRFEVTYQNKTAVKGAVISIEQTKPSFLLGCAMNFRILQSEGYRNWFASRFKITSFTNEMKWYTTEKERGHENYTAADSMLKFAEENGILVRGHTVLWDDPLMQPTWVPKIEDPNDLMNVTLNRINSVMTRYKGKLTGWDVVNENVHWDYFEKMLGANASSSFYNLAFKLDPDVTMFVNEYNTIENRVEVTATPVKVKEKMEEILAYPGNMNIKGAIGAQGHFRPTQPNLAYMRSALDTLGSLGLPIWLTEVDMPKCPNQEVYIEEILREAYSHPAVKGIIIFAGPEVSGFDKLTLADKYFNNTATGDVIDKLLKEWQQSSEIPKIFMTDSENDEEEVSLLHGHYNVNVSHPWMKNMSTSFSLEVTKEMGQRQVVRVVINA

SEQ ID NO: 89079 - protein, 529 aa, Arabidopsis thaliana
  peptide (1)..(529): Ceres Seq. ID no. 12714959
  misc_feature (166)..(462): Pfam Name: Glycosyl hydrolase family 10 Pfam Description: Glycosyl hydrolase family 10
  misc_feature (1)..(529): Homolog of NCBI NO: 15235098 NR Description: glycosyl hydrolase family 10; protein id:
  misc_feature (1)..(529): Homolog of NCBI NO: 22329138 NR Description: glycosyl hydrolase family 10; protein id: [Arabidopsis thaliana] >gi|27754330|gb|AAO22618.1| putative
  misc_feature (1)..(529): Homolog of NCBI NO: 25407718 NR Description: hypothetical protein AT4g33820 [imported] - thaliana >gi|7270331|emb|CAB80099.1| putative protein
  misc_feature (1)..(496): Homolog of NCBI NO: 7485608 NR Description: hypothetical protein F17I5.10 - Arabidopsis (fragment) >gi|4455150|emb|CAA19864.1| putative protein
  misc_feature (25)..(529): Homolog of NCBI NO: 34365757 NR Description: At2g14690 [Arabidopsis thaliana]
  misc_feature (102)..(529): Homolog of NCBI NO: 15225988 NR Description: glycosyl hydrolase family 10; protein id:
  misc_feature (1)..(516): Homolog of NCBI NO: 23429644 NR Description: endoxylanase [Carica papaya]
  misc_feature (38)..(516): Homolog of NCBI NO: 7485619 NR Description: hypothetical protein F17I5.30 - Arabidopsis >gi|3297808|emb|CAA19866.1| putative protein [Arabidopsis >gi|7270333|emb|CAB80101.1| putative protein [Arabidopsis
  misc_feature (38)..(516): Homolog of NCBI NO: 30689830 NR Description: glycosyl hydrolase family 10 [Arabidopsis
  misc_feature (38)..(516): Homolog of NCBI NO: 15235131 NR Description: glycosyl hydrolase family 10; protein id:
MKPPRSSETKGLLQFSRSVEDDSDEEWKIDGSGSIREMTQRIQLHEGNIYSFSAWVKLREGNNKKVGVVFRTENGRFVHGGEVRAKKRCWTLLKGGIVPDVSGSVDIFFESDDKEAKISASDVSLKQFSKQEWKLKQDQLIEKIRKSKVRFEVTYQNKTAVKGAVISIEQTKPSFLLGCAMNFRILQSEGYRNWFASRFKITSFTNEMKWYTTEKERGHENYTAADSMLKFAEENGILVRGHTVLWDDPLMQPTWVPKIEDPNDLMNVTLNRINSVMTRYKGKLTGWDVVNENVHWDYFEKMLGANASSSFYNLAFKLDPDVTMFVNEYNTIENRVEVTATPVKVKEKMEEILAYPGNMNIKGAIGAQGHFRPTQPNLAYMRSALDTLGSLGLPIWLTEVDMPKCPNQEVYIEEILREAYSHPAVKGIIIFAGPEVSGFDKLTLADKYFNNTATGDVIDKLLKEWQQSSEIPKIFMTDSENDEEEVSLLHGHYNVNVSHPWMKNMSTSFSLEVTKEMGQRQVVRVVINA

SEQ ID NO: 89080 - DNA, 2271 bp, Arabidopsis thaliana
  misc_feature (1)..(2271): Ceres Seq. ID no. 12715026
  misc_feature: MA Experiment ID: 20000314 Result: Up-regulated in Transcription
  misc_feature: MA Experiment 20000314 PARAMETER Experiment Name: At_14day_Shoots-Roots_Sub_P Parameter: Age (day) Value: 14
  misc_feature: MA Experiment 20000314 PARAMETER Experiment Name: At_14day_Shoots-Roots_Sub_P Parameter: Organism Value: A. thaliana
  misc_feature: MA Experiment 20000314 PARAMETER Experiment Name: At_14day_Shoots-Roots_Sub_P Parameter: Plant Line Value: WS
  misc_feature: MA Experiment 20000314 PARAMETER Experiment Name: At_14day_Shoots-Roots_Sub_P Parameter: Tissue Value: Roots vs. Whole Plant
atgacttccaacagaagcaacctcctgttctcattagtcctcttccactttctttttgtccccacacaactccaagctcttaacactgatggtgttcttctgcttactttcaaatactccatcctcactgaccctctctctgttctacgcaattggaactatgatgatgcaacaccatgcttgtggacaggtgtcacatgtacagagcttgggaagcctaacacaccagacatgttcagagtcacaagcttggtacttcccaacaaacaccttttgggttccatcactccggacttgttctcgattccatatctaaggatcttggatctgtctagcaatttcttcaacgggtcactcccggactcggtgttcaacgccactgagcttcagagtatctcccttggaagcaacaatctctctggtgatttgcccaagagtgtcaacagtgtgactaatctccagctcttgaatctctcagctaacgcatttactggcgaaattccgctcaacatctcacttctgaagaatctaacggtcgtttccttgtcaaaaaacaccttttcaggtgatattccaagtggtttcgaagcagcacagattcttgatctttcttcaaatcttctcaacggctctcttcccaaggatttgggaggaaaaagcctgcattacttgaacttatcacacaacaaagtcctcggcgagatttctccaaattttgcagagaagtttccagcaaatgccacagtcgatctctcctttaacaacctcacaggcccaatcccaagttccctttctttacttaaccaaaaggctgagtctttttccggtaaccaagagctttgtgggaagccattgaagatcctttgttcaattccttccactctttcaaaccctccaaatatctctgaaactacttcaccagcaatagcagttaaaccaagaagtacagctccaataaaccctttgacagaaaaaccaaatcagacaggaaaaagcaagctaaagccaagcaccattgccgcaatcacagttgcagatatagttggtctagctttcattggtctactcgtgctctacgtataccaagtcaggaaacgcagaaggtacccagaatctagcaaatttagcttcttcaagttctgtctggagaaaaacgaagccaagaaatcgaaaccaagcaccactgaggtcacagtcccagaatcaccagaggccaaaacgacatgcggttcatgcattatcttgaccggaggaaggtacgacgagacatcgacatcagagagcgacgtagagaatcaacaaaccgttcaggcattcactcgaacagatggtgggcaactgaagcagagctcccaaactcaattggttacagtcgacggcgagactcggctagatctagacactctgctaaaggcatctgcttacatattgggaaccaccggaaccgggatcgtgtataaggcggtgctggagaacggcacggcattcgcggtgaggcggatcgagacggagagctgtgcggctgcgaaacccaaggaattcgagagggaggttcgtgccatcgctaagcttcgtcacccaaatctcgtcagaattcgtgggttctgctggggagacgacgagaaacttctcatttccgattatgttcccaatggcagcctcctctgtttcttcaccgccactaaggcaagctcaagctcatcttcttcgtcgtcattacaaaaccctcttacttttgaagcacggctcaagatagcaagaggaatggctagaggactatcttacatcaatgagaagaaacaagtgcacggtaacatcaagcccaataacattctcttgaacgctgagaatgagcccatcatcaccgatttagggctagaccgcctcatgacaccagcgcgtgaatctcacaccactggaccaacttcgagctcaccgtaccagccaccggaatggtccacaagcctgaaaccaaaccctaaatgggacgtttactcctttggcgtcatacttttagaacttctcacaagcaaagtgttctcggtagatcatgatatagatcagttctcaaacttatccgactctgcagcggaagagaatggccggttcttgaggttaatcgacggtgcaattaggagtgatgtcgctcgccatgaggatgctgcaatggcgtgctttaggttagggattgaatgtgtctcttccttgcctcagaagcgaccatccatgaaagaattggtgcaatttgatttcttaattcgtatagcctaa

SEQ ID NO: 89081 - protein, 756 aa, Arabidopsis thaliana
  peptide (1)..(756): Ceres Seq. ID no. 12715027
  misc_feature (1)..(748): Homolog of NCBI NO: 15226084 NR Description: leucine-rich repeat transmembrane protein kinase, protein id: At2g15300.1 [Arabidopsis thaliana]
  misc_feature (9)..(745): Homolog of NCBI NO: 25387059 NR Description: receptor kinase-like protein [imported] -
  misc_feature (9)..(745): Homolog of NCBI NO: 30690913 NR Description: leucine rich repeat protein family [Arabidopsis
  misc_feature (9)..(745): Homolog of NCBI NO: 18086496 NR Description: AT4g37250/C7A10_110 [Arabidopsis thaliana]
  misc_feature (2)..(555): Homolog of NCBI NO: 15227808 NR Description: leucine-rich repeat transmembrane protein kinase, protein id: At2g23300.1 [Arabidopsis thaliana]
  misc_feature (628)..(750): Homolog of NCBI NO: 15227808 NR Description: leucine-rich repeat transmembrane protein kinase, protein id: At2g23300.1 [Arabidopsis thaliana]
  misc_feature (9)..(748): Homolog of NCBI NO: 15240265 NR Description: leucine-rich repeat transmembrane protein kinase, protein id: At5g67280.1, supported by cDNA: 110712., supported by
  misc_feature (448)..(753): Homolog of NCBI NO: 15219755 NR Description: leucine-rich repeat transmembrane protein kinase, protein id: At1g66830.1 [Arabidopsis thaliana]
  misc_feature (8)..(301): Homolog of NCBI NO: 15219755 NR Description: leucine-rich repeat transmembrane protein kinase, protein id: At1g66830.1 [Arabidopsis thaliana]
  misc_feature (13)..(393): Homolog of NCBI NO: 18395641 NR Description: leucine-rich repeat transmembrane protein kinase, protein id: At1g25320.1, supported by cDNA: gi_15912326
MTSNRSNLLFSLVLFHFLFVPTQLQALNTDGVLLLTFKYSILTDPLSVLRNWNYDDATPCLWTGVTCTELGKPNTPDMFRVTSLVLPNKHLLGSITPDLFSIPYLRILDLSSNFFNGSLPDSVFNATELQSISLGSNNLSGDLPKSVNSVTNLQLLNLSANAFTGEIPLNISLLKNLTVVSLSKNTFSGDIPSGFEAAQILDLSSNLLNGSLPKDLGGKSLHYLNLSHNKVLGEISPNFAEKFPANATVDLSFNNLTGPIPSSLSLLNQKAESFSGNQELCGKPLKILCSIPSTLSNPPNISETTSPAIAVKPRSTAPINPLTEKPNQTGKSKLKPSTIAAITVADIVGLAFIGLLVLYVYQVRKRRRYPESSKFSFFKFCLEKNEAKKSKPSTTEVTVPESPEAKTTCGSCIILTGGRYDETSTSESDVENQQTVQAFTRTDGGQLKQSSQTQLVTVDGETRLDLDTLLKASAYILGTTGTGIVYKAVLENGTAFAVRRIETESCAAAKPKEFEREVRAIAKLRHPNLVRIRGFCWGDDEKLLISDYVPNGSLLCFFTATKASSSSSSSSSLQNPLTFEARLKIARGMARGLSYINEKKQVHGNIKPNNILLNAENEPIITDLGLDRLMTPARESHTTGPTSSSPYQPPEWSTSLKPNPKWDVYSFGVILLELLTSKVFSVDHDIDQFSNLSDSAAEENGRFLRLIDGAIRSDVARHEDAAMACFRLGIECVSSLPQKRPSMKELVQFDFLIRIA

SEQ ID NO: 89082 - protein, 679 aa, Arabidopsis thaliana
  peptide (1)..(679): Ceres Seq. ID no. 12715028
  misc_feature (1)..(671): Homolog of NCBI NO: 15226084 NR Description: leucine-rich repeat transmembrane protein kinase, protein id: At2g15300.1 [Arabidopsis thaliana]
  misc_feature (1)..(668): Homolog of NCBI NO: 25387059 NR Description: receptor kinase-like protein [imported] -
  misc_feature (1)..(668): Homolog of NCBI NO: 30690913 NR Description: leucine rich repeat protein family [Arabidopsis
  misc_feature (1)..(668): Homolog of NCBI NO: 18086496 NR Description: AT4g37250/C7A10_110 [Arabidopsis thaliana]
  misc_feature (1)..(478): Homolog of NCBI NO: 15227808 NR Description: leucine-rich repeat transmembrane protein kinase, protein id: At2g23300.1 [Arabidopsis thaliana]
  misc_feature (551)..(673): Homolog of NCBI NO: 15227808 NR Description: leucine-rich repeat transmembrane protein kinase, protein id: At2g23300.1 [Arabidopsis thaliana]
  misc_feature (1)..(671): Homolog of NCBI NO: 15240265 NR Description: leucine-rich repeat transmembrane protein kinase, protein id: At5g67280.1, supported by cDNA: 110712., supported by
  misc_feature (371)..(676): Homolog of NCBI NO: 15219755 NR Description: leucine-rich repeat transmembrane protein kinase, protein id: At1g66830.1 [Arabidopsis thaliana]
  misc_feature (1)..(224): Homolog of NCBI NO: 15219755 NR Description: leucine-rich repeat transmembrane protein kinase, protein id: At1g66830.1 [Arabidopsis thaliana]
  misc_feature (1)..(316): Homolog of NCBI NO: 18395641 NR Description: leucine-rich repeat transmembrane protein kinase, protein id: At1g25320.1, supported by cDNA: gi_15912326
MFRVTSLVLPNKHLLGSITPDLFSIPYLRILDLSSNFFNGSLPDSVFNATELQSISLGSNNLSGDLPKSVNSVTNLQLLNLSANAFTGEIPLNISLLKNLTVVSLSKNTFSGDIPSGFEAAQILDLSSNLLNGSLPKDLGGKSLHYLNLSHNKVLGEISPNFAEKFPANATVDLSFNNLTGPIPSSLSLLNQKAESFSGNQELCGKPLKILCSIPSTLSNPPNISETTSPAIAVKPRSTAPINPLTEKPNQTGKSKLKPSTIAAITVADIVGLAFIGLLVLYVYQVRKRRRYPESSKFSFFKFCLEKNEAKKSKPSTTEVTVPESPEAKTTCGSCIILTGGRYDETSTSESDVENQQTVQAFTRTDGGQLKQSSQTQLVTVDGETRLDLDTLLKASAYILGTTGTGIVYKAVLENGTAFAVRRIETESCAAAKPKEFEREVRAIAKLRHPNLVRIRGFCWGDDEKLLISDYVPNGSLLCFFTATKASSSSSSSSSLQNPLTFEARLKIARGMARGLSYINEKKQVHGNIKPNNILLNAENEPIITDLGLDRLMTPARESHTTGPTSSSPYQPPEWSTSLKPNPKWDVYSFGVILLELLTSKVFSVDHDIDQFSNLSDSAAEENGRFLRLIDGAIRSDVARHEDAAMACFRLGIECVSSLPQKRPSMKELVQFDFLIRIA

SEQ ID NO: 89083 - DNA, 1971 bp, Arabidopsis thaliana
  misc_feature (1)..(1971): Ceres Seq. ID no. 12715074
  misc_feature: MA Experiment ID: 20001910 Result: Up-regulated in Transcription
  misc_feature: MA Experiment 20001910 PARAMETER Experiment Name: At_Drought_Reproduction_P Parameter: Age (day) Value: 37
  misc_feature: MA Experiment 20001910 PARAMETER Experiment Name: At_Drought_Reproduction_P Parameter: Organism Value: A. thaliana
  misc_feature: MA Experiment 20001910 PARAMETER Experiment Name: At_Drought_Reproduction_P Parameter: Plant Line Value: WS
  misc_feature: MA Experiment 20001910 PARAMETER Experiment Name: At_Drought_Reproduction_P Parameter: Timepoint (day) Value: 7
  misc_feature: MA Experiment 20001910 PARAMETER Experiment Name: At_Drought_Reproduction_P Parameter: Tissue Value: Flowers
  misc_feature: MA Experiment 20001910 PARAMETER Experiment Name: At_Drought_Reproduction_P Parameter: Treatment Value: Drought vs. No Drought
atggcggactcaccggtggattcatctcctgcccctgaaacctcaaatgggacaccaccgtcaaacggaacatcgccgtctaatgagtcatcgccgccaacaccaccttcttcaccaccaccatcatcaatatctgctcctccgccagatatctccgcttctttttcaccgccgcctgcaccaccaacgcaagaaacgtcacctcctacatctccgtcctcatcgccgcctgttgtagctaatccgtcaccgcagactccagagaatccttctccacctgcacctgaaggctcaactcctgtaacgccacctgcaccaccacaaacaccgtcgaaccaatcaccggaaagaccaactcctccttctcctggtgccaatgatgaccgaaacagaaccaatggcggaaacaacaacagagacggctccacaccatcaccaccgtcgtcagggaacagaacttccggtgacggtggctcaccttcaccacctcggtcgataagccctcctcagaatagtggagattcagactcatcatcggtgtgtatttgcatctgttgcaacaggaagaagaagaagaaatctcctcaggtcaaccacatgcactactacaataacaatccttatggaggagcaccctcaggtaatggtggttattacaagggaacacctcaagatcatgtggtgaatatggctggtcaaggaggtgggaattggggtccacagcaacctgtgtctggtcctcacagtgatgcttccaacttaaccggtcgaactgctataccgtcacctcaagctgcaactcttggtcacaaccaaagcactttcacatacgatgaactgtccattgcaacagaaggtttcgctcagtcaaatttgctaggacaaggaggatttgggtatgttcataaaggagttctgcctagtggcaaagaagttgcagtgaagagtcttaaacttggaagtggacaaggggaacgcgagtttcaagcagaggttgatatcattagccgtgtccatcatcgtcatctcgtttctcttgttggatattgcatctctggtggtcaaagacttttggtttatgagtttatacctaacaacactcttgaatttcatcttcatggaaagggtcgtccggttttggattggcctacaagagtgaagattgcattgggatcagctagaggccttgcatatttgcatgaagactgtcaccctcgcattatccacagagatatcaaagctgcaaacattcttcttgatttcagttttgagaccaaggtggcagattttggattggctaagctatctcaagacaactatactcatgtctccactcgcgtcatgggaacttttggatacttagctccagagtatgcatcaagcggaaagttatccgacaaatctgatgttttctcatttggagtaatgcttcttgagctcataaccggaagacctcctctggatctaactggagaaatggaagatagcttggtagattgggcaaggcctttgtgtttgaaagcagctcaagatggagattacaaccaattggctgatccacgtctagagctaaactacagtcatcaagagatggttcaaatggcttcttgtgcagctgcagcaatcagacattcagcaagaagacggcctaagatgagccaggttcaaaaactcataccacttgttggttctattattgtacgagcactagaaggagatatgtcaatggatgatctaagtgagggaacaagaccaggacaaagcacgtacttgagccccgggagcgtgagctcagagtatgacgcaagctcgtacacggcagacatgaaaaagttcaagaaactggcgttagagaataaagaatatcaaagcagtgaatatggtggaacaagtgagtatggcttaaacccttctgcttcaagtagtgaagaaatgaatagaggctcaatgaaacgcaatcctcagctttga

SEQ ID NO: 89084 - protein, 656 aa, Arabidopsis thaliana
  peptide (1)..(656): Ceres Seq. ID no. 12715075
  misc_feature (4)..(656): Homolog of NCBI NO: 7488206 NR Description: probable serine/threonine-specific protein kinase
  misc_feature (8)..(656): Homolog of NCBI NO: 30690042 NR Description: serine threonine protein kinase -related thaliana] >gi|26452004|dbj|BAC43092.1| putative serine/threonine kinase [Arabidopsis thaliana] >gi|29029022|gb|AAO64890.1|
  misc_feature (1)..(403): Homolog of NCBI NO: 7488206 NR Description: probable serine/threonine-specific protein kinase
  misc_feature (204)..(653): Homolog of NCBI NO: 15230209 NR Description: protein kinase, putative; protein id: At3g18810.1
  misc_feature (11)..(179): Homolog of NCBI NO: 15230209 NR Description: protein kinase, putative; protein id: At3g18810.1
  misc_feature (71)..(237): Homolog of NCBI NO: 15230209 NR Description: protein kinase, putative; protein id: At3g18810.1
  misc_feature (204)..(653): Homolog of NCBI NO: 9293906 NR Description: somatic embryogenesis receptor kinase-like
  misc_feature (11)..(179): Homolog of NCBI NO: 9293906 NR Description: somatic embryogenesis receptor kinase-like
  misc_feature (201)..(648): Homolog of NCBI NO: 15222081 NR Description: hypothetical protein; protein id: At1g49270.1
  misc_feature (4)..(269): Homolog of NCBI NO: 15222081 NR Description: hypothetical protein; protein id: At1g49270.1
MADSPVDSSPAPETSNGTPPSNGTSPSNESSPPTPPSSPPPSSISAPPPDISASFSPPPAPPTQETSPPTSPSSSPPVVANPSPQTPENPSPPAPEGSTPVTPPAPPQTPSNQSPERPTPPSPGANDDRNRTNGGNNNRDGSTPSPPSSGNRTSGDGGSPSPPRSISPPQNSGDSDSSSVCICICCNRKKKKKSPQVNHMHYYNNNPYGGAPSGNGGYYKGTPQDHVVNMAGQGGGNWGPQQPVSGPHSDASNLTGRTAIPSPQAATLGHNQSTFTYDELSIATEGFAQSNLLGQGGFGYVHKGVLPSGKEVAVKSLKLGSGQGEREFQAEVDIISRVHHRHLVSLVGYCISGGQRLLVYEFIPNNTLEFHLHGKGRPVLDWPTRVKIALGSARGLAYLHEDCHPRIIHRDIKAANILLDFSFETKVADFGLAKLSQDNYTHVSTRVMGTFGYLAPEYASSGKLSDKSDVFSFGVMLLELITGRPPLDLTGEMEDSLVDWARPLCLKAAQDGDYNQLADPRLELNYSHQEMVQMASCAAAAIRHSARRRPKMSQVQKLIPLVGSIIVRALEGDMSMDDLSEGTRPGQSTYLSPGSVSSEYDASSYTADMKKFKKLALENKEYQSSEYGGTSEYGLNPSASSSEEMNRGSMKRNPQL

SEQ ID NO: 89085 - protein, 457 aa, Arabidopsis thaliana
  peptide (1)..(457): Ceres Seq. ID no. 12715076
  misc_feature (1)..(457): Homolog of NCBI NO: 7488206 NR Description: probable serine/threonine-specific protein kinase
  misc_feature (1)..(457): Homolog of NCBI NO: 30690042 NR Description: serine threonine protein kinase -related thaliana] >gi|26452004|dbj|BAC43092.1| putative serine/threonine kinase [Arabidopsis thaliana] >gi|29029022|gb|AAO64890.1|
  misc_feature (1)..(204): Homolog of NCBI NO: 7488206 NR Description: probable serine/threonine-specific protein kinase
  misc_feature (5)..(454): Homolog of NCBI NO: 15230209 NR Description: protein kinase, putative; protein id: At3g18810.1
  misc_feature (1)..(38): Homolog of NCBI NO: 15230209 NR Description: protein kinase, putative; protein id: At3g18810.1
  misc_feature (5)..(454): Homolog of NCBI NO: 9293906 NR Description: somatic embryogenesis receptor kinase-like
  misc_feature (2)..(449): Homolog of NCBI NO: 15222081 NR Description: hypothetical protein; protein id: At1g49270.1
  misc_feature (1)..(70): Homolog of NCBI NO: 15222081 NR Description: hypothetical protein; protein id: At1g49270.1
  misc_feature (1)..(38): Homolog of NCBI NO: 9293906 NR Description: somatic embryogenesis receptor kinase-like
  misc_feature (1)..(456): Homolog of NCBI NO: 13447449 NR Description: receptor protein kinase PERK1 [Brassica napus]
MHYYNNNPYGGAPSGNGGYYKGTPQDHVVNMAGQGGGNWGPQQPVSGPHSDASNLTGRTAIPSPQAATLGHNQSTFTYDELSIATEGFAQSNLLGQGGFGYVHKGVLPSGKEVAVKSLKLGSGQGEREFQAEVDIISRVHHRHLVSLVGYCISGGQRLLVYEFIPNNTLEFHLHGKGRPVLDWPTRVKIALGSARGLAYLHEDCHPRIIHRDIKAANILLDFSFETKVADFGLAKLSQDNYTHVSTRVMGTFGYLAPEYASSGKLSDKSDVFSFGVMLLELITGRPPLDLTGEMEDSLVDWARPLCLKAAQDGDYNQLADPRLELNYSHQEMVQMASCAAAAIRHSARRRPKMSQVQKLIPLVGSIIVRALEGDMSMDDLSEGTRPGQSTYLSPGSVSSEYDASSYTADMKKFKKLALENKEYQSSEYGGTSEYGLNPSASSSEEMNRGSMKRNPQL

SEQ ID NO: 89086 - protein, 427 aa, Arabidopsis thaliana
  peptide (1)..(427): Ceres Seq. ID no. 12715077
  misc_feature (1)..(427): Homolog of NCBI NO: 7488206 NR Description: probable serine/threonine-specific protein kinase
  misc_feature (1)..(427): Homolog of NCBI NO: 30690042 NR Description: serine threonine protein kinase -related thaliana] >gi|26452004|dbj|BAC43092.1| putative serine/threonine kinase [Arabidopsis thaliana] >gi|29029022|gb|AAO64890.1|
  misc_feature (1)..(174): Homolog of NCBI NO: 7488206 NR Description: probable serine/threonine-specific protein kinase
  misc_feature (1)..(424): Homolog of NCBI NO: 15230209 NR Description: protein kinase, putative; protein id: At3g18810.1
  misc_feature (1)..(424): Homolog of NCBI NO: 9293906 NR Description: somatic embryogenesis receptor kinase-like
  misc_feature (1)..(419): Homolog of NCBI NO: 15222081 NR Description: hypothetical protein; protein id: At1g49270.1
  misc_feature (1)..(40): Homolog of NCBI NO: 15222081 NR Description: hypothetical protein; protein id: At1g49270.1
  misc_feature (1)..(426): Homolog of NCBI NO: 13447449 NR Description: receptor protein kinase PERK1 [Brassica napus]
  misc_feature (1)..(402): Homolog of NCBI NO: 15224182 NR Description: putative protein kinase; protein id: At2g18470.1
  misc_feature (1)..(426): Homolog of NCBI NO: 13877617 NR Description: protein kinase-like protein [Arabidopsis thaliana]
MAGQGGGNWGPQQPVSGPHSDASNLTGRTAIPSPQAATLGHNQSTFTYDELSIATEGFAQSNLLGQGGFGYVHKGVLPSGKEVAVKSLKLGSGQGEREFQAEVDIISRVHHRHLVSLVGYCISGGQRLLVYEFIPNNTLEFHLHGKGRPVLDWPTRVKIALGSARGLAYLHEDCHPRIIHRDIKAANILLDFSFETKVADFGLAKLSQDNYTHVSTRVMGTFGYLAPEYASSGKLSDKSDVFSFGVMLLELITGRPPLDLTGEMEDSLVDWARPLCLKAAQDGDYNQLADPRLELNYSHQEMVQMASCAAAAIRHSARRRPKMSQVQKLIPLVGSIIVRALEGDMSMDDLSEGTRPGQSTYLSPGSVSSEYDASSYTADMKKFKKLALENKEYQSSEYGGTSEYGLNPSASSSEEMNRGSMKRNPQL

SEQ ID NO: 89087 - DNA, 921 bp, Arabidopsis thaliana
  misc_feature (1)..(921): Ceres Seq. ID no. 12715098
  misc_feature: MA Experiment ID: 20000307 Result: Up-regulated in Transcription
  misc_feature: MA Experiment 20000307 PARAMETER Experiment Name: At_Germinating_Seeds_Sub_P Parameter: Age (hr) Value: 24 vs. 0
  misc_feature: MA Experiment 20000307 PARAMETER Experiment Name: At_Germinating_Seeds_Sub_P Parameter: Organism Value: A. thaliana
  misc_feature: MA Experiment 20000307 PARAMETER Experiment Name: At_Germinating_Seeds_Sub_P Parameter: Plant Line Value: WS
  misc_feature: MA Experiment 20000307 PARAMETER Experiment Name: At_Germinating_Seeds_Sub_P Parameter: Tissue Value: Germinating Seeds
  misc_feature: MA Experiment ID: 20000315 Result: Down-regulated in Transcription
  misc_feature: MA Experiment 20000315 PARAMETER Experiment Name: At_14day_Shoots-Roots_Sub_P Parameter: Age (day) Value: 14
  misc_feature: MA Experiment 20000315 PARAMETER Experiment Name: At_14day_Shoots-Roots_Sub_P Parameter: Organism Value: A. thaliana
  misc_feature: MA Experiment 20000315 PARAMETER Experiment Name: At_14day_Shoots-Roots_Sub_P Parameter: Plant Line Value: WS
  misc_feature: MA Experiment 20000315 PARAMETER Experiment Name: At_14day_Shoots-Roots_Sub_P Parameter: Tissue Value: Shoots vs. Whole Plant
atggaggaggagaagaagaagagcagagttttgatcatcggagcaacaggaagattagggaactatttgacccgtttcagcatcgaatcgggtcacccgactttcgctctcatcagaaacaccactctctccgataagctgaaatctctctccgacgccggcgttaccctcctcaaaggttcattggaggatgaaggaagcttagcagaagcagtgagtaaagtagatgtggtgatctctgcaattccatcaaaacatgttcttgatcagaaactcctcgtcagagttatcaaacaagctggttccatcaagaggtttattcctgctgaatatggagcaaatcctgataaaactcaagtctcggatcttgatcatgacttctattcgaagaaatcagagattaggcatatgatagaatcagaggggattccatatacatacatttgctgcggactgttcatgagagttctacttccatcgcttgtgcaaccggggcttcaatctcctccaacagataaagtcacagtttttggagatggaaacgttaaagctgttttcgtgaatgatgtcgatgttgcagcatttactatcaagacgatagatgatcctcgaacactgaataagaccttgtaccttagcccgcccggaaacatatgttccatgaatgatcttgtcgagctctgggagggcaagattgagaagaagcttgagaaaacgtttgctacagagaatcaacttctcaagaagatcaaagaaactccatatccggataacatggagatggtattcatatactctgtctttatcaaaggagatcacacatacttcgacatcgagtcttgtggtggagtgaatggtactgagctttaccctgatgtcaaatacatgaccgtgagcgagtttcttgatactcttctctag

SEQ ID NO: 89088 - protein, 306 aa, Arabidopsis thaliana
  peptide (1)..(306): Ceres Seq. ID no. 12715099
  misc_feature (5)..(306): Pfam Name: Isoflavone reductase Pfam Description: Isoflavone reductase
  misc_feature (1)..(306): Homolog of NCBI NO: 15236146 NR Description: isoflavone reductase family; protein id:
  misc_feature (6)..(302): Homolog of NCBI NO: 7578895 NR Description: phenylcoumaran benzylic ether reductase homolog
  misc_feature (6)..(302): Homolog of NCBI NO: 18410820 NR Description: isoflavone reductase homolog P3; protein id: supported by cDNA: 11944., supported by cDNA: gi_17529217
  misc_feature (7)..(302): Homolog of NCBI NO: 10764491 NR Description: allergenic isoflavone reductase-like protein Bet
  misc_feature (6)..(302): Homolog of NCBI NO: 25344798 NR Description: probable NADPH oxidoreductase, 14094-12769 - Arabidopsis thaliana >gi|10092264|gb|AAG12677.1|AC025814_1
  misc_feature (7)..(298): Homolog of NCBI NO: 7484603 NR Description: 2'-hydroxyisoflavone reductase (EC 1.3.1.45) -
  misc_feature (8)..(302): Homolog of NCBI NO: 7578909 NR Description: phenylcoumaran benzylic ether reductase homolog
  misc_feature (7)..(298): Homolog of NCBI NO: 4731376 NR Description: isoflavone reductase homolog Bet v 6.0101 [Betula
  misc_feature (6)..(303): Homolog of NCBI NO: 7578897 NR Description: phenylcoumaran benzylic ether reductase homolog
  misc_feature (8)..(302): Homolog of NCBI NO: 7578907 NR Description: phenylcoumaran benzylic ether reductase homolog
MEEEKKKSRVLIIGATGRLGNYLTRFSIESGHPTFALIRNTTLSDKLKSLSDAGVTLLKGSLEDEGSLAEAVSKVDVVISAIPSKHVLDQKLLVRVIKQAGSIKRFIPAEYGANPDKTQVSDLDHDFYSKKSEIRHMIESEGIPYTYICCGLFMRVLLPSLVQPGLQSPPTDKVTVFGDGNVKAVFVNDVDVAAFTIKTIDDPRTLNKTLYLSPPGNICSMNDLVELWEGKIEKKLEKTFATENQLLKKIKETPYPDNMEMVFIYSVFIKGDHTYFDIESCGGVNGTELYPDVKYMTVSEFLDTLL

SEQ ID NO: 89089 - protein, 170 aa, Arabidopsis thaliana
  peptide (1)..(170): Ceres Seq. ID no. 12715100
  misc_feature (1)..(170): Pfam Name: Isoflavone reductase Pfam Description: Isoflavone reductase
  misc_feature (1)..(170): Homolog of NCBI NO: 15236146 NR Description: isoflavone reductase family; protein id:
  misc_feature (1)..(166): Homolog of NCBI NO: 7578895 NR Description: phenylcoumaran benzylic ether reductase homolog
  misc_feature (1)..(166): Homolog of NCBI NO: 18410820 NR Description: isoflavone reductase homolog P3; protein id: supported by cDNA: 11944., supported by cDNA: gi_17529217
  misc_feature (1)..(166): Homolog of NCBI NO: 10764491 NR Description: allergenic isoflavone reductase-like protein Bet
  misc_feature (1)..(166): Homolog of NCBI NO: 25344798 NR Description: probable NADPH oxidoreductase, 14094-12769 - Arabidopsis thaliana >gi|10092264|gb|AAG12677.1|AC025814_1
  misc_feature (1)..(162): Homolog of NCBI NO: 7484603 NR Description: 2'-hydroxyisoflavone reductase (EC 1.3.1.45) -
  misc_feature (1)..(166): Homolog of NCBI NO: 7578909 NR Description: phenylcoumaran benzylic ether reductase homolog
  misc_feature (1)..(162): Homolog of NCBI NO: 4731376 NR Description: isoflavone reductase homolog Bet v 6.0101 [Betula
  misc_feature (1)..(167): Homolog of NCBI NO: 7578897 NR Description: phenylcoumaran benzylic ether reductase homolog
  misc_feature (1)..(166): Homolog of NCBI NO: 7578907 NR Description: phenylcoumaran benzylic ether reductase homolog
MIESEGIPYTYICCGLFMRVLLPSLVQPGLQSPPTDKVTVFGDGNVKAVFVNDVDVAAFTIKTIDDPRTLNKTLYLSPPGNICSMNDLVELWEGKIEKKLEKTFATENQLLKKIKETPYPDNMEMVFIYSVFIKGDHTYFDIESCGGVNGTELYPDVKYMTVSEFLDTLL

SEQ ID NO: 89090 - protein, 153 aa, Arabidopsis thaliana
  peptide (1)..(153): Ceres Seq. ID no. 12715101
  misc_feature (1)..(153): Pfam Name: Isoflavone reductase Pfam Description: Isoflavone reductase
  misc_feature (1)..(153): Homolog of NCBI NO: 15236146 NR Description: isoflavone reductase family; protein id:
  misc_feature (1)..(149): Homolog of NCBI NO: 7578895 NR Description: phenylcoumaran benzylic ether reductase homolog
  misc_feature (1)..(149): Homolog of NCBI NO: 18410820 NR Description: isoflavone reductase homolog P3; protein id: supported by cDNA: 11944., supported by cDNA: gi_17529217
  misc_feature (1)..(149): Homolog of NCBI NO: 10764491 NR Description: allergenic isoflavone reductase-like protein Bet
  misc_feature (1)..(149): Homolog of NCBI NO: 25344798 NR Description: probable NADPH oxidoreductase, 14094-12769 - Arabidopsis thaliana >gi|10092264|gb|AAG12677.1|AC025814_1
  misc_feature (1)..(145): Homolog of NCBI NO: 7484603 NR Description: 2'-hydroxyisoflavone reductase (EC 1.3.1.45) -
  misc_feature (1)..(149): Homolog of NCBI NO: 7578909 NR Description: phenylcoumaran benzylic ether reductase homolog
  misc_feature (1)..(145): Homolog of NCBI NO: 4731376 NR Description: isoflavone reductase homolog Bet v 6.0101 [Betula
  misc_feature (1)..(150): Homolog of NCBI NO: 7578897 NR Description: phenylcoumaran benzylic ether reductase homolog
  misc_feature (1)..(149): Homolog of NCBI NO: 7578907 NR Description: phenylcoumaran benzylic ether reductase homolog
MRVLLPSLVQPGLQSPPTDKVTVFGDGNVKAVFVNDVDVAAFTIKTIDDPRTLNKTLYLSPPGNICSMNDLVELWEGKIEKKLEKTFATENQLLKKIKETPYPDNMEMVFIYSVFIKGDHTYFDIESCGGVNGTELYPDVKYMTVSEFLDTLL

SEQ ID NO: 89091 - DNA, 1710 bp, Arabidopsis thaliana
  misc_feature (1)..(1710): Ceres Seq. ID no. 12715104
  misc_feature: MA Experiment ID: 20000307 Result: Up-regulated in Transcription
  misc_feature: MA Experiment 20000307 PARAMETER Experiment Name: At_Germinating_Seeds_Sub_P Parameter: Age (hr) Value: 24 vs. 0
  misc_feature: MA Experiment 20000307 PARAMETER Experiment Name: At_Germinating_Seeds_Sub_P Parameter: Organism Value: A. thaliana
  misc_feature: MA Experiment 20000307 PARAMETER Experiment Name: At_Germinating_Seeds_Sub_P Parameter: Plant Line Value: WS
  misc_feature: MA Experiment 20000307 PARAMETER Experiment Name: At_Germinating_Seeds_Sub_P Parameter: Tissue Value: Germinating Seeds
  misc_feature: MA Experiment ID: 20000314 Result: Up-regulated in Transcription
  misc_feature: MA Experiment 20000314 PARAMETER Experiment Name: At_14day_Shoots-Roots_Sub_P Parameter: Age (day) Value: 14
  misc_feature: MA Experiment 20000314 PARAMETER Experiment Name: At_14day_Shoots-Roots_Sub_P Parameter: Organism Value: A. thaliana
  misc_feature: MA Experiment 20000314 PARAMETER Experiment Name: At_14day_Shoots-Roots_Sub_P Parameter: Plant Line Value: WS
  misc_feature: MA Experiment 20000314 PARAMETER Experiment Name: At_14day_Shoots-Roots_Sub_P Parameter: Tissue Value: Roots vs. Whole Plant
  misc_feature: MA Experiment ID: 20000440 Result: Up-regulated in Transcription
  misc_feature: MA Experiment 20000440 PARAMETER Experiment Name: At_Closed-Flower__Sub_P Parameter: Tissue Value: Closed Flower vs. Whole Plant
atggctgagaccaaacctgaaatagagatgtcggaggaagagaggaagatagtgaagataagctcgctgaagaagaaagcgataaatgcatccaacagattcaagaactccttcaagaaaaaaggtcggagaagcagcagcagagtcatgtccgttccgattgaggacgacattgacgcagaagatcttcaagctcttgatgcttttcgtcaagctcttatccttgacgagcttttgccatccaaactcgatgatctccacatgatgcttcgatttttgagagcaagaaagtttgacattgagaaagctaagcaaatgtggagtgacatgatccaatggaggaaagatttcggcgctgacacaatcattgaggattttgatttcgaagaaattgatgaagtgatgaagcactaccctcaaggctatcatggagttgacaaggaaggcagaccagtttacattgagagactaggtcaaatcgatgctaacaagctactccaagtgacaacaatggaccggtacgtgaaatatcatgtcaaagagttcgagaagactttcaaggtcaagttcccttcttgttctgtagcagcaaataaacacattgatcagagcacaacaattcttgacgtgcaaggcgtgggtcttaagaacttcagcaaatctgcaagagagcttcttcaaaggctttgcaagattgacaatgaaaattaccctgagactttgaaccggatgtttatcatcaatgctggttctggattccggctcttgtggagcacagttaagtcgtttcttgatcccaagaccacagcaaagattcatgttcttgggaacaaatatcatagcaaattgctcgaggtcatcgatgctagtgaattgcctgagttctttggaggtgcttgcacttgtgaagacaaaggaggttgtatgcgctctgacaaaggtccatggaatgatcctgaagttctcaagatcgctataaaccgtgaagctaagtgttcaccgatttcagaagatgaacacaagcatgtagaccaaggaagatcaacttcaggtttcgaaagtcttgagagaatcaagaagaaaaccgatgaagataatgtgtatgagaagcaaattgcaaccattgacaagtcaatggatatggcatggcttgccaaaactcagaaagctgaaaactttccaatctctaaagggttagagtgctatgttaggaaaggggcacccaagaaaggagatggattacttgtgggaggggtcatggcctttgtgatgggaatagttgcaatggttaggctatcaaaagacgttccacgcaaactcaccgaggctgctttatatggaaactcagtctgttatgaggaatctacaaagtctaagcagaatcaaggtcaattcgcagcaccagtctcgagctctgaatatatgttgatggtgaaacgtatggctgagctggaagataagtgcatgttccttgacttgaaacctgctcatgtcgaatctgagaaagaagagaaacttcaggccgcgcttaatcgcgttcaagtgcttgagcaagagttgactgagaccaagaaggctttggaagaagcacttgtgagccagaaggagattttggcatacatcgagaaaaagaagaagaagaagaagctggttttttttcatttgattattcacaaattaactattttatttagtgttggtggtaattga

SEQ ID NO: 89092 - protein, 569 aa, Arabidopsis thaliana
  peptide (1)..(569): Ceres Seq. ID no. 12715105
  misc_feature (139)..(325): Pfam Name: CRAL/TRIO domain Pfam Description: CRAL/TRIO domain
  misc_feature (1)..(552): Homolog of NCBI NO: 38707281 NR Description: can of worms 1 protein [Arabidopsis thaliana]
  misc_feature (1)..(551): Homolog of NCBI NO: 15236152 NR Description: putative protein; protein id: At4g34580.1
  misc_feature (1)..(552): Homolog of NCBI NO: 18398094 NR Description: putative phosphatidylinositol/phosphatidylcholine protein; protein id: At2g16380.1, supported by cDNA: gi_16612282 thaliana] >gi|16612283|gb|AAL27507.1|AF439836_1
  misc_feature (7)..(563): Homolog of NCBI NO: 25411704 NR Description: hypothetical protein At2g16380 [imported] -
  misc_feature (5)..(553): Homolog of NCBI NO: 18399733 NR Description: putative phosphatidylinositol phophatidylcholine protein; protein id: At2g21540.1, supported by cDNA: gi_16209641 thaliana] >gi|16209642|gb|AAL14382.1| At2g21540/F2G1.19
  misc_feature (19)..(550): Homolog of NCBI NO: 14517816 NR Description: phosphatidylinositol transfer-like protein II
  misc_feature (5)..(525): Homolog of NCBI NO: 15234966 NR Description: SEC14 - like protein; protein id: At4g39180.1
  misc_feature (20)..(566): Homolog of NCBI NO: 15224125 NR Description: putative phosphatidylinositol/phophatidylcholine protein; protein id: At2g18180.1 [Arabidopsis thaliana]
  misc_feature (19)..(550): Homolog of NCBI NO: 18419847 NR Description: expressed protein; protein id: At4g36490.1, by cDNA: gi_15215779 [Arabidopsis thaliana] C7A10_870/C7A10_870 [Arabidopsis thaliana]
  misc_feature (19)..(550): Homolog of NCBI NO: 25407729 NR Description: hypothetical protein AT4g36490 [imported] - thaliana >gi|4006913|emb|CAB16843.1| hypothetical protein thaliana] >gi|7270597|emb|CAB80315.1| hypothetical protein
MAETKPEIEMSEEERKIVKISSLKKKAINASNRFKNSFKKKGRRSSSRVMSVPIEDDIDAEDLQALDAFRQALILDELLPSKLDDLHMMLRFLRARKFDIEKAKQMWSDMIQWRKDFGADTIIEDFDFEEIDEVMKHYPQGYHGVDKEGRPVYIERLGQIDANKLLQVTTMDRYVKYHVKEFEKTFKVKFPSCSVAANKHIDQSTTILDVQGVGLKNFSKSARELLQRLCKIDNENYPETLNRMFIINAGSGFRLLWSTVKSFLDPKTTAKIHVLGNKYHSKLLEVIDASELPEFFGGACTCEDKGGCMRSDKGPWNDPEVLKIAINREAKCSPISEDEHKHVDQGRSTSGFESLERIKKKTDEDNVYEKQIATIDKSMDMAWLAKTQKAENFPISKGLECYVRKGAPKKGDGLLVGGVMAFVMGIVAMVRLSKDVPRKLTEAALYGNSVCYEESTKSKQNQGQFAAPVSSSEYMLMVKRMAELEDKCMFLDLKPAHVESEKEEKLQAALNRVQVLEQELTETKKALEEALVSQKEILAYIEKKKKKKKLVFFHLIIHKLTILFSVGGN

SEQ ID NO: 89093 - protein, 560 aa, Arabidopsis thaliana
  peptide (1)..(560): Ceres Seq. ID no. 12715106
  misc_feature (130)..(316): Pfam Name: CRAL/TRIO domain Pfam Description: CRAL/TRIO domain
  misc_feature (1)..(543): Homolog of NCBI NO: 38707281 NR Description: can of worms 1 protein [Arabidopsis thaliana]
  misc_feature (1)..(542): Homolog of NCBI NO: 15236152 NR Description: putative protein; protein id: At4g34580.1
  misc_feature (1)..(543): Homolog of NCBI NO: 18398094 NR Description: putative phosphatidylinositol/phosphatidylcholine protein; protein id: At2g16380.1, supported by cDNA: gi_16612282 thaliana] >gi|16612283|gb|AAL27507.1|AF439836_1
  misc_feature (1)..(554): Homolog of NCBI NO: 25411704 NR Description: hypothetical protein At2g16380 [imported] -
  misc_feature (1)..(544): Homolog of NCBI NO: 18399733 NR Description: putative phosphatidylinositol phophatidylcholine protein; protein id: At2g21540.1, supported by cDNA: gi_16209641 thaliana] >gi|16209642|gb|AAL14382.1| At2g21540/F2G1.19
  misc_feature (10)..(541): Homolog of NCBI NO: 14517816 NR Description: phosphatidylinositol transfer-like protein II
  misc_feature (1)..(516): Homolog of NCBI NO: 15234966 NR Description: SEC14 - like protein; protein id: At4g39180.1
  misc_feature (11)..(557): Homolog of NCBI NO: 15224125 NR Description: putative phosphatidylinositol/phophatidylcholine protein; protein id: At2g18180.1 [Arabidopsis thaliana]
  misc_feature (10)..(541): Homolog of NCBI NO: 18419847 NR Description: expressed protein; protein id: At4g36490.1, by cDNA: gi_15215779 [Arabidopsis thaliana] C7A10_870/C7A10_870 [Arabidopsis thaliana]
  misc_feature (10)..(541): Homolog of NCBI NO: 25407729 NR Description: hypothetical protein AT4g36490 [imported] - thaliana >gi|4006913|emb|CAB16843.1| hypothetical protein thaliana] >gi|7270597|emb|CAB80315.1| hypothetical protein
MSEEERKIVKISSLKKKAINASNRFKNSFKKKGRRSSSRVMSVPIEDDIDAEDLQALDAFRQALILDELLPSKLDDLHMMLRFLRARKFDIEKAKQMWSDMIQWRKDFGADTIIEDFDFEEIDEVMKHYPQGYHGVDKEGRPVYIERLGQIDANKLLQVTTMDRYVKYHVKEFEKTFKVKFPSCSVAANKHIDQSTTILDVQGVGLKNFSKSARELLQRLCKIDNENYPETLNRMFIINAGSGFRLLWSTVKSFLDPKTTAKIHVLGNKYHSKLLEVIDASELPEFFGGACTCEDKGGCMRSDKGPWNDPEVLKIAINREAKCSPISEDEHKHVDQGRSTSGFESLERIKKKTDEDNVYEKQIATIDKSMDMAWLAKTQKAENFPISKGLECYVRKGAPKKGDGLLVGGVMAFVMGIVAMVRLSKDVPRKLTEAALYGNSVCYEESTKSKQNQGQFAAPVSSSEYMLMVKRMAELEDKCMFLDLKPAHVESEKEEKLQAALNRVQVLEQELTETKKALEEALVSQKEILAYIEKKKKKKKLVFFHLIIHKLTILFSVGGN

SEQ ID NO: 89094 - protein, 520 aa, Arabidopsis thaliana
  peptide (1)..(520): Ceres Seq. ID no. 12715107
  misc_feature (90)..(276): Pfam Name: CRAL/TRIO domain Pfam Description: CRAL/TRIO domain
  misc_feature (1)..(503): Homolog of NCBI NO: 38707281 NR Description: can of worms 1 protein [Arabidopsis thaliana]
  misc_feature (1)..(502): Homolog of NCBI NO: 15236152 NR Description: putative protein; protein id: At4g34580.1
  misc_feature (1)..(503): Homolog of NCBI NO: 18398094 NR Description: putative phosphatidylinositol/phosphatidylcholine protein; protein id: At2g16380.1, supported by cDNA: gi_16612282 thaliana] >gi|16612283|gb|AAL27507.1|AF439836_1
  misc_feature (1)..(514): Homolog of NCBI NO: 25411704 NR Description: hypothetical protein At2g16380 [imported] -
  misc_feature (1)..(504): Homolog of NCBI NO: 18399733 NR Description: putative phosphatidylinositol phophatidylcholine protein; protein id: At2g21540.1, supported by cDNA: gi_16209641 thaliana] >gi|16209642|gb|AAL14382.1| At2g21540/F2G1.19
  misc_feature (1)..(501): Homolog of NCBI NO: 14517816 NR Description: phosphatidylinositol transfer-like protein II
  misc_feature (1)..(476): Homolog of NCBI NO: 15234966 NR Description: SEC14 - like protein; protein id: At4g39180.1
  misc_feature (1)..(517): Homolog of NCBI NO: 15224125 NR Description: putative phosphatidylinositol/phophatidylcholine protein; protein id: At2g18180.1 [Arabidopsis thaliana]
  misc_feature (1)..(501): Homolog of NCBI NO: 18419847 NR Description: expressed protein; protein id: At4g36490.1, by cDNA: gi_15215779 [Arabidopsis thaliana] C7A10_870/C7A10_870 [Arabidopsis thaliana]
  misc_feature (1)..(501): Homolog of NCBI NO: 25407729 NR Description: hypothetical protein AT4g36490 [imported] - thaliana >gi|4006913|emb|CAB16843.1| hypothetical protein thaliana] >gi|7270597|emb|CAB80315.1| hypothetical protein
MSVPIEDDIDAEDLQALDAFRQALILDELLPSKLDDLHMMLRFLRARKFDIEKAKQMWSDMIQWRKDFGADTIIEDFDFEEIDEVMKHYPQGYHGVDKEGRPVYIERLGQIDANKLLQVTTMDRYVKYHVKEFEKTFKVKFPSCSVAANKHIDQSTTILDVQGVGLKNFSKSARELLQRLCKIDNENYPETLNRMFIINAGSGFRLLWSTVKSFLDPKTTAKIHVLGNKYHSKLLEVIDASELPEFFGGACTCEDKGGCMRSDKGPWNDPEVLKIAINREAKCSPISEDEHKHVDQGRSTSGFESLERIKKKTDEDNVYEKQIATIDKSMDMAWLAKTQKAENFPISKGLECYVRKGAPKKGDGLLVGGVMAFVMGIVAMVRLSKDVPRKLTEAALYGNSVCYEESTKSKQNQGQFAAPVSSSEYMLMVKRMAELEDKCMFLDLKPAHVESEKEEKLQAALNRVQVLEQELTETKKALEEALVSQKEILAYIEKKKKKKKLVFFHLIIHKLTILFSVGGN

SEQ ID NO: 89095 - DNA, 1239 bp, Arabidopsis thaliana
  misc_feature (1)..(1239): Ceres Seq. ID no. 12715115
  misc_feature: MA Experiment ID: 108462 Result: Up-regulated in Transcription
  misc_feature: MA Experiment 108462 PARAMETER Experiment Name: At_Germinating_Seeds_cDNA_P Parameter: Age (day) Value: 2 vs. 0
  misc_feature: MA Experiment 108462 PARAMETER Experiment Name: At_Germinating_Seeds_cDNA_P Parameter: Tissue Value: Germinating Seeds
  misc_feature: MA Experiment ID: 108463 Result: Up-regulated in Transcription
  misc_feature: MA Experiment 108463 PARAMETER Experiment Name: At_Germinating_Seeds_cDNA_P Parameter: Age (day) Value: 3 vs. 0
  misc_feature: MA Experiment 108463 PARAMETER Experiment Name: At_Germinating_Seeds_cDNA_P Parameter: Tissue Value: Germinating Seeds
  misc_feature: MA Experiment ID: 108464 Result: Up-regulated in Transcription
  misc_feature: MA Experiment 108464 PARAMETER Experiment Name: At_Germinating_Seeds_cDNA_P Parameter: Age (day) Value: 4 vs. 0
  misc_feature: MA Experiment 108464 PARAMETER Experiment Name: At_Germinating_Seeds_cDNA_P Parameter: Tissue Value: Germinating Seeds
  misc_feature: MA Experiment ID: 108579 Result: Up-regulated in Transcription
  misc_feature: MA Experiment 108579 PARAMETER Experiment Name: At_4deg_Cold_cDNA_P Parameter: Temperature (deg C) Value: 4 vs. 22
  misc_feature: MA Experiment 108579 PARAMETER Experiment Name: At_4deg_Cold_cDNA_P Parameter: Timepoint (hr) Value: 6
  misc_feature: MA Experiment 108579 PARAMETER Experiment Name: At_4deg_Cold_cDNA_P Parameter: Tissue Value: Aerial
  misc_feature: MA Experiment ID: 20000069 Result: Down-regulated in Transcription
  misc_feature: MA Experiment 20000069 PARAMETER Experiment Name: At_100uM_ABA_Mutants_cDNA_P Parameter: Plant Line Value: CS23
  misc_feature: MA Experiment 20000069 PARAMETER Experiment Name: At_100uM_ABA_Mutants_cDNA_P Parameter: Timepoint (hr) Value: 6
  misc_feature: MA Experiment 20000069 PARAMETER Experiment Name: At_100uM_ABA_Mutants_cDNA_P Parameter: Tissue Value: Aerial
  misc_feature: MA Experiment 20000069 PARAMETER Experiment Name: At_100uM_ABA_Mutants_cDNA_P Parameter: Treatment Value: 100uM ABA vs. No Treatment
  misc_feature: MA Experiment ID: 20000072 Result: Down-regulated in Transcription
  misc_feature: MA Experiment 20000072 PARAMETER Experiment Name: At_100uM_ABA_Mutants_cDNA_P Parameter: Plant Line Value: CS8105
  misc_feature: MA Experiment 20000072 PARAMETER Experiment Name: At_100uM_ABA_Mutants_cDNA_P Parameter: Timepoint (hr) Value: 6
  misc_feature: MA Experiment 20000072 PARAMETER Experiment Name: At_100uM_ABA_Mutants_cDNA_P Parameter: Tissue Value: Aerial
  misc_feature: MA Experiment 20000072 PARAMETER Experiment Name: At_100uM_ABA_Mutants_cDNA_P Parameter: Treatment Value: 100uM ABA vs. No Treatment
  misc_feature: MA Experiment ID: 20000087 Result: Down-regulated in Transcription
  misc_feature: MA Experiment 20000087 PARAMETER Experiment Name: At_100uM_ABA_Mutants_cDNA_P Parameter: Plant Line Value: WS
  misc_feature: MA Experiment 20000087 PARAMETER Experiment Name: At_100uM_ABA_Mutants_cDNA_P Parameter: Timepoint (hr) Value: 6
  misc_feature: MA Experiment 20000087 PARAMETER Experiment Name: At_100uM_ABA_Mutants_cDNA_P Parameter: Tissue Value: Aerial
  misc_feature: MA Experiment 20000087 PARAMETER Experiment Name: At_100uM_ABA_Mutants_cDNA_P Parameter: Treatment Value: 100uM ABA vs. No Treatment
atgggaagcttgagtacgattttgagacatccggatgagttatatccgctcttgaagttgaaacttgcgattacgaaagctcagaagcagattccacttgagccacacttagctttctgttattcaattcttcacaaagtttctaaaagcttttctcttgttattcaacaacttggcaccgagcttcgtaacgccaaaaagttagtatcatcttctcatatttttgctactacagaggatgacacaagcgtaccagtggagatcaaagttccaattctgatagctttccaccgtcatatatacgatggtgactggcatttttcatgtggtacaaaagagtataaacttctaatggaccaatttcaccatgtttctgcagcttttctgaaacttgaaaaagggtatcaagaggctattgaagatataactaaaagaatgggtgcaggaatggccaagttcatttgcaaggaggtagaaacaattgatgactatgatgaatactgccattatgctgcaggacttgttggtttaggtttgtcaaaaatcttcattgcttcggaattagaaatactgactccagattggaagcagatttcaaattctacaggtttatttctgcagaaaacaaacattatcaaagattatcttgaagacattaatgagagaccaaagtcgcgcatgttttggcctcgtgagatttggggaaaatatgttgacaaacttgaggacttcaaaaatgaggagaaagctacaaaagcagtgcagtgtttgaatgaaatggtcactaatgcattgaatcatgttgaagattgtttgaaatccttggcttcactgcgtgatcctgcaatatttcagtcttgcgccatccctcagatcgtggcgattggaacacttgcgttatgctataacaatgtacaagtgtttagaggtgtcgtgagattgagacgaggtctaatagctaaagtcattgatcgcacaaagacaatggatgatgtctacggtgcgttctatgatttttcttgcatgctacaaacaaaggttgacaataacgatccaaatgctatgaaaacattaaaccgactcgaaaccatcaagaaattttgcaaagaaaatggaggacttcacaaaagaaaatcttatgttaacgatgaaacacaatccaaggctatctttgttgtaatgtttgtgcttctactggccatagtcgttgtatatctcaaagcaaaccaatgtaagtga

SEQ ID NO: 89096 - protein, 412 aa, Arabidopsis thaliana
  peptide (1)..(412): Ceres Seq. ID no. 12715116
  misc_feature (44)..(332): Pfam Name: Squalene/phytoene synthase Pfam Description: Squalene/phytoene synthase
  misc_feature (1)..(412): Homolog of NCBI NO: 7434083 NR Description: farnesyl-diphosphate farnesyltransferase (EC
  misc_feature (1)..(412): Homolog of NCBI NO: 25287164 NR Description: probable squalene synthase [imported] - thaliana >gi|5678626|emb|CAA18844.2| putative squalene synthase thaliana] >gi|7270415|emb|CAB80182.1| putative squalene synthase
  misc_feature (1)..(412): Homolog of NCBI NO: 11258828 NR Description: farnesyl-diphosphate farnesyltransferase (EC
  misc_feature (1)..(377): Homolog of NCBI NO: 15236169 NR Description: farnesyl-diphosphate farnesyltransferase
  misc_feature (1)..(409): Homolog of NCBI NO: 15236168 NR Description: farnesyl-diphosphate farnesyltransferase synthase 1) (SQS1); protein id: At4g34640.1, supported by cDNA: supported by cDNA: gi_4098518, supported by cDNA: gi_806324
MGSLSTILRHPDELYPLLKLKLAITKAQKQIPLEPHLAFCYSILHKVSKSFSLVIQQLGTELRNAKKLVSSSHIFATTEDDTSVPVEIKVPILIAFHRHIYDGDWHFSCGTKEYKLLMDQFHHVSAAFLKLEKGYQEAIEDITKRMGAGMAKFICKEVETIDDYDEYCHYAAGLVGLGLSKIFIASELEILTPDWKQISNSTGLFLQKTNIIKDYLEDINERPKSRMFWPREIWGKYVDKLEDFKNEEKATKAVQCLNEMVTNALNHVEDCLKSLASLRDPAIFQSCAIPQIVAIGTLALCYNNVQVFRGVVRLRRGLIAKVIDRTKTMDDVYGAFYDFSCMLQTKVDNNDPNAMKTLNRLETIKKFCKENGGLHKRKSYVNDETQSKAIFVVMFVLLLAIVVVYLKANQCK

SEQ ID NO: 89097 - protein, 295 aa, Arabidopsis thaliana
  peptide (1)..(295): Ceres Seq. ID no. 12715117
  misc_feature (1)..(215): Pfam Name: Squalene/phytoene synthase Pfam Description: Squalene/phytoene synthase
  misc_feature (1)..(295): Homolog of NCBI NO: 7434083 NR Description: farnesyl-diphosphate farnesyltransferase (EC
  misc_feature (1)..(295): Homolog of NCBI NO: 25287164 NR Description: probable squalene synthase [imported] - thaliana >gi|5678626|emb|CAA18844.2| putative squalene synthase thaliana] >gi|7270415|emb|CAB80182.1| putative squalene synthase
  misc_feature (1)..(295): Homolog of NCBI NO: 11258828 NR Description: farnesyl-diphosphate farnesyltransferase (EC
  misc_feature (1)..(260): Homolog of NCBI NO: 15236169 NR Description: farnesyl-diphosphate farnesyltransferase
  misc_feature (1)..(292): Homolog of NCBI NO: 15236168 NR Description: farnesyl-diphosphate farnesyltransferase synthase 1) (SQS1); protein id: At4g34640.1, supported by cDNA: supported by cDNA: gi_4098518, supported by cDNA: gi_806324
MDQFHHVSAAFLKLEKGYQEAIEDITKRMGAGMAKFICKEVETIDDYDEYCHYAAGLVGLGLSKIFIASELEILTPDWKQISNSTGLFLQKTNIIKDYLEDINERPKSRMFWPREIWGKYVDKLEDFKNEEKATKAVQCLNEMVTNALNHVEDCLKSLASLRDPAIFQSCAIPQIVAIGTLALCYNNVQVFRGVVRLRRGLIAKVIDRTKTMDDVYGAFYDFSCMLQTKVDNNDPNAMKTLNRLETIKKFCKENGGLHKRKSYVNDETQSKAIFVVMFVLLLAIVVVYLKANQCK

SEQ ID NO: 89098 - protein, 267 aa, Arabidopsis thaliana
  peptide (1)..(267): Ceres Seq. ID no. 12715118
  misc_feature (1)..(187): Pfam Name: Squalene/phytoene synthase Pfam Description: Squalene/phytoene synthase
  misc_feature (1)..(267): Homolog of NCBI NO: 7434083 NR Description: farnesyl-diphosphate farnesyltransferase (EC
  misc_feature (1)..(267): Homolog of NCBI NO: 25287164 NR Description: probable squalene synthase [imported] - thaliana >gi|5678626|emb|CAA18844.2| putative squalene synthase thaliana] >gi|7270415|emb|CAB80182.1| putative squalene synthase
  misc_feature (1)..(267): Homolog of NCBI NO: 11258828 NR Description: farnesyl-diphosphate farnesyltransferase (EC
  misc_feature (1)..(232): Homolog of NCBI NO: 15236169 NR Description: farnesyl-diphosphate farnesyltransferase
  misc_feature (1)..(264): Homolog of NCBI NO: 15236168 NR Description: farnesyl-diphosphate farnesyltransferase synthase 1) (SQS1); protein id: At4g34640.1, supported by cDNA: supported by cDNA: gi_4098518, supported by cDNA: gi_806324
MGAGMAKFICKEVETIDDYDEYCHYAAGLVGLGLSKIFIASELEILTPDWKQISNSTGLFLQKTNIIKDYLEDINERPKSRMFWPREIWGKYVDKLEDFKNEEKATKAVQCLNEMVTNALNHVEDCLKSLASLRDPAIFQSCAIPQIVAIGTLALCYNNVQVFRGVVRLRRGLIAKVIDRTKTMDDVYGAFYDFSCMLQTKVDNNDPNAMKTLNRLETIKKFCKENGGLHKRKSYVNDETQSKAIFVVMFVLLLAIVVVYLKANQCK

SEQ ID NO: 89099 - DNA, 1866 bp, Arabidopsis thaliana
  misc_feature (1)..(1866): Ceres Seq. ID no. 12715348
  misc_feature: MA Experiment ID: 20000180 Result: Down-regulated in Transcription
  misc_feature: MA Experiment 20000180 PARAMETER Experiment Name: At_Germinating_Seeds_P Parameter: Age (hr) Value: 24 vs. 0
  misc_feature: MA Experiment 20000180 PARAMETER Experiment Name: At_Germinating_Seeds_P Parameter: Tissue Value: Germinating Seeds
atgtctgagagaaatattgtaacttggacaacgatggtttctgggtatacgagtgatggaaaacccaataaagctattgagttatacagaagaatgttagactccgaagaagaagcggcgaacgagtttatgtattctgcggttttgaaagcttgtgggttagtgggtgatattcagctggggattttggtttatgaaagaattggtaaagagaatttgagaggtgatgttgttttgatgaatagtgttgttgatatgtatgttaagaatgggagacttatcgaagctaatagcagttttaaggagattttacggcctagttcgacttcgtggaacactcttatttctggttattgtaaagctggtttgatggatgaagcggttactttgttccatcgaatgccgcagccaaatgtcgtgtcttggaactgtttgatatcgggatttgtcgataagggtagtcctcgtgcgttggagtttttagttaggatgcagagagaaggacttgtgttagacggttttgctttaccatgtggtcttaaagcttgtagttttggtggcttattaacaatgggtaaacagctgcattgttgtgtcgtaaagtcgggtctagagtctagcccgttcgcaatatctgctcttattgatatgtactcgaactgtggctctctaatatatgcagctgatgtttttcatcaggaaaaactggccgttaatagtagtgtcgcggtttggaattctatgctctctggatttttgataaatgaggagaatgaagcagcattatggctgcttttgcagatatatcagtcagatttgtgttttgattcctacactctaagtggtgccttaaagatatgtatcaactatgtcaacttaagactcgggcttcaagtacatagtttagttgtagtaagtggttatgagttggattacatcgtaggaagtattcttgttgatttacatgcaaatgttgggaatatacaagatgcacataaactgtttcataggcttccaaataaagatatcatcgctttctctggcttgatacgaggctgtgtgaaatcagggttcaattctttagcattttatctgttcagggaattaatcaagttgggactcgatgctgaccagttcatcgtctcaaatattcttaaagtttgttcaagtttagcatctcttggatggggtaagcaaattcatgggttgtgtataaagaaaggttatgaatcagaacctgtcacagcgacagcactagtagatatgtatgtaaaatgtggtgagatagataatggtgtagtgttgtttgatggtatgttagaaagagatgttgtctcttggacagggataattgttggattcggacaaaacggacgagtcgaagaagcgtttcggtatttccacaagatgataaatattggaattgaaccaaataaggtaacttttttggggcttctttctgcttgccgacattctggactacttgaagaagcaagatcaaccctcgaaacgatgaaatctgaatatggtcttgaaccgtatctagagcattattattgtgtagttgatcttcttggtcaagccgggctgttccaagaggctaacgaattgataaataaaatgccgttggagcccgacaaaacaatatggacgtctctgctcactgcttgcggaactcacaagaatgccggactggttactgtaattgctgagaaattactcaaggggtttccggatgatccatcggtttatacatctctttcgaatgcttatgctacgttaggcatgtgggatcagttaagtaaagtgagagaagctgctaagaagctaggggcaaaagaatctggaatgagttggataatttag

SEQ ID NO: 89100 - protein, 621 aa, Arabidopsis thaliana
  peptide (1)..(621): Ceres Seq. ID no. 12715349
  misc_feature (109)..(143): Pfam Name: PPR repeat Pfam Description: PPR repeat
  misc_feature (112)..(620): Homolog of NCBI NO: 34897084 NR Description: hypothetical protein [Oryza sativa (japonica group)] >gi|12957718|gb|AAK09236.1| hypothetical protein [Oryza
  misc_feature (9)..(147): Homolog of NCBI NO: 34897084 NR Description: hypothetical protein [Oryza sativa (japonica group)] >gi|12957718|gb|AAK09236.1| hypothetical protein [Oryza
  misc_feature (1)..(139): Homolog of NCBI NO: 34897084 NR Description: hypothetical protein [Oryza sativa (japonica group)] >gi|12957718|gb|AAK09236.1| hypothetical protein [Oryza
  misc_feature (112)..(620): Homolog of NCBI NO: 18394615 NR Description: hypothetical protein; protein id: At1g18485.1
  misc_feature (1)..(138): Homolog of NCBI NO: 18394615 NR Description: hypothetical protein; protein id: At1g18485.1
  misc_feature (112)..(620): Homolog of NCBI NO: 15234095 NR Description: putative protein; protein id: At4g33170.1
  misc_feature (1)..(148): Homolog of NCBI NO: 15234095 NR Description: putative protein; protein id: At4g33170.1
  misc_feature (112)..(620): Homolog of NCBI NO: 15219258 NR Description: hypothetical protein; protein id: At1g16480.1
  misc_feature (1)..(134): Homolog of NCBI NO: 15219258 NR Description: hypothetical protein; protein id: At1g16480.1
  misc_feature (114)..(620): Homolog of NCBI NO: 34906110 NR Description: P0020E09.15 [Oryza sativa (japonica
MSERNIVTWTTMVSGYTSDGKPNKAIELYRRMLDSEEEAANEFMYSAVLKACGLVGDIQLGILVYERIGKENLRGDVVLMNSVVDMYVKNGRLIEANSSFKEILRPSSTSWNTLISGYCKAGLMDEAVTLFHRMPQPNVVSWNCLISGFVDKGSPRALEFLVRMQREGLVLDGFALPCGLKACSFGGLLTMGKQLHCCVVKSGLESSPFAISALIDMYSNCGSLIYAADVFHQEKLAVNSSVAVWNSMLSGFLINEENEAALWLLLQIYQSDLCFDSYTLSGALKICINYVNLRLGLQVHSLVVVSGYELDYIVGSILVDLHANVGNIQDAHKLFHRLPNKDIIAFSGLIRGCVKSGFNSLAFYLFRELIKLGLDADQFIVSNILKVCSSLASLGWGKQIHGLCIKKGYESEPVTATALVDMYVKCGEIDNGVVLFDGMLERDVVSWTGIIVGFGQNGRVEEAFRYFHKMINIGIEPNKVTFLGLLSACRHSGLLEEARSTLETMKSEYGLEPYLEHYYCVVDLLGQAGLFQEANELINKMPLEPDKTIWTSLLTACGTHKNAGLVTVIAEKLLKGFPDDPSVYTSLSNAYATLGMWDQLSKVREAAKKLGAKESGMSWII

SEQ ID NO: 89101 - protein, 610 aa, Arabidopsis thaliana
  peptide (1)..(610): Ceres Seq. ID no. 12715350
  misc_feature (98)..(132): Pfam Name: PPR repeat Pfam Description: PPR repeat
  misc_feature (101)..(609): Homolog of NCBI NO: 34897084 NR Description: hypothetical protein [Oryza sativa (japonica group)] >gi|12957718|gb|AAK09236.1| hypothetical protein [Oryza
  misc_feature (1)..(136): Homolog of NCBI NO: 34897084 NR Description: hypothetical protein [Oryza sativa (japonica group)] >gi|12957718|gb|AAK09236.1| hypothetical protein [Oryza
  misc_feature (1)..(128): Homolog of NCBI NO: 34897084 NR Description: hypothetical protein [Oryza sativa (japonica group)] >gi|12957718|gb|AAK09236.1| hypothetical protein [Oryza
  misc_feature (101)..(609): Homolog of NCBI NO: 18394615 NR Description: hypothetical protein; protein id: At1g18485.1
  misc_feature (1)..(127): Homolog of NCBI NO: 18394615 NR Description: hypothetical protein; protein id: At1g18485.1
  misc_feature (101)..(609): Homolog of NCBI NO: 15234095 NR Description: putative protein; protein id: At4g33170.1
  misc_feature (1)..(137): Homolog of NCBI NO: 15234095 NR Description: putative protein; protein id: At4g33170.1
  misc_feature (101)..(609): Homolog of NCBI NO: 15219258 NR Description: hypothetical protein; protein id: At1g16480.1
  misc_feature (1)..(123): Homolog of NCBI NO: 15219258 NR Description: hypothetical protein; protein id: At1g16480.1
  misc_feature (103)..(609): Homolog of NCBI NO: 34906110 NR Description: P0020E09.15 [Oryza sativa (japonica
MVSGYTSDGKPNKAIELYRRMLDSEEEAANEFMYSAVLKACGLVGDIQLGILVYERIGKENLRGDVVLMNSVVDMYVKNGRLIEANSSFKEILRPSSTSWNTLISGYCKAGLMDEAVTLFHRMPQPNVVSWNCLISGFVDKGSPRALEFLVRMQREGLVLDGFALPCGLKACSFGGLLTMGKQLHCCVVKSGLESSPFAISALIDMYSNCGSLIYAADVFHQEKLAVNSSVAVWNSMLSGFLINEENEAALWLLLQIYQSDLCFDSYTLSGALKICINYVNLRLGLQVHSLVVVSGYELDYIVGSILVDLHANVGNIQDAHKLFHRLPNKDIIAFSGLIRGCVKSGFNSLAFYLFRELIKLGLDADQFIVSNILKVCSSLASLGWGKQIHGLCIKKGYESEPVTATALVDMYVKCGEIDNGVVLFDGMLERDVVSWTGIIVGFGQNGRVEEAFRYFHKMINIGIEPNKVTFLGLLSACRHSGLLEEARSTLETMKSEYGLEPYLEHYYCVVDLLGQAGLFQEANELINKMPLEPDKTIWTSLLTACGTHKNAGLVTVIAEKLLKGFPDDPSVYTSLSNAYATLGMWDQLSKVREAAKKLGAKESGMSWII

SEQ ID NO: 89102 - protein, 590 aa, Arabidopsis thaliana
  peptide (1)..(590): Ceres Seq. ID no. 12715351
  misc_feature (78)..(112): Pfam Name: PPR repeat Pfam Description: PPR repeat
  misc_feature (81)..(589): Homolog of NCBI NO: 34897084 NR Description: hypothetical protein [Oryza sativa (japonica group)] >gi|12957718|gb|AAK09236.1| hypothetical protein [Oryza
  misc_feature (1)..(116): Homolog of NCBI NO: 34897084 NR Description: hypothetical protein [Oryza sativa (japonica group)] >gi|12957718|gb|AAK09236.1| hypothetical protein [Oryza
  misc_feature (1)..(108): Homolog of NCBI NO: 34897084 NR Description: hypothetical protein [Oryza sativa (japonica group)] >gi|12957718|gb|AAK09236.1| hypothetical protein [Oryza
  misc_feature (81)..(589): Homolog of NCBI NO: 18394615 NR Description: hypothetical protein; protein id: At1g18485.1
  misc_feature (1)..(107): Homolog of NCBI NO: 18394615 NR Description: hypothetical protein; protein id: At1g18485.1
  misc_feature (81)..(589): Homolog of NCBI NO: 15234095 NR Description: putative protein; protein id: At4g33170.1
  misc_feature (1)..(117): Homolog of NCBI NO: 15234095 NR Description: putative protein; protein id: At4g33170.1
  misc_feature (81)..(589): Homolog of NCBI NO: 15219258 NR Description: hypothetical protein; protein id: At1g16480.1
  misc_feature (1)..(103): Homolog of NCBI NO: 15219258 NR Description: hypothetical protein; protein id: At1g16480.1
  misc_feature (83)..(589): Homolog of NCBI NO: 34906110 NR Description: P0020E09.15 [Oryza sativa (japonica
MLDSEEEAANEFMYSAVLKACGLVGDIQLGILVYERIGKENLRGDVVLMNSVVDMYVKNGRLIEANSSFKEILRPSSTSWNTLISGYCKAGLMDEAVTLFHRMPQPNVVSWNCLISGFVDKGSPRALEFLVRMQREGLVLDGFALPCGLKACSFGGLLTMGKQLHCCVVKSGLESSPFAISALIDMYSNCGSLIYAADVFHQEKLAVNSSVAVWNSMLSGFLINEENEAALWLLLQIYQSDLCFDSYTLSGALKICINYVNLRLGLQVHSLVVVSGYELDYIVGSILVDLHANVGNIQDAHKLFHRLPNKDIIAFSGLIRGCVKSGFNSLAFYLFRELIKLGLDADQFIVSNILKVCSSLASLGWGKQIHGLCIKKGYESEPVTATALVDMYVKCGEIDNGVVLFDGMLERDVVSWTGIIVGFGQNGRVEEAFRYFHKMINIGIEPNKVTFLGLLSACRHSGLLEEARSTLETMKSEYGLEPYLEHYYCVVDLLGQAGLFQEANELINKMPLEPDKTIWTSLLTACGTHKNAGLVTVIAEKLLKGFPDDPSVYTSLSNAYATLGMWDQLSKVREAAKKLGAKESGMSWII

SEQ ID NO: 89103 - DNA, 1122 bp, Arabidopsis thaliana
  misc_feature (1)..(1122): Ceres Seq. ID no. 12715364
  misc_feature: MA Experiment ID: 20000269 Result: Up-regulated in Transcription
  misc_feature: MA Experiment 20000269 PARAMETER Experiment Name: At_1mM_KNO3_L-vs-H_Roots_P Parameter: Age (day) Value: 7,10,12
  misc_feature: MA Experiment 20000269 PARAMETER Experiment Name: At_1mM_KNO3_L-vs-H_Roots_P Parameter: Organism Value: A. thaliana
  misc_feature: MA Experiment 20000269 PARAMETER Experiment Name: At_1mM_KNO3_L-vs-H_Roots_P Parameter: Plant Line Value: WS
  misc_feature: MA Experiment 20000269 PARAMETER Experiment Name: At_1mM_KNO3_L-vs-H_Roots_P Parameter: Timepoint (day) Value: 7,10,12
  misc_feature: MA Experiment 20000269 PARAMETER Experiment Name: At_1mM_KNO3_L-vs-H_Roots_P Parameter: Tissue Value: Roots
  misc_feature: MA Experiment 20000269 PARAMETER Experiment Name: At_1mM_KNO3_L-vs-H_Roots_P Parameter: Treatment Value: 1mM KNO3 vs. 50mM KNO3
  misc_feature: MA Experiment ID: 20000451 Result: Down-regulated in Transcription
  misc_feature: MA Experiment 20000451 PARAMETER Experiment Name: At_CS6879_Shoots-Roots_P Parameter: Age (day) Value: 14
  misc_feature: MA Experiment 20000451 PARAMETER Experiment Name: At_CS6879_Shoots-Roots_P Parameter: Organism Value: A. thaliana
  misc_feature: MA Experiment 20000451 PARAMETER Experiment Name: At_CS6879_Shoots-Roots_P Parameter: Plant Line Value: CS6879 vs. WS
  misc_feature: MA Experiment 20000451 PARAMETER Experiment Name: At_CS6879_Shoots-Roots_P Parameter: Tissue Value: Roots
  misc_feature: MA Experiment ID: 20000794 Result: Up-regulated in Transcription
  misc_feature: MA Experiment 20000794 PARAMETER Experiment Name: At_Petals_P Parameter: Age (day) Value: 23-25 days
  misc_feature: MA Experiment 20000794 PARAMETER Experiment Name: At_Petals_P Parameter: Plant Line Value: WS
  misc_feature: MA Experiment 20000794 PARAMETER Experiment Name: At_Petals_P Parameter: Tissue Value: Petals vs. Whole plant
  misc_feature: MA Experiment ID: 20001556 Result: Down-regulated in Transcription
  misc_feature: MA Experiment 20001556 PARAMETER Experiment Name: At_Drought_Soil_Dry_P Parameter: Age (day) Value: 26
  misc_feature: MA Experiment 20001556 PARAMETER Experiment Name: At_Drought_Soil_Dry_P Parameter: Organism Value: A. thaliana
  misc_feature: MA Experiment 20001556 PARAMETER Experiment Name: At_Drought_Soil_Dry_P Parameter: Plant Line Value: WS
  misc_feature: MA Experiment 20001556 PARAMETER Experiment Name: At_Drought_Soil_Dry_P Parameter: Post Timepoint (hr) Value: None
  misc_feature: MA Experiment 20001556 PARAMETER Experiment Name: At_Drought_Soil_Dry_P Parameter: Post-Treatment Value: None
  misc_feature: MA Experiment 20001556 PARAMETER Experiment Name: At_Drought_Soil_Dry_P Parameter: Timepoint (day) Value: 12
  misc_feature: MA Experiment 20001556 PARAMETER Experiment Name: At_Drought_Soil_Dry_P Parameter: Treatment Value: Drought vs. No Drought
  misc_feature: MA Experiment ID: 20001557 Result: Down-regulated in Transcription
  misc_feature: MA Experiment 20001557 PARAMETER Experiment Name: At_Drought_Soil_Dry_P Parameter: Age (day) Value: 27
  misc_feature: MA Experiment 20001557 PARAMETER Experiment Name: At_Drought_Soil_Dry_P Parameter: Organism Value: A. thaliana
  misc_feature: MA Experiment 20001557 PARAMETER Experiment Name: At_Drought_Soil_Dry_P Parameter: Plant Line Value: WS
  misc_feature: MA Experiment 20001557 PARAMETER Experiment Name: At_Drought_Soil_Dry_P Parameter: Post Timepoint (hr) Value: 3
  misc_feature: MA Experiment 20001557 PARAMETER Experiment Name: At_Drought_Soil_Dry_P Parameter: Post-Treatment Value: Re-Water vs. No Drought
  misc_feature: MA Experiment 20001557 PARAMETER Experiment Name: At_Drought_Soil_Dry_P Parameter: Timepoint (day) Value: 13
  misc_feature: MA Experiment 20001557 PARAMETER Experiment Name: At_Drought_Soil_Dry_P Parameter: Treatment Value: Drought vs. No Drought
  misc_feature: MA Experiment ID: 20001558 Result: Down-regulated in Transcription
  misc_feature: MA Experiment 20001558 PARAMETER Experiment Name: At_Drought_Soil_Dry_P Parameter: Age (day) Value: 27
  misc_feature: MA Experiment 20001558 PARAMETER Experiment Name: At_Drought_Soil_Dry_P Parameter: Organism Value: A. thaliana
  misc_feature: MA Experiment 20001558 PARAMETER Experiment Name: At_Drought_Soil_Dry_P Parameter: Plant Line Value: WS
  misc_feature: MA Experiment 20001558 PARAMETER Experiment Name: At_Drought_Soil_Dry_P Parameter: Post Timepoint (hr) Value: 6
  misc_feature: MA Experiment 20001558 PARAMETER Experiment Name: At_Drought_Soil_Dry_P Parameter: Post-Treatment Value: Re-Water vs. No Drought
  misc_feature: MA Experiment 20001558 PARAMETER Experiment Name: At_Drought_Soil_Dry_P Parameter: Timepoint (day) Value: 13
  misc_feature: MA Experiment 20001558 PARAMETER Experiment Name: At_Drought_Soil_Dry_P Parameter: Treatment Value: Drought vs. No Drought
  misc_feature: MA Experiment ID: 20001756 Result: Down-regulated in Transcription
  misc_feature: MA Experiment 20001756 PARAMETER Experiment Name: At_50mM_NH4NO3_L-to-H_P Parameter: Timepoint (hr) Value: 4
  misc_feature: MA Experiment 20001756 PARAMETER Experiment Name: At_50mM_NH4NO3_L-to-H_P Parameter: Tissue Value: Leaf
  misc_feature: MA Experiment 20001756 PARAMETER Experiment Name: At_50mM_NH4NO3_L-to-H_P Parameter: Treatment Value: 50mM NH4NO3 vs 100mM Mannitol
  misc_feature: MA Experiment ID: 20001757 Result: Down-regulated in Transcription
  misc_feature: MA Experiment 20001757 PARAMETER Experiment Name: At_50mM_NH4NO3_L-to-H_P Parameter: Timepoint (hr) Value: 6
  misc_feature: MA Experiment 20001757 PARAMETER Experiment Name: At_50mM_NH4NO3_L-to-H_P Parameter: Tissue Value: Leaf
  misc_feature: MA Experiment 20001757 PARAMETER Experiment Name: At_50mM_NH4NO3_L-to-H_P Parameter: Treatment Value: 50mM NH4NO3 vs 100mM Mannitol
  misc_feature: MA Experiment ID: 20001911 Result: Down-regulated in Transcription
  misc_feature: MA Experiment 20001911 PARAMETER Experiment Name: At_Drought_Reproduction_P Parameter: Age (day) Value: 40
  misc_feature: MA Experiment 20001911 PARAMETER Experiment Name: At_Drought_Reproduction_P Parameter: Organism Value: A. thaliana
  misc_feature: MA Experiment 20001911 PARAMETER Experiment Name: At_Drought_Reproduction_P Parameter: Plant Line Value: WS
  misc_feature: MA Experiment 20001911 PARAMETER Experiment Name: At_Drought_Reproduction_P Parameter: Timepoint (day) Value: 10
  misc_feature: MA Experiment 20001911 PARAMETER Experiment Name: At_Drought_Reproduction_P Parameter: Tissue Value: Flowers
  misc_feature: MA Experiment 20001911 PARAMETER Experiment Name: At_Drought_Reproduction_P Parameter: Treatment Value: Drought vs. No Drought
atgaaaggaggaaagatggataaattgaagccaataatagcaatcatatcactccaatttggatatgcaggcatgtacatcattactatggtctccttcaagcatggcatgaaccattggatccttgctacttaccgacatgtcgtcgccacaattgtcatagctccttttgctctcattctcgagaggaaaataaggcctaagatgacatggccattgttccttaggattcttgcccttggattcctagaaccacttttggaccagaacttgtactacataggaatgaaagccacgtcagcaacgtatagttctgcctttgttaatgcacttcccgccattaccttcataatggctgtcattttcaggatagaaactgtaaatttgaagaagacacgaagtcttgcaaaagtgattggaacagcaataactgtgggaggagcaatggttatgacgttgtacaaaggtccagccattgagctctttaagactgctcatagctctttacacggcggctcctcgggcacctcctccgagaccactgatcagaattgggttaccggaactctagcggttatgggtagtatcaccacttgggcaggtttcttcattctacaatcgttcacgttgaaaaaatatccggctgagctttcgctagtgatgtggatttgtgccatgggaacggtcttaaacaccatcgcttcgctcataatggtgcgcgacgtaagcgcatggaaagtcggtatggactcgggcacacttgcggctgtttactccggagtggtttgttcgggtatggcgtattacatacaaagcattgtgattagggaacgaggtccggtttttacgacatcgtttagtcctatgtgcatgatcatcactgctttcctcggcgtgttagttttggctgaaaagattcaccttggaagtataatcggggcgatttttatcgtcttcgggctatatagcgttgtgtgggggaaagctaaggacgaagtgatatcggtggaagagaaaataggaatgcaggagctgccgatcaccaacacatcgacaaaagtggagggtggtggtattaccagtgaagtaaacgaaggtgtgactaacaatacccaagtgtaa

SEQ ID NO: 89104 - protein, 373 aa, Arabidopsis thaliana
  peptide (1)..(373): Ceres Seq. ID no. 12715365
  misc_feature (20)..(153): Pfam Name: Integral membrane protein DUF6 Pfam Description: Integral membrane protein DUF6
  misc_feature (1)..(373): Homolog of NCBI NO: 30680708 NR Description: nodulin MtN21 family protein [Arabidopsis
  misc_feature (6)..(373): Homolog of NCBI NO: 7486870 NR Description: hypothetical protein T12G13.140 - Arabidopsis
  misc_feature (1)..(371): Homolog of NCBI NO: 15219448 NR Description: nodulin protein, putative; protein id: supported by cDNA: 149985., supported by cDNA: gi_15146329
  misc_feature (6)..(371): Homolog of NCBI NO: 21553533 NR Description: nodulin protein, putative [Arabidopsis thaliana]
  misc_feature (1)..(363): Homolog of NCBI NO: 15219123 NR Description: nodulin-like protein; protein id: At1g21890.1,
  misc_feature (1)..(363): Homolog of NCBI NO: 17529004 NR Description: putative nodulin protein [Arabidopsis thaliana]
  misc_feature (1)..(363): Homolog of NCBI NO: 6552743 NR Description: T26F17.11 [Arabidopsis thaliana]
  misc_feature (3)..(355): Homolog of NCBI NO: 34908998 NR Description: nodulin-like protein [Oryza sativa (japonica
  misc_feature (10)..(348): Homolog of NCBI NO: 15225480 NR Description: nodulin-like protein; protein id: At2g39510.1
  misc_feature (6)..(351): Homolog of NCBI NO: 21593603 NR Description: nodulin-like protein [Arabidopsis thaliana]
MKGGKMDKLKPIIAIISLQFGYAGMYIITMVSFKHGMNHWILATYRHVVATIVIAPFALILERKIRPKMTWPLFLRILALGFLEPLLDQNLYYIGMKATSATYSSAFVNALPAITFIMAVIFRIETVNLKKTRSLAKVIGTAITVGGAMVMTLYKGPAIELFKTAHSSLHGGSSGTSSETTDQNWVTGTLAVMGSITTWAGFFILQSFTLKKYPAELSLVMWICAMGTVLNTIASLIMVRDVSAWKVGMDSGTLAAVYSGVVCSGMAYYIQSIVIRERGPVFTTSFSPMCMIITAFLGVLVLAEKIHLGSIIGAIFIVFGLYSVVWGKAKDEVISVEEKIGMQELPITNTSTKVEGGGITSEVNEGVTNNTQV

SEQ ID NO: 89105 - protein, 368 aa, Arabidopsis thaliana; identical to SEQ ID NO: 82203
  peptide (1)..(368): Ceres Seq. ID no. 12715366
  misc_feature (15)..(148): Pfam Name: Integral membrane protein DUF6 Pfam Description: Integral membrane protein DUF6
  misc_feature (1)..(368): Homolog of NCBI NO: 30680708 NR Description: nodulin MtN21 family protein [Arabidopsis
  misc_feature (1)..(368): Homolog of NCBI NO: 7486870 NR Description: hypothetical protein T12G13.140 - Arabidopsis
  misc_feature (1)..(366): Homolog of NCBI NO: 15219448 NR Description: nodulin protein, putative; protein id: supported by cDNA: 149985., supported by cDNA: gi_15146329
  misc_feature (1)..(366): Homolog of NCBI NO: 21553533 NR Description: nodulin protein, putative [Arabidopsis thaliana]
  misc_feature (1)..(358): Homolog of NCBI NO: 15219123 NR Description: nodulin-like protein; protein id: At1g21890.1,
  misc_feature (1)..(358): Homolog of NCBI NO: 17529004 NR Description: putative nodulin protein [Arabidopsis thaliana]
  misc_feature (1)..(358): Homolog of NCBI NO: 6552743 NR Description: T26F17.11 [Arabidopsis thaliana]
  misc_feature (1)..(350): Homolog of NCBI NO: 34908998 NR Description: nodulin-like protein [Oryza sativa (japonica
  misc_feature (5)..(343): Homolog of NCBI NO: 15225480 NR Description: nodulin-like protein; protein id: At2g39510.1
  misc_feature (1)..(346): Homolog of NCBI NO: 21593603 NR Description: nodulin-like protein [Arabidopsis thaliana]

SEQ ID NO: 89106 - protein, 349 aa, Arabidopsis thaliana; identical to SEQ ID NO: 82204
  peptide (1)..(349): Ceres Seq. ID no. 12715367
  misc_feature (1)..(129): Pfam Name: Integral membrane protein DUF6 Pfam Description: Integral membrane protein DUF6
  misc_feature (1)..(349): Homolog of NCBI NO: 30680708 NR Description: nodulin MtN21 family protein [Arabidopsis
  misc_feature (1)..(349): Homolog of NCBI NO: 7486870 NR Description: hypothetical protein T12G13.140 - Arabidopsis
  misc_feature (1)..(347): Homolog of NCBI NO: 15219448 NR Description: nodulin protein, putative; protein id: supported by cDNA: 149985., supported by cDNA: gi_15146329
  misc_feature (1)..(347): Homolog of NCBI NO: 21553533 NR Description: nodulin protein, putative [Arabidopsis thaliana]
  misc_feature (1)..(339): Homolog of NCBI NO: 15219123 NR Description: nodulin-like protein; protein id: At1g21890.1,
  misc_feature (1)..(339): Homolog of NCBI NO: 17529004 NR Description: putative nodulin protein [Arabidopsis thaliana]
  misc_feature (1)..(339): Homolog of NCBI NO: 6552743 NR Description: T26F17.11 [Arabidopsis thaliana]
  misc_feature (1)..(331): Homolog of NCBI NO: 34908998 NR Description: nodulin-like protein [Oryza sativa (japonica
  misc_feature (1)..(324): Homolog of NCBI NO: 15225480 NR Description: nodulin-like protein; protein id: At2g39510.1
  misc_feature (1)..(327): Homolog of NCBI NO: 21593603 NR Description: nodulin-like protein [Arabidopsis thaliana]

SEQ ID NO: 89107 - DNA, 1441 bp, Arabidopsis thaliana
  misc_feature (1)..(1441): Ceres Seq. ID no. 12715372
  misc_feature: MA Experiment ID: 108434 Result: Down-regulated in Transcription
  misc_feature: MA Experiment 108434 PARAMETER Experiment Name: At_Root_Tips_cDNA_P Parameter: Tissue Value: Root Tips
  misc_feature: MA Experiment ID: 108462 Result: Down-regulated in Transcription
  misc_feature: MA Experiment 108462 PARAMETER Experiment Name: At_Germinating_Seeds_cDNA_P Parameter: Age (day) Value: 2 vs. 0
  misc_feature: MA Experiment 108462 PARAMETER Experiment Name: At_Germinating_Seeds_cDNA_P Parameter: Tissue Value: Germinating Seeds
  misc_feature: MA Experiment ID: 108464 Result: Down-regulated in Transcription
  misc_feature: MA Experiment 108464 PARAMETER Experiment Name: At_Germinating_Seeds_cDNA_P Parameter: Age (day) Value: 4 vs. 0
  misc_feature: MA Experiment 108464 PARAMETER Experiment Name: At_Germinating_Seeds_cDNA_P Parameter: Tissue Value: Germinating Seeds
  misc_feature: MA Experiment ID: 108474 Result: Down-regulated in Transcription
  misc_feature: MA Experiment 108474 PARAMETER Experiment Name: At_Drought_Flowers_cDNA_P Parameter: Timepoint (hr) Value: null
  misc_feature: MA Experiment 108474 PARAMETER Experiment Name: At_Drought_Flowers_cDNA_P Parameter: Treatment Value: Drought vs. No Drought
  misc_feature: MA Experiment ID: 108488 Result: Down-regulated in Transcription
  misc_feature: MA Experiment ID: 108579 Result: Down-regulated in Transcription
  misc_feature: MA Experiment 108579 PARAMETER Experiment Name: At_4deg_Cold_cDNA_P Parameter: Temperature (deg C) Value: 4 vs. 22
  misc_feature: MA Experiment 108579 PARAMETER Experiment Name: At_4deg_Cold_cDNA_P Parameter: Timepoint (hr) Value: 6
  misc_feature: MA Experiment 108579 PARAMETER Experiment Name: At_4deg_Cold_cDNA_P Parameter: Tissue Value: Aerial
  misc_feature: MA Experiment ID: 108605 Result: Up-regulated in Transcription
  misc_feature: MA Experiment 108605 PARAMETER Experiment Name: At_100uM_ABA_cDNA_P Parameter: Timepoint (hr) Value: 6
  misc_feature: MA Experiment 108605 PARAMETER Experiment Name: At_100uM_ABA_cDNA_P Parameter: Tissue Value: Aerial
  misc_feature: MA Experiment 108605 PARAMETER Experiment Name: At_100uM_ABA_cDNA_P Parameter: Treatment Value: 100uM ABA vs. No Treatment
  misc_feature: MA Experiment ID: 20000071 Result: Up-regulated in Transcription
  misc_feature: MA Experiment 20000071 PARAMETER Experiment Name: At_100uM_ABA_Mutants_cDNA_P Parameter: Plant Line Value: CS8104
  misc_feature: MA Experiment 20000071 PARAMETER Experiment Name: At_100uM_ABA_Mutants_cDNA_P Parameter: Timepoint (hr) Value: 6
  misc_feature: MA Experiment 20000071 PARAMETER Experiment Name: At_100uM_ABA_Mutants_cDNA_P Parameter: Tissue Value: Aerial
  misc_feature: MA Experiment 20000071 PARAMETER Experiment Name: At_100uM_ABA_Mutants_cDNA_P Parameter: Treatment Value: 100uM ABA vs. No Treatment
  misc_feature: MA Experiment ID: 20000072 Result: Up-regulated in Transcription
  misc_feature: MA Experiment 20000072 PARAMETER Experiment Name: At_100uM_ABA_Mutants_cDNA_P Parameter: Plant Line Value: CS8105
  misc_feature: MA Experiment 20000072 PARAMETER Experiment Name: At_100uM_ABA_Mutants_cDNA_P Parameter: Timepoint (hr) Value: 6
  misc_feature: MA Experiment 20000072 PARAMETER Experiment Name: At_100uM_ABA_Mutants_cDNA_P Parameter: Tissue Value: Aerial
  misc_feature: MA Experiment 20000072 PARAMETER Experiment Name: At_100uM_ABA_Mutants_cDNA_P Parameter: Treatment Value: 100uM ABA vs. No Treatment
  misc_feature: MA Experiment ID: 20000089 Result: Down-regulated in Transcription
  misc_feature: MA Experiment ID: 20000117 Result: Up-regulated in Transcription
  misc_feature: MA Experiment 20000117 PARAMETER Experiment Name: At_100uM_ABA_Mutants_cDNA_P Parameter: Plant Line Value: Columbia
  misc_feature: MA Experiment 20000117 PARAMETER Experiment Name: At_100uM_ABA_Mutants_cDNA_P Parameter: Timepoint (hr) Value: 6
  misc_feature: MA Experiment 20000117 PARAMETER Experiment Name: At_100uM_ABA_Mutants_cDNA_P Parameter: Tissue Value: Aerial
  misc_feature: MA Experiment 20000117 PARAMETER Experiment Name: At_100uM_ABA_Mutants_cDNA_P Parameter: Treatment Value: 100uM ABA vs. No Treatment
  misc_feature: MA Experiment ID: 20000169 Result: Up-regulated in Transcription
  misc_feature: MA Experiment 20000169 PARAMETER Experiment Name: At_100uM_ABA_P Parameter: Age (day) Value: 14
  misc_feature: MA Experiment 20000169 PARAMETER Experiment Name: At_100uM_ABA_P Parameter: Organism Value: A. thaliana
  misc_feature: MA Experiment 20000169 PARAMETER Experiment Name: At_100uM_ABA_P Parameter: Plant Line Value: WS
  misc_feature: MA Experiment 20000169 PARAMETER Experiment Name: At_100uM_ABA_P Parameter: Timepoint (hr) Value: 6
  misc_feature: MA Experiment 20000169 PARAMETER Experiment Name: At_100uM_ABA_P Parameter: Tissue Value: Aerial
  misc_feature: MA Experiment 20000169 PARAMETER Experiment Name: At_100uM_ABA_P Parameter: Treatment Value: 100uM ABA vs. No Treatment
  misc_feature: MA Experiment ID: 20000179 Result: Up-regulated in Transcription
  misc_feature: MA Experiment 20000179 PARAMETER Experiment Name: At_Germinating_Seeds_P Parameter: Age (hr) Value: 6 vs. 0
  misc_feature: MA Experiment 20000179 PARAMETER Experiment Name: At_Germinating_Seeds_P Parameter: Tissue Value: Germinating Seeds
  misc_feature: MA Experiment ID: 20000227 Result: Down-regulated in Transcription
  misc_feature: MA Experiment 20000227 PARAMETER Experiment Name: At_Root-Tips-vs-Tops_P Parameter: Tissue Value: Root Tips vs. Root Tops
  misc_feature: MA Experiment ID: 20000234 Result: Down-regulated in Transcription
  misc_feature: MA Experiment 20000234 PARAMETER Experiment Name: At_Siliques_P Parameter: Age (day) Value: 21
  misc_feature: MA Experiment 20000234 PARAMETER Experiment Name: At_Siliques_P Parameter: Organism Value: A. thaliana
  misc_feature: MA Experiment 20000234 PARAMETER Experiment Name: At_Siliques_P Parameter: Plant Line Value: WS
  misc_feature: MA Experiment 20000234 PARAMETER Experiment Name: At_Siliques_P Parameter: Tissue Value: Less Than 5mm Siliques vs. Whole Plant
  misc_feature: MA Experiment ID: 20000264 Result: Up-regulated in Transcription
  misc_feature: MA Experiment 20000264 PARAMETER Experiment Name: At_Open_Flower_P Parameter: Age (day) Value: 21
  misc_feature: MA Experiment 20000264 PARAMETER Experiment Name: At_Open_Flower_P Parameter: Plant Line Value: WS
  misc_feature: MA Experiment 20000264 PARAMETER Experiment Name: At_Open_Flower_P Parameter: Tissue Value: Open Flower vs. Whole Plant
  misc_feature: MA Experiment ID: 20000269 Result: Down-regulated in Transcription
  misc_feature: MA Experiment 20000269 PARAMETER Experiment Name: At_1mM_KNO3_L-vs-H_Roots_P Parameter: Age (day) Value: 7,10,12
  misc_feature: MA Experiment 20000269 PARAMETER Experiment Name: At_1mM_KNO3_L-vs-H_Roots_P Parameter: Organism Value: A. thaliana
  misc_feature: MA Experiment 20000269 PARAMETER Experiment Name: At_1mM_KNO3_L-vs-H_Roots_P Parameter: Plant Line Value: WS
  misc_feature: MA Experiment 20000269 PARAMETER Experiment Name: At_1mM_KNO3_L-vs-H_Roots_P Parameter: Timepoint (day) Value: 7,10,12
  misc_feature: MA Experiment 20000269 PARAMETER Experiment Name: At_1mM_KNO3_L-vs-H_Roots_P Parameter: Tissue Value: Roots
  misc_feature: MA Experiment 20000269 PARAMETER Experiment Name: At_1mM_KNO3_L-vs-H_Roots_P Parameter: Treatment Value: 1mM KNO3 vs. 50mM KNO3
  misc_feature: MA Experiment ID: 20000436 Result: Up-regulated in Transcription
  misc_feature: MA Experiment 20000436 PARAMETER Experiment Name: At_Drought_P Parameter: Age (day) Value: 7
  misc_feature: MA Experiment 20000436 PARAMETER Experiment Name: At_Drought_P Parameter: Organism Value: A. thaliana
  misc_feature: MA Experiment 20000436 PARAMETER Experiment Name: At_Drought_P Parameter: Plant Line Value: WS
  misc_feature: MA Experiment 20000436 PARAMETER Experiment Name: At_Drought_P Parameter: Timepoint (hr) Value: 12
  misc_feature: MA Experiment 20000436 PARAMETER Experiment Name: At_Drought_P Parameter: Tissue Value: Whole Plant
  misc_feature: MA Experiment 20000436 PARAMETER Experiment Name: At_Drought_P Parameter: Treatment Value: Drought vs. No Drought
  misc_feature: MA Experiment ID: 20000451 Result: Down-regulated in Transcription
  misc_feature: MA Experiment 20000451 PARAMETER Experiment Name: At_CS6879_Shoots-Roots_P Parameter: Age (day) Value: 14
  misc_feature: MA Experiment 20000451 PARAMETER Experiment Name: At_CS6879_Shoots-Roots_P Parameter: Organism Value: A. thaliana
  misc_feature: MA Experiment 20000451 PARAMETER Experiment Name: At_CS6879_Shoots-Roots_P Parameter: Plant Line Value: CS6879 vs. WS
  misc_feature: MA Experiment 20000451 PARAMETER Experiment Name: At_CS6879_Shoots-Roots_P Parameter: Tissue Value: Roots
  misc_feature: MA Experiment ID: 20000456 Result: Down-regulated in Transcription
  misc_feature: MA Experiment 20000456 PARAMETER Experiment Name: At_100uM_BA_P Parameter: Age (day) Value: 14
  misc_feature: MA Experiment 20000456 PARAMETER Experiment Name: At_100uM_BA_P Parameter: Organism Value: A. thaliana
  misc_feature: MA Experiment 20000456 PARAMETER Experiment Name: At_100uM_BA_P Parameter: Plant Line Value: WS
  misc_feature: MA Experiment 20000456 PARAMETER Experiment Name: At_100uM_BA_P Parameter: Timepoint (hr) Value: 6
  misc_feature: MA Experiment 20000456 PARAMETER Experiment Name: At_100uM_BA_P Parameter: Tissue Value: Aerial
  misc_feature: MA Experiment 20000456 PARAMETER Experiment Name: At_100uM_BA_P Parameter: Treatment Value: 100uM BA vs. No Treatment
  misc_feature: MA Experiment ID: 20000573 Result: Up-regulated in Transcription
  misc_feature: MA Experiment 20000573 PARAMETER Experiment Name: At_100uM_ABA_Mutants__P Parameter: Organism Value: A. thaliana
  misc_feature: MA Experiment 20000573 PARAMETER Experiment Name: At_100uM_ABA_Mutants__P Parameter: Plant Line Value: CS22 vs. Ler wt
  misc_feature: MA Experiment 20000573 PARAMETER Experiment Name: At_100uM_ABA_Mutants__P Parameter: Timepoint (hr) Value: N/A
  misc_feature: MA Experiment 20000573 PARAMETER Experiment Name: At_100uM_ABA_Mutants__P Parameter: Tissue Value: Whole Plant
  misc_feature: MA Experiment 20000573 PARAMETER Experiment Name: At_100uM_ABA_Mutants__P Parameter: Treatment Value: None
  misc_feature: MA Experiment ID: 20000709 Result: Down-regulated in Transcription
  misc_feature: MA Experiment 20000709 PARAMETER Experiment Name: At_15mM_NH4NO3_L-to-H_P Parameter: Age (hr) Value: 14
  misc_feature: MA Experiment 20000709 PARAMETER Experiment Name: At_15mM_NH4NO3_L-to-H_P Parameter: Organism Value: A. thaliana
  misc_feature: MA Experiment 20000709 PARAMETER Experiment Name: At_15mM_NH4NO3_L-to-H_P Parameter: Plant Line Value: WS
  misc_feature: MA Experiment 20000709 PARAMETER Experiment Name: At_15mM_NH4NO3_L-to-H_P Parameter: Timepoint (hr) Value: 4
  misc_feature: MA Experiment 20000709 PARAMETER Experiment Name: At_15mM_NH4NO3_L-to-H_P Parameter: Tissue Value: Aerial
  misc_feature: MA Experiment 20000709 PARAMETER Experiment Name: At_15mM_NH4NO3_L-to-H_P Parameter: Treatment Value: 15mM NH4NO3 vs. 30mM Mannitol
  misc_feature: MA Experiment ID: 20000794 Result: Up-regulated in Transcription
  misc_feature: MA Experiment 20000794 PARAMETER Experiment Name: At_Petals_P Parameter: Age (day) Value: 23-25 days
  misc_feature: MA Experiment 20000794 PARAMETER Experiment Name: At_Petals_P Parameter: Plant Line Value: WS
  misc_feature: MA Experiment 20000794 PARAMETER Experiment Name: At_Petals_P Parameter: Tissue Value: Petals vs. Whole plant
  misc_feature: MA Experiment ID: 20001247 Result: Up-regulated in Transcription
  misc_feature: MA Experiment 20001247 PARAMETER Experiment Name: At_Far-red-induction_P Parameter: Age (day) Value: 7
  misc_feature: MA Experiment 20001247 PARAMETER Experiment Name: At_Far-red-induction_P Parameter: Light Value: Far-red vs. White
  misc_feature: MA Experiment 20001247 PARAMETER Experiment Name: At_Far-red-induction_P Parameter: Organism Value: A. thaliana
  misc_feature: MA Experiment 20001247 PARAMETER Experiment Name: At_Far-red-induction_P Parameter: Plant Line Value: Columbia
  misc_feature: MA Experiment 20001247 PARAMETER Experiment Name: At_Far-red-induction_P Parameter: Timepoint (hr) Value: 1
  misc_feature: MA Experiment 20001247 PARAMETER Experiment Name: At_Far-red-induction_P Parameter: Tissue Value: Whole Plant
  misc_feature: MA Experiment ID: 20001450 Result: Up-regulated in Transcription
  misc_feature: MA Experiment 20001450 PARAMETER Experiment Name: At_Far-red-induction_P Parameter: Age (day) Value: 7
  misc_feature: MA Experiment 20001450 PARAMETER Experiment Name: At_Far-red-induction_P Parameter: Light Value: Far-red vs. White
  misc_feature: MA Experiment 20001450 PARAMETER Experiment Name: At_Far-red-induction_P Parameter: Organism Value: A. thaliana
  misc_feature: MA Experiment 20001450 PARAMETER Experiment Name: At_Far-red-induction_P Parameter: Plant Line Value: Columbia
  misc_feature: MA Experiment 20001450 PARAMETER Experiment Name: At_Far-red-induction_P Parameter: Timepoint (hr) Value: 8
  misc_feature: MA Experiment 20001450 PARAMETER Experiment Name: At_Far-red-induction_P Parameter: Tissue Value: Whole Plant
  misc_feature: MA Experiment ID: 20001451 Result: Up-regulated in Transcription
  misc_feature: MA Experiment 20001451 PARAMETER Experiment Name: At_Far-red-induction_P Parameter: Age (day) Value: 7
  misc_feature: MA Experiment 20001451 PARAMETER Experiment Name: At_Far-red-induction_P Parameter: Light Value: Far-red vs. White
  misc_feature: MA Experiment 20001451 PARAMETER Experiment Name: At_Far-red-induction_P Parameter: Organism Value: A. thaliana
  misc_feature: MA Experiment 20001451 PARAMETER Experiment Name: At_Far-red-induction_P Parameter: Plant Line Value: Columbia
  misc_feature: MA Experiment 20001451 PARAMETER Experiment Name: At_Far-red-induction_P Parameter: Timepoint (hr) Value: 24
  misc_feature: MA Experiment 20001451 PARAMETER Experiment Name: At_Far-red-induction_P Parameter: Tissue Value: Whole Plant
  misc_feature: MA Experiment ID: 20001557 Result: Down-regulated in Transcription
  misc_feature: MA Experiment 20001557 PARAMETER Experiment Name: At_Drought_Soil_Dry_P Parameter: Age (day) Value: 27
  misc_feature: MA Experiment 20001557 PARAMETER Experiment Name: At_Drought_Soil_Dry_P Parameter: Organism Value: A. thaliana
  misc_feature: MA Experiment 20001557 PARAMETER Experiment Name: At_Drought_Soil_Dry_P Parameter: Plant Line Value: WS
  misc_feature: MA Experiment 20001557 PARAMETER Experiment Name: At_Drought_Soil_Dry_P Parameter: Post Timepoint (hr) Value: 3
  misc_feature: MA Experiment 20001557 PARAMETER Experiment Name: At_Drought_Soil_Dry_P Parameter: Post-Treatment Value: Re-Water vs. No Drought
  misc_feature: MA Experiment 20001557 PARAMETER Experiment Name: At_Drought_Soil_Dry_P Parameter: Timepoint (day) Value: 13
  misc_feature: MA Experiment 20001557 PARAMETER Experiment Name: At_Drought_Soil_Dry_P Parameter: Treatment Value: Drought vs. No Drought
  misc_feature: MA Experiment ID: 20001558 Result: Down-regulated in Transcription
  misc_feature: MA Experiment 20001558 PARAMETER Experiment Name: At_Drought_Soil_Dry_P Parameter: Age (day) Value: 27
  misc_feature: MA Experiment 20001558 PARAMETER Experiment Name: At_Drought_Soil_Dry_P Parameter: Organism Value: A. thaliana
  misc_feature: MA Experiment 20001558 PARAMETER Experiment Name: At_Drought_Soil_Dry_P Parameter: Plant Line Value: WS
  misc_feature: MA Experiment 20001558 PARAMETER Experiment Name: At_Drought_Soil_Dry_P Parameter: Post Timepoint (hr) Value: 6
  misc_feature: MA Experiment 20001558 PARAMETER Experiment Name: At_Drought_Soil_Dry_P Parameter: Post-Treatment Value: Re-Water vs. No Drought
  misc_feature: MA Experiment 20001558 PARAMETER Experiment Name: At_Drought_Soil_Dry_P Parameter: Timepoint (day) Value: 13
  misc_feature: MA Experiment 20001558 PARAMETER Experiment Name: At_Drought_Soil_Dry_P Parameter: Treatment Value: Drought vs. No Drought
  misc_feature: MA Experiment ID: 20001757 Result: Down-regulated in Transcription
  misc_feature: MA Experiment 20001757 PARAMETER Experiment Name: At_50mM_NH4NO3_L-to-H_P Parameter: Timepoint (hr) Value: 6
  misc_feature: MA Experiment 20001757 PARAMETER Experiment Name: At_50mM_NH4NO3_L-to-H_P Parameter: Tissue Value: Leaf
  misc_feature: MA Experiment 20001757 PARAMETER Experiment Name: At_50mM_NH4NO3_L-to-H_P Parameter: Treatment Value: 50mM NH4NO3 vs 100mM Mannitol
  misc_feature: MA Experiment ID: 20001905 Result: Up-regulated in Transcription
  misc_feature: MA Experiment 20001905 PARAMETER Experiment Name: At_Drought_Reproduction_P Parameter: Age (day) Value: 40
  misc_feature: MA Experiment 20001905 PARAMETER Experiment Name: At_Drought_Reproduction_P Parameter: Organism Value: A. thaliana
  misc_feature: MA Experiment 20001905 PARAMETER Experiment Name: At_Drought_Reproduction_P Parameter: Plant Line Value: WS
  misc_feature: MA Experiment 20001905 PARAMETER Experiment Name: At_Drought_Reproduction_P Parameter: Timepoint (day) Value: 10
  misc_feature: MA Experiment 20001905 PARAMETER Experiment Name: At_Drought_Reproduction_P Parameter: Tissue Value: Rosettes
  misc_feature: MA Experiment 20001905 PARAMETER Experiment Name: At_Drought_Reproduction_P Parameter: Treatment Value: Drought vs. No Drought
  misc_feature: MA Experiment ID: 20001906 Result: Up-regulated in Transcription
  misc_feature: MA Experiment 20001906 PARAMETER Experiment Name: At_Drought_Reproduction_P Parameter: Age (day) Value: 35
  misc_feature: MA Experiment 20001906 PARAMETER Experiment Name: At_Drought_Reproduction_P Parameter: Organism Value: A. thaliana
  misc_feature: MA Experiment 20001906 PARAMETER Experiment Name: At_Drought_Reproduction_P Parameter: Plant Line Value: WS
  misc_feature: MA Experiment 20001906 PARAMETER Experiment Name: At_Drought_Reproduction_P Parameter: Timepoint (day) Value: 5
  misc_feature: MA Experiment 20001906 PARAMETER Experiment Name: At_Drought_Reproduction_P Parameter: Tissue Value: Siliques
  misc_feature: MA Experiment 20001906 PARAMETER Experiment Name: At_Drought_Reproduction_P Parameter: Treatment Value: Drought vs. No Drought
atagtttttgtttttccttttgctactctacatgactctcgatcgagggaaaaaactagttctcatgtttatccaaaactctatatcacctttttgatgtttttatataagaagacttgttcatccatactctttcaataaccttgacagaaaaaaaaaataaacacaaaatttcaataaccatggagggtgttagtgcaactatgcataagttaaggccttatttgttaatgatctttttgcaatttggagcagcaggaacatatattgttattatggccactcttaaccaaggccagaaccgttacgtcgtaattgtgtatcgtaatcttgtggctgctcttgtccttgcaccttttgcactcatctttgaaaggaaagtgaggccgaagatgacactatcggttttgtggaaaataatggcacttggtttcttagagccagtcttggatcagggttttggttacttggggatgaacatgacatcagcaacatatacatctgcgatcatgaacattcttccttctgtcacatttataatagcttggattttaagaatggagaaagttaacatagcggaggtacgaagcaaagcaaagatcattgggacattggtgggtcttggaggggcactagtaatgacattgtacaaaggtccgcttattcctttaccgtggtctaacccgaatatggatcaacaaaacggacatacaaataattcacaagaccataacaattgggttgttggaaccttgttgattctcctcggttgtgttgcttggtctggtttttatgttttacagtcgataacaataaagacgtaccctgccgatctttcattatcagccttaatatgcctagccggggctgtccaaagcttcgcggtagcgcttgtggtggagagacaccctagcggatgggcggttggttgggatgcaaggctttttgcacctctttatacaggaatagttagctcggggataacgtactatgttcaagggatggttatgaagacgagagggccagtttttgttactgcctttaaccctctctgcatgattcttgtagctctcattgcctcttttattcttcatgaacaaatccatttcggatgtgtaataggaggggcagtgatcgccgcgggtttgtatatggttgtttggggaaaaggaaaagactatgaagtatccggattagatatccttgaaaagaatagcctccaagaattgcctatcacaactaaaagtgaggatgacaacaaattggtttcttctataagcgacaacagcaatgtgaccattcctggtggtgcgcatagtaacacatctggaatataagtgaagaaagcatttctcgagttataaatacatatttgtattcgactaaaataaatacatatgtatttgtatgcatttggtatgaaatacatgaaattattttt

SEQ ID NO: 89108 - protein, 384 aa, Arabidopsis thaliana
  peptide (1)..(384): Ceres Seq. ID no. 12715373
  misc_feature (198)..(327): Pfam Name: Integral membrane protein DUF6 Pfam Description: Integral membrane protein DUF6
  misc_feature (1)..(384): Homolog of NCBI NO: 15236455 NR Description: nodulin-like protein; protein id: At4g08290.1, by cDNA: 40485. [Arabidopsis thaliana] >gi|7486869|pir||T10556
  misc_feature (1)..(384): Homolog of NCBI NO: 26452235 NR Description: putative nodulin [Arabidopsis thaliana]
  misc_feature (8)..(384): Homolog of NCBI NO: 21593603 NR Description: nodulin-like protein [Arabidopsis thaliana]
  misc_feature (12)..(353): Homolog of NCBI NO: 15225480 NR Description: nodulin-like protein; protein id: At2g39510.1
  misc_feature (8)..(363): Homolog of NCBI NO: 15224291 NR Description: nodulin-like protein; protein id: At2g37460.1, by cDNA: 16393., supported by cDNA: gi_14334857, supported by
  misc_feature (8)..(359): Homolog of NCBI NO: 21553533 NR Description: nodulin protein, putative [Arabidopsis thaliana]
  misc_feature (74)..(358): Homolog of NCBI NO: 37532392 NR Description: putative nodulin-like protein [Oryza sativa
  misc_feature (15)..(67): Homolog of NCBI NO: 37532392 NR Description: putative nodulin-like protein [Oryza sativa
  misc_feature (1)..(372): Homolog of NCBI NO: 15219448 NR Description: nodulin protein, putative; protein id: supported by cDNA: 149985., supported by cDNA: gi_15146329
  misc_feature (17)..(363): Homolog of NCBI NO: 21553757 NR Description: nodulin-like protein [Arabidopsis thaliana]
MEGVSATMHKLRPYLLMIFLQFGAAGTYIVIMATLNQGQNRYVVIVYRNLVAALVLAPFALIFERKVRPKMTLSVLWKIMALGFLEPVLDQGFGYLGMNMTSATYTSAIMNILPSVTFIIAWILRMEKVNIAEVRSKAKIIGTLVGLGGALVMTLYKGPLIPLPWSNPNMDQQNGHTNNSQDHNNWVVGTLLILLGCVAWSGFYVLQSITIKTYPADLSLSALICLAGAVQSFAVALVVERHPSGWAVGWDARLFAPLYTGIVSSGITYYVQGMVMKTRGPVFVTAFNPLCMILVALIASFILHEQIHFGCVIGGAVIAAGLYMVVWGKGKDYEVSGLDILEKNSLQELPITTKSEDDNKLVSSISDNSNVTIPGGAHSNTSGI

SEQ ID NO: 89109 - protein, 377 aa, Arabidopsis thaliana
  peptide (1)..(377): Ceres Seq. ID no. 12715374
  misc_feature (191)..(320): Pfam Name: Integral membrane protein DUF6 Pfam Description: Integral membrane protein DUF6
  misc_feature (1)..(377): Homolog of NCBI NO: 15236455 NR Description: nodulin-like protein; protein id: At4g08290.1, by cDNA: 40485. [Arabidopsis thaliana] >gi|7486869|pir||T10556
  misc_feature (1)..(377): Homolog of NCBI NO: 26452235 NR Description: putative nodulin [Arabidopsis thaliana]
  misc_feature (1)..(377): Homolog of NCBI NO: 21593603 NR Description: nodulin-like protein [Arabidopsis thaliana]
  misc_feature (5)..(346): Homolog of NCBI NO: 15225480 NR Description: nodulin-like protein; protein id: At2g39510.1
  misc_feature (1)..(356): Homolog of NCBI NO: 15224291 NR Description: nodulin-like protein; protein id: At2g37460.1, by cDNA: 16393., supported by cDNA: gi_14334857, supported by
  misc_feature (1)..(352): Homolog of NCBI NO: 21553533 NR Description: nodulin protein, putative [Arabidopsis thaliana]
  misc_feature (67)..(351): Homolog of NCBI NO: 37532392 NR Description: putative nodulin-like protein [Oryza sativa
  misc_feature (8)..(60): Homolog of NCBI NO: 37532392 NR Description: putative nodulin-like protein [Oryza sativa
  misc_feature (1)..(365): Homolog of NCBI NO: 15219448 NR Description: nodulin protein, putative; protein id: supported by cDNA: 149985., supported by cDNA: gi_15146329
  misc_feature (10)..(356): Homolog of NCBI NO: 21553757 NR Description: nodulin-like protein [Arabidopsis thaliana]
MHKLRPYLLMIFLQFGAAGTYIVIMATLNQGQNRYVVIVYRNLVAALVLAPFALIFERKVRPKMTLSVLWKIMALGFLEPVLDQGFGYLGMNMTSATYTSAIMNILPSVTFIIAWILRMEKVNIAEVRSKAKIIGTLVGLGGALVMTLYKGPLIPLPWSNPNMDQQNGHTNNSQDHNNWVVGTLLILLGCVAWSGFYVLQSITIKTYPADLSLSALICLAGAVQSFAVALVVERHPSGWAVGWDARLFAPLYTGIVSSGITYYVQGMVMKTRGPVFVTAFNPLCMILVALIASFILHEQIHFGCVIGGAVIAAGLYMVVWGKGKDYEVSGLDILEKNSLQELPITTKSEDDNKLVSSISDNSNVTIPGGAHSNTSGI

SEQ ID NO: 89110 - protein, 368 aa, Arabidopsis thaliana
  peptide (1)..(368): Ceres Seq. ID no. 12715375
  misc_feature (182)..(311): Pfam Name: Integral membrane protein DUF6 Pfam Description: Integral membrane protein DUF6
  misc_feature (1)..(368): Homolog of NCBI NO: 15236455 NR Description: nodulin-like protein; protein id: At4g08290.1, by cDNA: 40485. [Arabidopsis thaliana] >gi|7486869|pir||T10556
  misc_feature (1)..(368): Homolog of NCBI NO: 26452235 NR Description: putative nodulin [Arabidopsis thaliana]
  misc_feature (1)..(368): Homolog of NCBI NO: 21593603 NR Description: nodulin-like protein [Arabidopsis thaliana]
  misc_feature (1)..(337): Homolog of NCBI NO: 15225480 NR Description: nodulin-like protein; protein id: At2g39510.1
  misc_feature (1)..(347): Homolog of NCBI NO: 15224291 NR Description: nodulin-like protein; protein id: At2g37460.1, by cDNA: 16393., supported by cDNA: gi_14334857, supported by
  misc_feature (1)..(343): Homolog of NCBI NO: 21553533 NR Description: nodulin protein, putative [Arabidopsis thaliana]
  misc_feature (58)..(342): Homolog of NCBI NO: 37532392 NR Description: putative nodulin-like protein [Oryza sativa
  misc_feature (1)..(51): Homolog of NCBI NO: 37532392 NR Description: putative nodulin-like protein [Oryza sativa
  misc_feature (1)..(356): Homolog of NCBI NO: 15219448 NR Description: nodulin protein, putative; protein id: supported by cDNA: 149985., supported by cDNA: gi_15146329
  misc_feature (1)..(347): Homolog of NCBI NO: 21553757 NR Description: nodulin-like protein [Arabidopsis thaliana]
MIFLQFGAAGTYIVIMATLNQGQNRYVVIVYRNLVAALVLAPFALIFERKVRPKMTLSVLWKIMALGFLEPVLDQGFGYLGMNMTSATYTSAIMNILPSVTFIIAWILRMEKVNIAEVRSKAKIIGTLVGLGGALVMTLYKGPLIPLPWSNPNMDQQNGHTNNSQDHNNWVVGTLLILLGCVAWSGFYVLQSITIKTYPADLSLSALICLAGAVQSFAVALVVERHPSGWAVGWDARLFAPLYTGIVSSGITYYVQGMVMKTRGPVFVTAFNPLCMILVALIASFILHEQIHFGCVIGGAVIAAGLYMVVWGKGKDYEVSGLDILEKNSLQELPITTKSEDDNKLVSSISDNSNVTIPGGAHSNTSGI

SEQ ID NO: 89111 - DNA, 1515 bp, Arabidopsis thaliana
  misc_feature (1)..(1515): Ceres Seq. ID no. 12715401
  misc_feature: MA Experiment ID: 20000307 Result: Up-regulated in Transcription
  misc_feature: MA Experiment 20000307 PARAMETER Experiment Name: At_Germinating_Seeds_Sub_P Parameter: Age (hr) Value: 24 vs. 0
  misc_feature: MA Experiment 20000307 PARAMETER Experiment Name: At_Germinating_Seeds_Sub_P Parameter: Organism Value: A. thaliana
  misc_feature: MA Experiment 20000307 PARAMETER Experiment Name: At_Germinating_Seeds_Sub_P Parameter: Plant Line Value: WS
  misc_feature: MA Experiment 20000307 PARAMETER Experiment Name: At_Germinating_Seeds_Sub_P Parameter: Tissue Value: Germinating Seeds
  misc_feature: MA Experiment ID: 20000314 Result: Up-regulated in Transcription
  misc_feature: MA Experiment 20000314 PARAMETER Experiment Name: At_14day_Shoots-Roots_Sub_P Parameter: Age (day) Value: 14
  misc_feature: MA Experiment 20000314 PARAMETER Experiment Name: At_14day_Shoots-Roots_Sub_P Parameter: Organism Value: A. thaliana
  misc_feature: MA Experiment 20000314 PARAMETER Experiment Name: At_14day_Shoots-Roots_Sub_P Parameter: Plant Line Value: WS
  misc_feature: MA Experiment 20000314 PARAMETER Experiment Name: At_14day_Shoots-Roots_Sub_P Parameter: Tissue Value: Roots vs. Whole Plant
atggggttaggacagtgcatggtttatgttgtcgtcctaagtgccattgcggctacagtgacatcatacccttacacatcccctcaaactccacattacaattctccaagccatgaacacaaaatccctaagtacacaccacatccaaaaccatctatttacagctcttcaccacctccatcatactactctccttctccaaaggttgattacaagtctccaccaccatcatacgtttacagttccccaccaccaccatactactctccgtctccaaaggttgactacaagtccctaccacccccatacgtctacagttccccacccccaccatactactctccttcaccaaaggttaactacaagtctccaccgccaccatacgtctacagctctccaccaccaccatactacagtccatctccaaagggtgactacaagtctccaccacccccatacgtctacagttccccacccccaccatactactctccttctccaaaggttgactacaagtctccaccaccaccatacgtctacagctccccaccaccaccatactacagtccaactccaaaggttgactacaagtccccaccacccccatacgtctacagctccccacccccaccatactacagtccatctccaaaggttgactacaagtctccaccaccaccatacgtctacagctccccacccccaccatactactctccttcaccaaaggttaactacaagtctccaccaccaccatactacagatctccaccaccaccatactacagtccatctccaaaggttgattacaagtccccaccacccccatacgtctacagttccccacccccaccatactactctccttctccaaaggttgactacaagtctccaccaccaccatacgtctacagctccccaccaccaccatactacagtccaactccaaaggttgactacaagtccccaccacccccatacgtctacagctccccaccaccaccatactatagtccatctccaaaggttgactacaagtccccaccacccccatacgtctacagttccccacccccaccatactactctccttcaccaaaagttgactataagtctccaccaccaccatacgtctataactccccacccccaccatattactctccttctccaaaagttgactacaagtctccacctccaccatacatctataactccccacccccaccatattattctccttcaccaaaggtaaactacaaaactccaccaccaccatacgtctatagctccccaccaccaccatactactctccttctccaaaggttaactacaagtccccaccaccaccatatgtctacagctccccacctccaccgtactactccccttctccaaatgtcgactacaaatctcccccaccaccatatgtctacagctcaccacccacaccatactactctccttcttctaaagtcacttacaagtctcccccaccaccatatgtctactag

SEQ ID NO: 89112 - protein, 504 aa, Arabidopsis thaliana; identical to SEQ ID NO: 69894
  peptide (1)..(504): Ceres Seq. ID no. 12715402
  misc_feature (133)..(435): Pfam Name: Formin Homology 2 Domain Pfam Description: Formin Homology 2 Domain
  misc_feature (1)..(504): Homolog of NCBI NO: 15236486 NR Description: extensin-like protein; protein id: At4g08400.1
  misc_feature (1)..(504): Homolog of NCBI NO: 15236488 NR Description: extensin-like protein; protein id: At4g08410.1
  misc_feature (1)..(504): Homolog of NCBI NO: 15239790 NR Description: putative protein; protein id: At5g49080.1 thaliana] >gi|10176941|dbj|BAB10090.1|
  misc_feature (1)..(504): Homolog of NCBI NO: 15240117 NR Description: putative protein; protein id: At5g06640.1 thaliana] >gi|10178120|dbj|BAB11413.1|
  misc_feature (1)..(504): Homolog of NCBI NO: 15224658 NR Description: unknown protein; protein id: At2g24980.1
  misc_feature (23)..(504): Homolog of NCBI NO: 15239790 NR Description: putative protein; protein id: At5g49080.1 thaliana] >gi|10176941|dbj|BAB10090.1|
  misc_feature (23)..(504): Homolog of NCBI NO: 15239790 NR Description: putative protein; protein id: At5g49080.1 thaliana] >gi|10176941|dbj|BAB10090.1|
  misc_feature (23)..(504): Homolog of NCBI NO: 15239790 NR Description: putative protein; protein id: At5g49080.1 thaliana] >gi|10176941|dbj|BAB10090.1|
  misc_feature (23)..(504): Homolog of NCBI NO: 15239790 NR Description: putative protein; protein id: At5g49080.1 thaliana] >gi|10176941|dbj|BAB10090.1|
  misc_feature (23)..(504): Homolog of NCBI NO: 15236488 NR Description: extensin-like protein; protein id: At4g08410.1

SEQ ID NO: 89113 - protein, 498 aa, Arabidopsis thaliana; identical to SEQ ID NO: 69895
  peptide (1)..(498): Ceres Seq. ID no. 12715403
  misc_feature (127)..(429): Pfam Name: Formin Homology 2 Domain Pfam Description: Formin Homology 2 Domain
  misc_feature (1)..(498): Homolog of NCBI NO: 15236486 NR Description: extensin-like protein; protein id: At4g08400.1
  misc_feature (1)..(498): Homolog of NCBI NO: 15236488 NR Description: extensin-like protein; protein id: At4g08410.1
  misc_feature (1)..(498): Homolog of NCBI NO: 15239790 NR Description: putative protein; protein id: At5g49080.1 thaliana] >gi|10176941|dbj|BAB10090.1|
  misc_feature (1)..(498): Homolog of NCBI NO: 15240117 NR Description: putative protein; protein id: At5g06640.1 thaliana] >gi|10178120|dbj|BAB11413.1|
  misc_feature (1)..(498): Homolog of NCBI NO: 15224658 NR Description: unknown protein; protein id: At2g24980.1
  misc_feature (17)..(498): Homolog of NCBI NO: 15239790 NR Description: putative protein; protein id: At5g49080.1 thaliana] >gi|10176941|dbj|BAB10090.1|
  misc_feature (17)..(498): Homolog of NCBI NO: 15239790 NR Description: putative protein; protein id: At5g49080.1 thaliana] >gi|10176941|dbj|BAB10090.1|
  misc_feature (17)..(498): Homolog of NCBI NO: 15239790 NR Description: putative protein; protein id: At5g49080.1 thaliana] >gi|10176941|dbj|BAB10090.1|
  misc_feature (17)..(498): Homolog of NCBI NO: 15239790 NR Description: putative protein; protein id: At5g49080.1 thaliana] >gi|10176941|dbj|BAB10090.1|
  misc_feature (17)..(498): Homolog of NCBI NO: 15236488 NR Description: extensin-like protein; protein id: At4g08410.1

SEQ ID NO: 89114 - protein, 380 aa, Arabidopsis thaliana; identical to SEQ ID NO: 69896
  peptide (1)..(380): Ceres Seq. ID no. 12715404
  misc_feature (52)..(273): Pfam Name: Plasmodium histidine-rich protein (HRPII/III) Pfam Description: Plasmodium histidine-rich protein (HRPII/III)
  misc_feature (194)..(259): Homolog of NCBI NO: 30699212 NR Description: extensin family protein [Arabidopsis thaliana]
  misc_feature (184)..(244): Homolog of NCBI NO: 30699212 NR Description: extensin family protein [Arabidopsis thaliana]
  misc_feature (73)..(351): Homolog of NCBI NO: 1076557 NR Description: extensin-like protein - cowpea (fragment)
  misc_feature (186)..(380): Homolog of NCBI NO: 1076557 NR Description: extensin-like protein - cowpea (fragment)
  misc_feature (9)..(273): Homolog of NCBI NO: 1076557 NR Description: extensin-like protein - cowpea (fragment)
  misc_feature (1)..(239): Homolog of NCBI NO: 1076557 NR Description: extensin-like protein - cowpea (fragment)
  misc_feature (1)..(222): Homolog of NCBI NO: 1076557 NR Description: extensin-like protein - cowpea (fragment)
  misc_feature (1)..(184): Homolog of NCBI NO: 1076557 NR Description: extensin-like protein - cowpea (fragment)

SEQ ID NO: 89115 - DNA, 2043 bp, Arabidopsis thaliana
  misc_feature (1)..(2043): Ceres Seq. ID no. 12715412
  misc_feature: MA Experiment ID: 20000307 Result: Up-regulated in Transcription
  misc_feature: MA Experiment 20000307 PARAMETER Experiment Name: At_Germinating_Seeds_Sub_P Parameter: Age (hr) Value: 24 vs. 0
  misc_feature: MA Experiment 20000307 PARAMETER Experiment Name: At_Germinating_Seeds_Sub_P Parameter: Organism Value: A. thaliana
  misc_feature: MA Experiment 20000307 PARAMETER Experiment Name: At_Germinating_Seeds_Sub_P Parameter: Plant Line Value: WS
  misc_feature: MA Experiment 20000307 PARAMETER Experiment Name: At_Germinating_Seeds_Sub_P Parameter: Tissue Value: Germinating Seeds
  misc_feature: MA Experiment ID: 20000314 Result: Up-regulated in Transcription
  misc_feature: MA Experiment 20000314 PARAMETER Experiment Name: At_14day_Shoots-Roots_Sub_P Parameter: Age (day) Value: 14
  misc_feature: MA Experiment 20000314 PARAMETER Experiment Name: At_14day_Shoots-Roots_Sub_P Parameter: Organism Value: A. thaliana
  misc_feature: MA Experiment 20000314 PARAMETER Experiment Name: At_14day_Shoots-Roots_Sub_P Parameter: Plant Line Value: WS
  misc_feature: MA Experiment 20000314 PARAMETER Experiment Name: At_14day_Shoots-Roots_Sub_P Parameter: Tissue Value: Roots vs. Whole Plant
atggggttaggacagtgcatggtttatgttgtcgtcctaagtgccattgcggctacagtgacatcatacccttacacatcccctcaaactccacattacaattctccaagccatgaacacaaaatccctaagtacacaccacatccaaaaccatctatttacagctcttcaccacctccatcatactactctccttctccaaaggttgattacaagtctccaccaccatcatacgtttacagttccccaccaccaccatactactctccgtctccaaaggttgactacaagtccctaccacccccatacgtctacagttccccacccccaccatactactctccttcaccaaaggttaactacaagtctccaccgccaccatacgtctacagctctccaccaccaccatactacagtccatctccaaagggtgactacaagtctccaccacccccatacgtctacagttccccacccccaccatactactctccttctccaaaggttgactacaagtctccaccaccaccatacgtctacagctccccaccaccaccatactacagtccaactccaaaggttgactacaagtccccaccacccccatacgtctacagctccccacccccaccatactacagtccatctccaaaggttgactacaagtctccaccacccccatacgtgtacagctccccacccccaccatactactctccttcaccaaaggttaactacaagtctccaccaccaccatacgtctacggctctccaccaccaccatactacagtccatctccaaaggttgactacaagtccccaccacccccatacgtctacagttccccacccccaccatactactctccttcaccaaaggttaactacaagtctccaccaccaccatacgtctacggctctccaccaccaccatactacagtccatctccaaaggttgactacaagtccccaccacccccatacgtctacagttccccacccccaccatactactctccttctccaaaggttgactacaagtctccaccaccaccatacgtttacagctccacaccaccaccatactacagtccatcaccaaaggttgactacaagtccccaccacccccatacgtctacagttccccacccccaccatactactctccttctccaaaggttgactacaagtccccaccaccaccatacatctacagctccacaccactaccatactacagtccatctccaaaggttgactacaagtccccaccacccccatacgtctacagctccccacccccaccatactactctccttctccaaaggttgactacaagcctccaccaccaccatacgtctacagctccccaccaccaccatactacagtccatctccaaaggttgactacaagtccccaccacccccatacgtctacagcttcccacccccaccatactacagtccatctccaaaggttgactacaagtctccaccacccccatacgtctacagctctccacccccaccatactactctccttcaccaaaggttaactataagtctccaccaccaccatacgtctacagttctccaccaccaccgtactactctccttctccaaaagttgaatacaagtccccaccacccccatacatctatagttccccacctccaccatactacgctccttcaccaaaggttgactacaagtctccaccaccaccatacgtctatagctccccacccccaccatattactctccttctccaaaagttgactataagtctccacctccaccatacgtctatagctcaccaccaccaccatactactctccttctccaaaggttaactacaagtccccaccaccaccatatgtctacagctccccacctccaccgtactactccccttctcctaaggtcgactacaaatcttccccaccacaatatgtctacagctcaccacccacaccatactactctccttctcctaaagtcacttacaagtctcccccaccaccatatgtttactag

SEQ ID NO: 89116 - protein, 680 aa, Arabidopsis thaliana
  peptide (1)..(680): Ceres Seq. ID no. 12715413
  misc_feature (99)..(402): Pfam Name: Formin Homology 2 Domain Pfam Description: Formin Homology 2 Domain
  misc_feature (1)..(563): Homolog of NCBI NO: 15224658 NR Description: unknown protein; protein id: At2g24980.1
  misc_feature (1)..(505): Homolog of NCBI NO: 15236486 NR Description: extensin-like protein; protein id: At4g08400.1
  misc_feature (77)..(613): Homolog of NCBI NO: 15224658 NR Description: unknown protein; protein id: At2g24980.1
  misc_feature (103)..(638): Homolog of NCBI NO: 15224658 NR Description: unknown protein; protein id: At2g24980.1
  misc_feature (128)..(663): Homolog of NCBI NO: 15224658 NR Description: unknown protein; protein id: At2g24980.1
  misc_feature (54)..(588): Homolog of NCBI NO: 15224658 NR Description: unknown protein; protein id: At2g24980.1
  misc_feature (153)..(680): Homolog of NCBI NO: 15224658 NR Description: unknown protein; protein id: At2g24980.1
  misc_feature (177)..(680): Homolog of NCBI NO: 15232552 NR Description: extensin precursor -like protein; protein id:
  misc_feature (128)..(605): Homolog of NCBI NO: 15236486 NR Description: extensin-like protein; protein id: At4g08400.1
  misc_feature (203)..(680): Homolog of NCBI NO: 15236486 NR Description: extensin-like protein; protein id: At4g08400.1
MGLGQCMVYVVVLSAIAATVTSYPYTSPQTPHYNSPSHEHKIPKYTPHPKPSIYSSSPPPSYYSPSPKVDYKSPPPSYVYSSPPPPYYSPSPKVDYKSLPPPYVYSSPPPPYYSPSPKVNYKSPPPPYVYSSPPPPYYSPSPKGDYKSPPPPYVYSSPPPPYYSPSPKVDYKSPPPPYVYSSPPPPYYSPTPKVDYKSPPPPYVYSSPPPPYYSPSPKVDYKSPPPPYVYSSPPPPYYSPSPKVNYKSPPPPYVYGSPPPPYYSPSPKVDYKSPPPPYVYSSPPPPYYSPSPKVNYKSPPPPYVYGSPPPPYYSPSPKVDYKSPPPPYVYSSPPPPYYSPSPKVDYKSPPPPYVYSSTPPPYYSPSPKVDYKSPPPPYVYSSPPPPYYSPSPKVDYKSPPPPYIYSSTPLPYYSPSPKVDYKSPPPPYVYSSPPPPYYSPSPKVDYKPPPPPYVYSSPPPPYYSPSPKVDYKSPPPPYVYSFPPPPYYSPSPKVDYKSPPPPYVYSSPPPPYYSPSPKVNYKSPPPPYVYSSPPPPYYSPSPKVEYKSPPPPYIYSSPPPPYYAPSPKVDYKSPPPPYVYSSPPPPYYSPSPKVDYKSPPPPYVYSSPPPPYYSPSPKVNYKSPPPPYVYSSPPPPYYSPSPKVDYKSSPPQYVYSSPPTPYYSPSPKVTYKSPPPPYVY

SEQ ID NO: 89117 - protein, 674 aa, Arabidopsis thaliana
  peptide (1)..(674): Ceres Seq. ID no. 12715414
  misc_feature (93)..(396): Pfam Name: Formin Homology 2 Domain Pfam Description: Formin Homology 2 Domain
  misc_feature (1)..(557): Homolog of NCBI NO: 15224658 NR Description: unknown protein; protein id: At2g24980.1
  misc_feature (1)..(499): Homolog of NCBI NO: 15236486 NR Description: extensin-like protein; protein id: At4g08400.1
  misc_feature (71)..(607): Homolog of NCBI NO: 15224658 NR Description: unknown protein; protein id: At2g24980.1
  misc_feature (97)..(632): Homolog of NCBI NO: 15224658 NR Description: unknown protein; protein id: At2g24980.1
  misc_feature (122)..(657): Homolog of NCBI NO: 15224658 NR Description: unknown protein; protein id: At2g24980.1
  misc_feature (48)..(582): Homolog of NCBI NO: 15224658 NR Description: unknown protein; protein id: At2g24980.1
  misc_feature (147)..(674): Homolog of NCBI NO: 15224658 NR Description: unknown protein; protein id: At2g24980.1
  misc_feature (171)..(674): Homolog of NCBI NO: 15232552 NR Description: extensin precursor -like protein; protein id:
  misc_feature (122)..(599): Homolog of NCBI NO: 15236486 NR Description: extensin-like protein; protein id: At4g08400.1
  misc_feature (197)..(674): Homolog of NCBI NO: 15236486 NR Description: extensin-like protein; protein id: At4g08400.1
MVYVVVLSAIAATVTSYPYTSPQTPHYNSPSHEHKIPKYTPHPKPSIYSSSPPPSYYSPSPKVDYKSPPPSYVYSSPPPPYYSPSPKVDYKSLPPPYVYSSPPPPYYSPSPKVNYKSPPPPYVYSSPPPPYYSPSPKGDYKSPPPPYVYSSPPPPYYSPSPKVDYKSPPPPYVYSSPPPPYYSPTPKVDYKSPPPPYVYSSPPPPYYSPSPKVDYKSPPPPYVYSSPPPPYYSPSPKVNYKSPPPPYVYGSPPPPYYSPSPKVDYKSPPPPYVYSSPPPPYYSPSPKVNYKSPPPPYVYGSPPPPYYSPSPKVDYKSPPPPYVYSSPPPPYYSPSPKVDYKSPPPPYVYSSTPPPYYSPSPKVDYKSPPPPYVYSSPPPPYYSPSPKVDYKSPPPPYIYSSTPLPYYSPSPKVDYKSPPPPYVYSSPPPPYYSPSPKVDYKPPPPPYVYSSPPPPYYSPSPKVDYKSPPPPYVYSFPPPPYYSPSPKVDYKSPPPPYVYSSPPPPYYSPSPKVNYKSPPPPYVYSSPPPPYYSPSPKVEYKSPPPPYIYSSPPPPYYAPSPKVDYKSPPPPYVYSSPPPPYYSPSPKVDYKSPPPPYVYSSPPPPYYSPSPKVNYKSPPPPYVYSSPPPPYYSPSPKVDYKSSPPQYVYSSPPTPYYSPSPKVTYKSPPPPYVY

SEQ ID NO: 89118 - protein, 643 aa, Arabidopsis thaliana; identical to SEQ ID NO: 69877
  peptide (1)..(643): Ceres Seq. ID no. 12715415
  misc_feature (186)..(457): Pfam Name: Syndecan domain Pfam Description: Syndecan domain
  misc_feature (235)..(323): Homolog of NCBI NO: 18411288 NR Description: expressed protein; protein id: At1g76930.1,
  misc_feature (385)..(488): Homolog of NCBI NO: 18411288 NR Description: expressed protein; protein id: At1g76930.1,
  misc_feature (493)..(582): Homolog of NCBI NO: 18411288 NR Description: expressed protein; protein id: At1g76930.1,
  misc_feature (194)..(282): Homolog of NCBI NO: 18411288 NR Description: expressed protein; protein id: At1g76930.1,
  misc_feature (285)..(382): Homolog of NCBI NO: 18411288 NR Description: expressed protein; protein id: At1g76930.1,
  misc_feature (335)..(432): Homolog of NCBI NO: 18411288 NR Description: expressed protein; protein id: At1g76930.1,
  misc_feature (544)..(642): Homolog of NCBI NO: 18411288 NR Description: expressed protein; protein id: At1g76930.1,
  misc_feature (409)..(507): Homolog of NCBI NO: 18411288 NR Description: expressed protein; protein id: At1g76930.1,
  misc_feature (134)..(232): Homolog of NCBI NO: 18411288 NR Description: expressed protein; protein id: At1g76930.1,
  misc_feature (60)..(157): Homolog of NCBI NO: 18411288 NR Description: expressed protein; protein id: At1g76930.1,

SEQ ID NO: 89119 - DNA, 2286 bp, Arabidopsis thaliana
  misc_feature (1)..(2286): Ceres Seq. ID no. 12715433
  misc_feature: MA Experiment ID: 20000327 Result: Up-regulated in Transcription
  misc_feature: MA Experiment 20000327 PARAMETER Experiment Name: At_42deg_Heat_Sub_P Parameter: Age (day) Value: 14
  misc_feature: MA Experiment 20000327 PARAMETER Experiment Name: At_42deg_Heat_Sub_P Parameter: Organism Value: A. thaliana
  misc_feature: MA Experiment 20000327 PARAMETER Experiment Name: At_42deg_Heat_Sub_P Parameter: Plant Line Value: WS
  misc_feature: MA Experiment 20000327 PARAMETER Experiment Name: At_42deg_Heat_Sub_P Parameter: Temperature (deg C) Value: 42 vs. 22
  misc_feature: MA Experiment 20000327 PARAMETER Experiment Name: At_42deg_Heat_Sub_P Parameter: Timepoint (hr) Value: 1
  misc_feature: MA Experiment 20000327 PARAMETER Experiment Name: At_42deg_Heat_Sub_P Parameter: Tissue Value: Aerial
  misc_feature: MA Experiment ID: 20000355 Result: Down-regulated in Transcription
  misc_feature: MA Experiment 20000355 PARAMETER Experiment Name: At_Siliques_Sub_P Parameter: Age (day) Value: 21
  misc_feature: MA Experiment 20000355 PARAMETER Experiment Name: At_Siliques_Sub_P Parameter: Organism Value: A. thaliana
  misc_feature: MA Experiment 20000355 PARAMETER Experiment Name: At_Siliques_Sub_P Parameter: Plant Line Value: WS
  misc_feature: MA Experiment 20000355 PARAMETER Experiment Name: At_Siliques_Sub_P Parameter: Tissue Value: Less Than 5mm Siliques vs. Whole Plant
atgaagaagtcgtcggataagtcaccggtgcggcaacatgacacggcgacgcaaatcaactctgacgcagtgtcttcttctacttccttcactgattccgactctacttgttcctttttgactccctccatggagttcccggatcgaatcagtttccggagaatcgattttagtgaagcagctcctactggtgtcgttcttccttctacttccagtgagttaactcgttccaattccagtgagaataagattcccaatgaagatatttccgtttcaacttcttctcgctatttggtgtttgataaaattctagctcttatgaagaaatcaccaggacgaagaggagataagactagtccggcgcggcggttagaccgtagtgatgcggtgaggaggaatatcgattatgacgcaggtgaagattcttcttcgttgttgataactcgttctttggatttcccgaatcgtactagttttcgagtcgatggagttgatgatggagaaatagatcggatttatcagtatattggtgtttctggtcctgaagattttgctatttcttctgatgcttggaaagctcgtatggagcatgagcgttcttcttcagatgttgttaataagttaaagtctcttgatcttgatagtcgtgaagcaggtcctagtggtggtgttgttgcttctagttcaatgaatcataagtttcagggtcatgatttgagtgaagcaggttctattggtgttgttgttgcttctaattttacgctttctgagtcgaataagattgagaacttaaatagtttgagggataaggaaattgttgatggtgatatggtagagaataggtgcggtattgagcgaaaaccgactattttggtgaagtcgagagggtatcttgttcacaatgatgatgtgggtgttggtggtggaattaagggtgtaagaccaccagtactaaacgttcctcgtgcggataaggaagttgttgatggtggtacggtggagagcaagagtggtattgaatggaaaccaactattttggtgaagtcaaaagggtatcttgtttccaatgatggtggaataaagggggtaacatcaccggtactaaatcttcgcccgacagataaggaagttgttgatagtggtacggtagagaatagacgtggtattaagggcgtaagaccatcggtacttaagcctcctccggtgatgaaactacctccagttgatcttccgggatcatcttgggatatccttactcattttgctcctgatagtgaaatagttaggcggccgagttcctcttcttcttccgaaaatggttgtgatgaagaagaagccgaggatgacaaattggaggatacgactgatgaggcatgctcattcactacaaacgagggtgactcctcaagtacagtatccaatacctcaccgatttgtgtctctgggggatctatcaatacttcttggcaaaagggtcaacttctgcgacaaggatcgtttggctctgtgtatgaagccatttcagaagatggggacttctttgctgtcaaggaagtttcacttcttgatcagggaagtcaggcacaagaatgcatacaacaacttgagggggaaattgcactacttagtcagcttgagcatcagaatattctgcgatatcgtggcacagacaaggacgggtcaaatttgtatatttttcttgagcttgtaacacaaggatcccttctagaactctaccgaagataccagattcgggactcgctaatctccttgtacacaaaacaaatccttgacggtttgaaatatcttcaccataaaggtttcattcacagggacattaaatgtgcaactatattggtggacgccaatggcaccgtcaaacttgcagattttggattggcaaaggtgtcaaagttaaacgacattaagtcccgcaaggaaactctattttggatggctccagaggttattaaccggaaggataatgatggttacagaagtccagctgatatatggagcctcgggtgcactgtgctggaaatgtgtactggtcagatcccatactctgatctagaacccgttgaagccctgtttaggatcagaaggggtacgcttccggaagtacctgatactttatcactagacgctcggcatttcatacttaagtgtctcaaattgaacccggaagagcgtccaactgcaactgagctactgaaccatccatttgtgagaaggcccttaccatcctcaggctcaggatcaacatctccgctaatccgtagatga

SEQ ID NO: 89120 - protein, 761 aa, Arabidopsis thaliana
  peptide (1)..(761): Ceres Seq. ID no. 12715434
  misc_feature (489)..(743): Pfam Name: Protein kinase domain Pfam Description: Protein kinase domain
  misc_feature (274)..(761): Homolog of NCBI NO: 1255448 NR Description: mitogen-activated protein kinase [Arabidopsis
  misc_feature (274)..(761): Homolog of NCBI NO: 15236515 NR Description: MEKK1/MAP kinase kinase kinase; protein id: supported by cDNA: gi_1255447, supported by cDNA: gi_17064765
  misc_feature (274)..(761): Homolog of NCBI NO: 17064766 NR Description: Unknown protein [Arabidopsis thaliana]
  misc_feature (330)..(761): Homolog of NCBI NO: 3688209 NR Description: MAP3K beta 1 protein kinase [Brassica napus]
  misc_feature (270)..(761): Homolog of NCBI NO: 871812 NR Description: ARA.KIN gene product
  misc_feature (487)..(743): Homolog of NCBI NO: 15236509 NR Description: putative mitogen-activated protein kinase;
  misc_feature (487)..(743): Homolog of NCBI NO: 28393793 NR Description: putative mitogen-activated protein kinase
  misc_feature (377)..(508): Homolog of NCBI NO: 15236509 NR Description: putative mitogen-activated protein kinase;
  misc_feature (377)..(508): Homolog of NCBI NO: 28393793 NR Description: putative mitogen-activated protein kinase
  misc_feature (487)..(743): Homolog of NCBI NO: 11358511 NR Description: mitogen-activated protein kinase MAP3K beta - Arabidopsis thaliana (fragment) >gi|3688195|emb|CAA08996.1|
MKKSSDKSPVRQHDTATQINSDAVSSSTSFTDSDSTCSFLTPSMEFPDRISFRRIDFSEAAPTGVVLPSTSSELTRSNSSENKIPNEDISVSTSSRYLVFDKILALMKKSPGRRGDKTSPARRLDRSDAVRRNIDYDAGEDSSSLLITRSLDFPNRTSFRVDGVDDGEIDRIYQYIGVSGPEDFAISSDAWKARMEHERSSSDVVNKLKSLDLDSREAGPSGGVVASSSMNHKFQGHDLSEAGSIGVVVASNFTLSESNKIENLNSLRDKEIVDGDMVENRCGIERKPTILVKSRGYLVHNDDVGVGGGIKGVRPPVLNVPRADKEVVDGGTVESKSGIEWKPTILVKSKGYLVSNDGGIKGVTSPVLNLRPTDKEVVDSGTVENRRGIKGVRPSVLKPPPVMKLPPVDLPGSSWDILTHFAPDSEIVRRPSSSSSSENGCDEEEAEDDKLEDTTDEACSFTTNEGDSSSTVSNTSPICVSGGSINTSWQKGQLLRQGSFGSVYEAISEDGDFFAVKEVSLLDQGSQAQECIQQLEGEIALLSQLEHQNILRYRGTDKDGSNLYIFLELVTQGSLLELYRRYQIRDSLISLYTKQILDGLKYLHHKGFIHRDIKCATILVDANGTVKLADFGLAKVSKLNDIKSRKETLFWMAPEVINRKDNDGYRSPADIWSLGCTVLEMCTGQIPYSDLEPVEALFRIRRGTLPEVPDTLSLDARHFILKCLKLNPEERPTATELLNHPFVRRPLPSSGSGSTSPLIRR

SEQ ID NO: 89121 - protein, 718 aa, Arabidopsis thaliana
  peptide (1)..(718): Ceres Seq. ID no. 12715435
  misc_feature (446)..(700): Pfam Name: Protein kinase domain Pfam Description: Protein kinase domain
  misc_feature (231)..(718): Homolog of NCBI NO: 1255448 NR Description: mitogen-activated protein kinase [Arabidopsis
  misc_feature (231)..(718): Homolog of NCBI NO: 15236515 NR Description: MEKK1/MAP kinase kinase kinase; protein id: supported by cDNA: gi_1255447, supported by cDNA: gi_17064765
  misc_feature (231)..(718): Homolog of NCBI NO: 17064766 NR Description: Unknown protein [Arabidopsis thaliana]
  misc_feature (287)..(718): Homolog of NCBI NO: 3688209 NR Description: MAP3K beta 1 protein kinase [Brassica napus]
  misc_feature (227)..(718): Homolog of NCBI NO: 871812 NR Description: ARA.KIN gene product
  misc_feature (444)..(700): Homolog of NCBI NO: 15236509 NR Description: putative mitogen-activated protein kinase;
  misc_feature (444)..(700): Homolog of NCBI NO: 28393793 NR Description: putative mitogen-activated protein kinase
  misc_feature (334)..(465): Homolog of NCBI NO: 15236509 NR Description: putative mitogen-activated protein kinase;
  misc_feature (334)..(465): Homolog of NCBI NO: 28393793 NR Description: putative mitogen-activated protein kinase
  misc_feature (444)..(700): Homolog of NCBI NO: 11358511 NR Description: mitogen-activated protein kinase MAP3K beta - Arabidopsis thaliana (fragment) >gi|3688195|emb|CAA08996.1|
MEFPDRISFRRIDFSEAAPTGVVLPSTSSELTRSNSSENKIPNEDISVSTSSRYLVFDKILALMKKSPGRRGDKTSPARRLDRSDAVRRNIDYDAGEDSSSLLITRSLDFPNRTSFRVDGVDDGEIDRIYQYIGVSGPEDFAISSDAWKARMEHERSSSDVVNKLKSLDLDSREAGPSGGVVASSSMNHKFQGHDLSEAGSIGVVVASNFTLSESNKIENLNSLRDKEIVDGDMVENRCGIERKPTILVKSRGYLVHNDDVGVGGGIKGVRPPVLNVPRADKEVVDGGTVESKSGIEWKPTILVKSKGYLVSNDGGIKGVTSPVLNLRPTDKEVVDSGTVENRRGIKGVRPSVLKPPPVMKLPPVDLPGSSWDILTHFAPDSEIVRRPSSSSSSENGCDEEEAEDDKLEDTTDEACSFTTNEGDSSSTVSNTSPICVSGGSINTSWQKGQLLRQGSFGSVYEAISEDGDFFAVKEVSLLDQGSQAQECIQQLEGEIALLSQLEHQNILRYRGTDKDGSNLYIFLELVTQGSLLELYRRYQIRDSLISLYTKQILDGLKYLHHKGFIHRDIKCATILVDANGTVKLADFGLAKVSKLNDIKSRKETLFWMAPEVINRKDNDGYRSPADIWSLGCTVLEMCTGQIPYSDLEPVEALFRIRRGTLPEVPDTLSLDARHFILKCLKLNPEERPTATELLNHPFVRRPLPSSGSGSTSPLIRR

SEQ ID NO: 89122 - protein, 655 aa, Arabidopsis thaliana
  peptide (1)..(655): Ceres Seq. ID no. 12715436
  misc_feature (383)..(637): Pfam Name: Protein kinase domain Pfam Description: Protein kinase domain
  misc_feature (168)..(655): Homolog of NCBI NO: 1255448 NR Description: mitogen-activated protein kinase [Arabidopsis
  misc_feature (168)..(655): Homolog of NCBI NO: 15236515 NR Description: MEKK1/MAP kinase kinase kinase; protein id: supported by cDNA: gi_1255447, supported by cDNA: gi_17064765
  misc_feature (168)..(655): Homolog of NCBI NO: 17064766 NR Description: Unknown protein [Arabidopsis thaliana]
  misc_feature (224)..(655): Homolog of NCBI NO: 3688209 NR Description: MAP3K beta 1 protein kinase [Brassica napus]
  misc_feature (164)..(655): Homolog of NCBI NO: 871812 NR Description: ARA.KIN gene product
  misc_feature (381)..(637): Homolog of NCBI NO: 15236509 NR Description: putative mitogen-activated protein kinase;
  misc_feature (381)..(637): Homolog of NCBI NO: 28393793 NR Description: putative mitogen-activated protein kinase
  misc_feature (271)..(402): Homolog of NCBI NO: 15236509 NR Description: putative mitogen-activated protein kinase;
  misc_feature (271)..(402): Homolog of NCBI NO: 28393793 NR Description: putative mitogen-activated protein kinase
  misc_feature (381)..(637): Homolog of NCBI NO: 11358511 NR Description: mitogen-activated protein kinase MAP3K beta - Arabidopsis thaliana (fragment) >gi|3688195|emb|CAA08996.1|
MKKSPGRRGDKTSPARRLDRSDAVRRNIDYDAGEDSSSLLITRSLDFPNRTSFRVDGVDDGEIDRIYQYIGVSGPEDFAISSDAWKARMEHERSSSDVVNKLKSLDLDSREAGPSGGVVASSSMNHKFQGHDLSEAGSIGVVVASNFTLSESNKIENLNSLRDKEIVDGDMVENRCGIERKPTILVKSRGYLVHNDDVGVGGGIKGVRPPVLNVPRADKEVVDGGTVESKSGIEWKPTILVKSKGYLVSNDGGIKGVTSPVLNLRPTDKEVVDSGTVENRRGIKGVRPSVLKPPPVMKLPPVDLPGSSWDILTHFAPDSEIVRRPSSSSSSENGCDEEEAEDDKLEDTTDEACSFTTNEGDSSSTVSNTSPICVSGGSINTSWQKGQLLRQGSFGSVYEAISEDGDFFAVKEVSLLDQGSQAQECIQQLEGEIALLSQLEHQNILRYRGTDKDGSNLYIFLELVTQGSLLELYRRYQIRDSLISLYTKQILDGLKYLHHKGFIHRDIKCATILVDANGTVKLADFGLAKVSKLNDIKSRKETLFWMAPEVINRKDNDGYRSPADIWSLGCTVLEMCTGQIPYSDLEPVEALFRIRRGTLPEVPDTLSLDARHFILKCLKLNPEERPTATELLNHPFVRRPLPSSGSGSTSPLIRR

SEQ ID NO: 89123 - DNA, 1446 bp, Arabidopsis thaliana
  misc_feature (1)..(1446): Ceres Seq. ID no. 12715518
  misc_feature: MA Experiment ID: 20001905 Result: Down-regulated in Transcription
  misc_feature: MA Experiment 20001905 PARAMETER Experiment Name: At_Drought_Reproduction_P Parameter: Age (day) Value: 40
  misc_feature: MA Experiment 20001905 PARAMETER Experiment Name: At_Drought_Reproduction_P Parameter: Organism Value: A. thaliana
  misc_feature: MA Experiment 20001905 PARAMETER Experiment Name: At_Drought_Reproduction_P Parameter: Plant Line Value: WS
  misc_feature: MA Experiment 20001905 PARAMETER Experiment Name: At_Drought_Reproduction_P Parameter: Timepoint (day) Value: 10
  misc_feature: MA Experiment 20001905 PARAMETER Experiment Name: At_Drought_Reproduction_P Parameter: Tissue Value: Rosettes
  misc_feature: MA Experiment 20001905 PARAMETER Experiment Name: At_Drought_Reproduction_P Parameter: Treatment Value: Drought vs. No Drought
atgggttccgtggagaatccaatctcacttcaagaaagcgtgacgggtcctagttaccggatattcagtggaaactccggcgaggttagccggctaacggcggaggcgaagtcaaagccgattccttccgggagaaatcctcatgagttcgtccaccgtgtggcgcctcactaccacgaatggtcacgtgtctacgggaagacgttcctctactggttcgggtcgaaacctgtggtggctacgtcggatccaagactaatccgggaagctttgacgacgggtgggtcgtttgaccgaattgggcataaccctttgtctaagctgctttatgctcaaggtcttcctggtcttagaggtgatcaatgggctttccatagaagaatcgccaaacaagcttttacaatggagaaactcaagaggtgggtgccacaaatggtaacaagtactatgatgttgatggagaagtgggaagatatgagaaacggaggagaagagattgagttagaggtacacaaagagatgcacaatttgtctgcagaaatgttatcaagaacagcttttgggaacagcgtggaagaagggaaaggaatctttgaattgcaggagcgtatgatgcgtcttttttatctggttcgatggagcgtttatatcccaggattcagattctttccttcgaagacgaatagagagatatggagaattgagaagcaaatccgtgtttctatcttgaaactgatcgaaaacaataaaacagctgttgagaaatcaggaactctgcttcaggcttttatgtctccttacacaaatcagaatggtcaagaagagaagcttgggatagaagaagttacagatgaatgcaaaacgttctactttgcagctaaggaaacaactgctaaccttatgacgtttgttttagtcctcttagctatgaaccaagaatggcaaaacattgctcgggaagaagtcatatgcgttctcggacaaaccgggcttcctactctagacatcttacaagacctcaagactctaagtatgataatcaatgagactctccggctctaccctccagcaatgacattaaaccgtgacactcttaaaagagctaagctaggagaccttgacatccctgcaggaactcaactctatttatcagtagtcgcgatgcaccacgataaagaaacatggggagacgacgcagaggagtttaatccgcgtaggtttgaagatcctaagaaacaatcagctctgcttgtaccgtttgggttagggcctaggacttgtgtgggacagaatcttgctgtgaatgaggctaaaactgttctggctacgatcttgaagtattacagtttcaggttgtctccaagttatgctcatgctcctgttttatttgtgacgttgcagcctcaaaatggtgctcatcttctctttactaggatatcaagttaa

SEQ ID NO: 89124 - protein, 481 aa, Arabidopsis thaliana
  peptide (1)..(481): Ceres Seq. ID no. 12715519
  misc_feature (11)..(481): Homolog of NCBI NO: 15222125 NR Description: cytochrome P450, putative; protein id: [Arabidopsis thaliana] >gi|25406415|pir||D96781 cytochrome P450,
  misc_feature (4)..(481): Homolog of NCBI NO: 15225777 NR Description: cytochrome P450, putative; protein id: [Arabidopsis thaliana] >gi|25407842|pir||H84663 probable
  misc_feature (66)..(481): Homolog of NCBI NO: 34896248 NR Description: OSJNBb0008D07.14 [Oryza sativa (japonica
  misc_feature (11)..(66): Homolog of NCBI NO: 34896248 NR Description: OSJNBb0008D07.14 [Oryza sativa (japonica
  misc_feature (4)..(480): Homolog of NCBI NO: 21805645 NR Description: cytochrome P450 monooxygenase CYP72A5 [Zea mays
  misc_feature (12)..(479): Homolog of NCBI NO: 21842133 NR Description: cytochrome P450 monooxygenase CYP72A16 [Zea mays
  misc_feature (9)..(359): Homolog of NCBI NO: 34912892 NR Description: putative cytochrome P450 [Oryza sativa (japonica group)] >gi|11761098|dbj|BAB19088.1| putative cytochrome P450
  misc_feature (340)..(479): Homolog of NCBI NO: 34912892 NR Description: putative cytochrome P450 [Oryza sativa (japonica group)] >gi|11761098|dbj|BAB19088.1| putative cytochrome P450
  misc_feature (9)..(479): Homolog of NCBI NO: 13661770 NR Description: putative cytochrome P450 [Lolium rigidum]
  misc_feature (9)..(479): Homolog of NCBI NO: 13661768 NR Description: putative cytochrome P450 [Lolium rigidum]
MGSVENPISLQESVTGPSYRIFSGNSGEVSRLTAEAKSKPIPSGRNPHEFVHRVAPHYHEWSRVYGKTFLYWFGSKPVVATSDPRLIREALTTGGSFDRIGHNPLSKLLYAQGLPGLRGDQWAFHRRIAKQAFTMEKLKRWVPQMVTSTMMLMEKWEDMRNGGEEIELEVHKEMHNLSAEMLSRTAFGNSVEEGKGIFELQERMMRLFYLVRWSVYIPGFRFFPSKTNREIWRIEKQIRVSILKLIENNKTAVEKSGTLLQAFMSPYTNQNGQEEKLGIEEVTDECKTFYFAAKETTANLMTFVLVLLAMNQEWQNIAREEVICVLGQTGLPTLDILQDLKTLSMIINETLRLYPPAMTLNRDTLKRAKLGDLDIPAGTQLYLSVVAMHHDKETWGDDAEEFNPRRFEDPKKQSALLVPFGLGPRTCVGQNLAVNEAKTVLATILKYYSFRLSPSYAHAPVLFVTLQPQNGAHLLFTRISS

SEQ ID NO: 89125 - protein, 347 aa, Arabidopsis thaliana; identical to SEQ ID NO: 50028
  peptide (1)..(347): Ceres Seq. ID no. 12715520
  misc_feature (1)..(347): Homolog of NCBI NO: 15222125 NR Description: cytochrome P450, putative; protein id: [Arabidopsis thaliana] >gi|25406415|pir||D96781 cytochrome P450,
  misc_feature (1)..(347): Homolog of NCBI NO: 15225777 NR Description: cytochrome P450, putative; protein id: [Arabidopsis thaliana] >gi|25407842|pir||H84663 probable
  misc_feature (1)..(347): Homolog of NCBI NO: 34896248 NR Description: OSJNBb0008D07.14 [Oryza sativa (japonica
  misc_feature (1)..(346): Homolog of NCBI NO: 21805645 NR Description: cytochrome P450 monooxygenase CYP72A5 [Zea mays
  misc_feature (1)..(345): Homolog of NCBI NO: 21842133 NR Description: cytochrome P450 monooxygenase CYP72A16 [Zea mays
  misc_feature (1)..(225): Homolog of NCBI NO: 34912892 NR Description: putative cytochrome P450 [Oryza sativa (japonica group)] >gi|11761098|dbj|BAB19088.1| putative cytochrome P450
  misc_feature (206)..(345): Homolog of NCBI NO: 34912892 NR Description: putative cytochrome P450 [Oryza sativa (japonica group)] >gi|11761098|dbj|BAB19088.1| putative cytochrome P450
  misc_feature (1)..(345): Homolog of NCBI NO: 13661770 NR Description: putative cytochrome P450 [Lolium rigidum]
  misc_feature (1)..(345): Homolog of NCBI NO: 13661768 NR Description: putative cytochrome P450 [Lolium rigidum]
  misc_feature (1)..(341): Homolog of NCBI NO: 34913346 NR Description: putative cytochrome P450 [Oryza sativa (japonica group)] >gi|22093840|dbj|BAC07127.1| putative cytochrome P450

SEQ ID NO: 89126 - protein, 337 aa, Arabidopsis thaliana
  peptide (1)..(337): Ceres Seq. ID no. 12715521
  misc_feature (1)..(337): Homolog of NCBI NO: 15222125 NR Description: cytochrome P450, putative; protein id: [Arabidopsis thaliana] >gi|25406415|pir||D96781 cytochrome P450,
  misc_feature (1)..(337): Homolog of NCBI NO: 15225777 NR Description: cytochrome P450, putative; protein id: [Arabidopsis thaliana] >gi|25407842|pir||H84663 probable
  misc_feature (1)..(337): Homolog of NCBI NO: 34896248 NR Description: OSJNBb0008D07.14 [Oryza sativa (japonica
  misc_feature (1)..(336): Homolog of NCBI NO: 21805645 NR Description: cytochrome P450 monooxygenase CYP72A5 [Zea mays
  misc_feature (1)..(335): Homolog of NCBI NO: 21842133 NR Description: cytochrome P450 monooxygenase CYP72A16 [Zea mays
  misc_feature (1)..(215): Homolog of NCBI NO: 34912892 NR Description: putative cytochrome P450 [Oryza sativa (japonica group)] >gi|11761098|dbj|BAB19088.1| putative cytochrome P450
  misc_feature (196)..(335): Homolog of NCBI NO: 34912892 NR Description: putative cytochrome P450 [Oryza sativa (japonica group)] >gi|11761098|dbj|BAB19088.1| putative cytochrome P450
  misc_feature (1)..(335): Homolog of NCBI NO: 13661770 NR Description: putative cytochrome P450 [Lolium rigidum]
  misc_feature (1)..(335): Homolog of NCBI NO: 13661768 NR Description: putative cytochrome P450 [Lolium rigidum]
  misc_feature (1)..(331): Homolog of NCBI NO: 34913346 NR Description: putative cytochrome P450 [Oryza sativa (japonica group)] >gi|22093840|dbj|BAC07127.1| putative cytochrome P450
MVTSTMMLMEKWEDMRNGGEEIELEVHKEMHNLSAEMLSRTAFGNSVEEGKGIFELQERMMRLFYLVRWSVYIPGFRFFPSKTNREIWRIEKQIRVSILKLIENNKTAVEKSGTLLQAFMSPYTNQNGQEEKLGIEEVTDECKTFYFAAKETTANLMTFVLVLLAMNQEWQNIAREEVICVLGQTGLPTLDILQDLKTLSMIINETLRLYPPAMTLNRDTLKRAKLGDLDIPAGTQLYLSVVAMHHDKETWGDDAEEFNPRRFEDPKKQSALLVPFGLGPRTCVGQNLAVNEAKTVLATILKYYSFRLSPSYAHAPVLFVTLQPQNGAHLLFTRISS

SEQ ID NO: 89127 - DNA, 836 bp, Arabidopsis thaliana
  misc_feature (1)..(836): Ceres Seq. ID no. 12715584
  misc_feature: MA Experiment ID: 108462 Result: Down-regulated in Transcription
  misc_feature: MA Experiment 108462 PARAMETER Experiment Name: At_Germinating_Seeds_cDNA_P Parameter: Age (day) Value: 2 vs. 0
  misc_feature: MA Experiment 108462 PARAMETER Experiment Name: At_Germinating_Seeds_cDNA_P Parameter: Tissue Value: Germinating Seeds
  misc_feature: MA Experiment ID: 108463 Result: Down-regulated in Transcription
  misc_feature: MA Experiment 108463 PARAMETER Experiment Name: At_Germinating_Seeds_cDNA_P Parameter: Age (day) Value: 3 vs. 0
  misc_feature: MA Experiment 108463 PARAMETER Experiment Name: At_Germinating_Seeds_cDNA_P Parameter: Tissue Value: Germinating Seeds
  misc_feature: MA Experiment ID: 108668 Result: Up-regulated in Transcription
  misc_feature: MA Experiment 108668 PARAMETER Experiment Name: At_2mM_SA_cDNA_P Parameter: Plant Line Value: WS
  misc_feature: MA Experiment 108668 PARAMETER Experiment Name: At_2mM_SA_cDNA_P Parameter: Timepoint (hr) Value: 6
  misc_feature: MA Experiment 108668 PARAMETER Experiment Name: At_2mM_SA_cDNA_P Parameter: Treatment Value: 2mM SA vs. No Treatment
  misc_feature: MA Experiment ID: 20000090 Result: Up-regulated in Transcription
  misc_feature: MA Experiment ID: 20000173 Result: Down-regulated in Transcription
  misc_feature: MA Experiment 20000173 PARAMETER Experiment Name: At_42deg_Heat_P Parameter: Age (day) Value: 14
  misc_feature: MA Experiment 20000173 PARAMETER Experiment Name: At_42deg_Heat_P Parameter: Organism Value: A. thaliana
  misc_feature: MA Experiment 20000173 PARAMETER Experiment Name: At_42deg_Heat_P Parameter: Plant Line Value: WS
  misc_feature: MA Experiment 20000173 PARAMETER Experiment Name: At_42deg_Heat_P Parameter: Temperature (deg C) Value: 42 vs. 22
  misc_feature: MA Experiment 20000173 PARAMETER Experiment Name: At_42deg_Heat_P Parameter: Timepoint (hr) Value: 6
  misc_feature: MA Experiment 20000173 PARAMETER Experiment Name: At_42deg_Heat_P Parameter: Tissue Value: Aerial
  misc_feature: MA Experiment ID: 20000182 Result: Up-regulated in Transcription
  misc_feature: MA Experiment 20000182 PARAMETER Experiment Name: At_2mM_SA_P Parameter: Age (day) Value: 14
  misc_feature: MA Experiment 20000182 PARAMETER Experiment Name: At_2mM_SA_P Parameter: Organism Value: A. thaliana
  misc_feature: MA Experiment 20000182 PARAMETER Experiment Name: At_2mM_SA_P Parameter: Plant Line Value: WS
  misc_feature: MA Experiment 20000182 PARAMETER Experiment Name: At_2mM_SA_P Parameter: Timepoint (hr) Value: 6
  misc_feature: MA Experiment 20000182 PARAMETER Experiment Name: At_2mM_SA_P Parameter: Tissue Value: Aerial
  misc_feature: MA Experiment 20000182 PARAMETER Experiment Name: At_2mM_SA_P Parameter: Treatment Value: 2mM SA vs. No Treatment
  misc_feature: MA Experiment ID: 20000184 Result: Down-regulated in Transcription
  misc_feature: MA Experiment 20000184 PARAMETER Experiment Name: At_Shoots__P Parameter: Age (day) Value: 7
  misc_feature: MA Experiment 20000184 PARAMETER Experiment Name: At_Shoots__P Parameter: Tissue Value: Shoots vs. Whole Plant
  misc_feature: MA Experiment ID: 20000224 Result: Up-regulated in Transcription
atggaagatattcataatctcgatatagagaaaagtgatagatcgatttggttgatgaagtgtcctgtagttgtagacaaggcatggcacaagatagcagcttcgtcgtcttcttcttttgcttcctcggattctcctcccgacatggcaaagattgttcgcgaagttgatcctctacgggacgattctccccccgagttcaaaatgtatatggttggtgctgagtatgggaacatgccaaagtgctacgctttgaacatgttcacagactttgttccgatggggggcttttccgatgttaatcaaggttgtgcagctgctgaaggaaaggttgatcacaaattcgatatgaagccatatggtgaaaccattgaagaatatgctaggctttgtcgtgagagaacgagcaaagccatggttaaaaatcgacagattcaggttattgataatgaccgcggagttcatatgaggcccatgcctggaatgcttggtttagtttcctccaattccaaggaaaagaggaaacctcccccagtcaagcaaaccgaggtgaagaggacgaggagagatcgtggtgagcttgaagctataatgttcaagctatttgaaggccagcctaactggacattgaagcagcttgtacaagagacggaccagccagctcagttcctgaaagaaatactaaacgagctgtgcgtgtacaataagagaggatcgaaccaagggacatatgagcttaaacctgaatacaagaaatctgctgaagatgatacaggtgggcagtgaaatcaaccccttgtgtaattcactattatatacatgtgacatagtcataa

SEQ ID NO: 89128 - protein, 261 aa, Arabidopsis thaliana; identical to SEQ ID NO: 35607
  peptide (1)..(261): Ceres Seq. ID no. 12715585
  misc_feature (4)..(260): Pfam Name: Transcription initiation factor IIF, beta subunit Pfam Description: Transcription initiation factor IIF, beta
  misc_feature (1)..(261): Homolog of NCBI NO: 15222264 NR Description: transcription initiation factor, putative; id: At1g75510.1, supported by cDNA: gi_12642907, supported by gi_13265438 [Arabidopsis thaliana]
  misc_feature (2)..(256): Homolog of NCBI NO: 34909946 NR Description: putative transcription initiation factor [Oryza
  misc_feature (66)..(256): Homolog of NCBI NO: 15231173 NR Description: transcription initiation factor IIF, beta
  misc_feature (103)..(256): Homolog of NCBI NO: 11285686 NR Description: hypothetical protein T25B15.40 - Arabidopsis >gi|10045560|emb|CAC07918.1| putative protein [Arabidopsis
  misc_feature (66)..(99): Homolog of NCBI NO: 11285686 NR Description: hypothetical protein T25B15.40 - Arabidopsis >gi|10045560|emb|CAC07918.1| putative protein [Arabidopsis
  misc_feature (2)..(251): Homolog of NCBI NO: 19111874 NR Description: transcription initiation factor iif, beta subunit
  misc_feature (6)..(251): Homolog of NCBI NO: 24645751 NR Description: Transcription factor TFIIFbeta CG6538-PA
  misc_feature (6)..(257): Homolog of NCBI NO: 38174399 NR Description: Unknown (protein for MGC:75790) [Silurana
  misc_feature (105)..(252): Homolog of NCBI NO: 19073998 NR Description: TRANSCRIPTION INITIATION FACTOR TFIIF BETA [Encephalitozoon cuniculi] >gi|19068640|emb|CAD25108.1|
  misc_feature (106)..(257): Homolog of NCBI NO: 464520 NR Description: TRANSCRIPTION INITIATION FACTOR IIF, BETA SUBUNIT BETA) (TRANSCRIPTION INITIATION FACTOR RAP30)

SEQ ID NO: 89129 - protein, 243 aa, Arabidopsis thaliana; identical to SEQ ID NO: 35608
  peptide (1)..(243): Ceres Seq. ID no. 12715586
  misc_feature (1)..(242): Pfam Name: Transcription initiation factor IIF, beta subunit Pfam Description: Transcription initiation factor IIF, beta
  misc_feature (1)..(243): Homolog of NCBI NO: 15222264 NR Description: transcription initiation factor, putative; id: At1g75510.1, supported by cDNA: gi_12642907, supported by gi_13265438 [Arabidopsis thaliana]
  misc_feature (1)..(238): Homolog of NCBI NO: 34909946 NR Description: putative transcription initiation factor [Oryza
  misc_feature (48)..(238): Homolog of NCBI NO: 15231173 NR Description: transcription initiation factor IIF, beta
  misc_feature (85)..(238): Homolog of NCBI NO: 11285686 NR Description: hypothetical protein T25B15.40 - Arabidopsis >gi|10045560|emb|CAC07918.1| putative protein [Arabidopsis
  misc_feature (48)..(81): Homolog of NCBI NO: 11285686 NR Description: hypothetical protein T25B15.40 - Arabidopsis >gi|10045560|emb|CAC07918.1| putative protein [Arabidopsis
  misc_feature (1)..(233): Homolog of NCBI NO: 19111874 NR Description: transcription initiation factor iif, beta subunit
  misc_feature (1)..(233): Homolog of NCBI NO: 24645751 NR Description: Transcription factor TFIIFbeta CG6538-PA
  misc_feature (1)..(239): Homolog of NCBI NO: 38174399 NR Description: Unknown (protein for MGC:75790) [Silurana
  misc_feature (87)..(234): Homolog of NCBI NO: 19073998 NR Description: TRANSCRIPTION INITIATION FACTOR TFIIF BETA [Encephalitozoon cuniculi] >gi|19068640|emb|CAD25108.1|
  misc_feature (88)..(239): Homolog of NCBI NO: 464520 NR Description: TRANSCRIPTION INITIATION FACTOR IIF, BETA SUBUNIT BETA) (TRANSCRIPTION INITIATION FACTOR RAP30)

SEQ ID NO: 89130 - protein, 213 aa, Arabidopsis thaliana; identical to SEQ ID NO: 77698
  peptide (1)..(213): Ceres Seq. ID no. 12715587
  misc_feature (1)..(212): Pfam Name: Transcription initiation factor IIF, beta subunit Pfam Description: Transcription initiation factor IIF, beta
  misc_feature (1)..(213): Homolog of NCBI NO: 15222264 NR Description: transcription initiation factor, putative; id: At1g75510.1, supported by cDNA: gi_12642907, supported by gi_13265438 [Arabidopsis thaliana]
  misc_feature (1)..(208): Homolog of NCBI NO: 34909946 NR Description: putative transcription initiation factor [Oryza
  misc_feature (18)..(208): Homolog of NCBI NO: 15231173 NR Description: transcription initiation factor IIF, beta
  misc_feature (55)..(208): Homolog of NCBI NO: 11285686 NR Description: hypothetical protein T25B15.40 - Arabidopsis >gi|10045560|emb|CAC07918.1| putative protein [Arabidopsis
  misc_feature (18)..(51): Homolog of NCBI NO: 11285686 NR Description: hypothetical protein T25B15.40 - Arabidopsis >gi|10045560|emb|CAC07918.1| putative protein [Arabidopsis
  misc_feature (1)..(203): Homolog of NCBI NO: 19111874 NR Description: transcription initiation factor iif, beta subunit
  misc_feature (1)..(203): Homolog of NCBI NO: 24645751 NR Description: Transcription factor TFIIFbeta CG6538-PA
  misc_feature (1)..(209): Homolog of NCBI NO: 38174399 NR Description: Unknown (protein for MGC:75790) [Silurana
  misc_feature (57)..(204): Homolog of NCBI NO: 19073998 NR Description: TRANSCRIPTION INITIATION FACTOR TFIIF BETA [Encephalitozoon cuniculi] >gi|19068640|emb|CAD25108.1|
  misc_feature (58)..(209): Homolog of NCBI NO: 464520 NR Description: TRANSCRIPTION INITIATION FACTOR IIF, BETA SUBUNIT BETA) (TRANSCRIPTION INITIATION FACTOR RAP30)

SEQ ID NO: 89131 - DNA, 1405 bp, Arabidopsis thaliana
  misc_feature (1)..(1405): Ceres Seq. ID no. 12715596
  misc_feature: MA Experiment ID: 108573 Result: Up-regulated in Transcription
  misc_feature: MA Experiment 108573 PARAMETER Experiment Name: At_Drought_cDNA_P Parameter: Timepoint (hr) Value: 6
  misc_feature: MA Experiment 108573 PARAMETER Experiment Name: At_Drought_cDNA_P Parameter: Tissue Value: Aerial
  misc_feature: MA Experiment 108573 PARAMETER Experiment Name: At_Drought_cDNA_P Parameter: Treatment Value: Drought vs. No Drought
  misc_feature: MA Experiment ID: 108595 Result: Down-regulated in Transcription
  misc_feature: MA Experiment 108595 PARAMETER Experiment Name: At_Ler-pi_Ovule_cDNA_P Parameter: Plant Line Value: null
  misc_feature: MA Experiment ID: 20000112 Result: Up-regulated in Transcription
  misc_feature: MA Experiment 20000112 PARAMETER Experiment Name: At_42deg_Heat_cDNA_P Parameter: Temperature (deg C) Value: 42 vs. 22
  misc_feature: MA Experiment 20000112 PARAMETER Experiment Name: At_42deg_Heat_cDNA_P Parameter: Timepoint (hr) Value: 2
  misc_feature: MA Experiment 20000112 PARAMETER Experiment Name: At_42deg_Heat_cDNA_P Parameter: Tissue Value: Aerial
  misc_feature: MA Experiment ID: 20000113 Result: Up-regulated in Transcription
  misc_feature: MA Experiment 20000113 PARAMETER Experiment Name: At_42deg_Heat_cDNA_P Parameter: Temperature (deg C) Value: 42 vs. 22
  misc_feature: MA Experiment 20000113 PARAMETER Experiment Name: At_42deg_Heat_cDNA_P Parameter: Timepoint (hr) Value: 8
  misc_feature: MA Experiment 20000113 PARAMETER Experiment Name: At_42deg_Heat_cDNA_P Parameter: Tissue Value: Aerial
  misc_feature: MA Experiment ID: 20000173 Result: Up-regulated in Transcription
  misc_feature: MA Experiment 20000173 PARAMETER Experiment Name: At_42deg_Heat_P Parameter: Age (day) Value: 14
  misc_feature: MA Experiment 20000173 PARAMETER Experiment Name: At_42deg_Heat_P Parameter: Organism Value: A. thaliana
  misc_feature: MA Experiment 20000173 PARAMETER Experiment Name: At_42deg_Heat_P Parameter: Plant Line Value: WS
  misc_feature: MA Experiment 20000173 PARAMETER Experiment Name: At_42deg_Heat_P Parameter: Temperature (deg C) Value: 42 vs. 22
  misc_feature: MA Experiment 20000173 PARAMETER Experiment Name: At_42deg_Heat_P Parameter: Timepoint (hr) Value: 6
  misc_feature: MA Experiment 20000173 PARAMETER Experiment Name: At_42deg_Heat_P Parameter: Tissue Value: Aerial
  misc_feature: MA Experiment ID: 20000224 Result: Down-regulated in Transcription
gggatcgtaagaacagaggatttttctcggccaagttttctctagctcaggttaaaattcgatttgtgagatctgttagttagattgtacatgacggtgcgaatttattgaatctgtttaaatctattgaaacgtgaaacgcatttgagtattgtgaggctgaggaaatttctgaaagtggttttgggacgatgatgctggtgttgcggagtttgccataatcagatctgtatgtatgtgggtttcttgataaaagttgtatgaggaaggcattggagatttgtgttgaagaattgatgtatgggagtatgaaggaggtaatgttgttggtgtgtgtggttgatgttggcaggtgtttgatgtgaattttttgagggaggggaatgagttcaatgagcagaagcagaagtcgaagtagaagtcgtagtcgggatcggtttcgtagtcggagtccgagagacaggagaatgagatctgaacgagtttcttaccatgatgctccttctagaagggagagggagccacgtcgtgccttcagccaaggaaatctctgcaacaactgcaagcgacctggtcactttgcaagagactgttctaatgtttccgtctgtaacaactgtggtcttccagggcacattgcagcagaatgcactgcggaatcacgttgttggaactgtagagaaccgggccacgtagcctcaaactgttcaaacgaaggaatctgccactcctgtggtaaatctggacatcgagccagagactgctctaattcggattctcgtgcaggagacttaaggctctgcaacaactgcttcaaacagggacatcttgccgctgactgcacaaatgacaaggcgtgcaagaactgcaggacttcaggtcacatagctcgcgattgcaggaacgatccagtttgtaacatctgcagtatctcggggcatgttgctagacactgcccaaagggtgacagcaattactctgacagaggaagcagggttcgagatggtggtatgcaaagaggtggtttgagcagaatgagcagagacagagaaggcgttagtgctatgataatatgtcacaattgtggtggccgaggacacagggcgtacgagtgtccgtctgctcgagtcgctgaccgtggattccgccggtactgaggctcttaaatttaccaattgaagttccattcatcttcacctttacccttttagcttctgcactcttgtttttgttgagctacattgttgttttctaatctcatggtttttgtctattggagtgaatcaaggatggttttagttttggtttgttttcggaaaatttgagacattgcttgtgttgtatgaagtattgaacagattagtgtgatgcagagttctgagttttcagaactcaatattatatt

SEQ ID NO: 89132 - protein, 257 aa, Arabidopsis thaliana; identical to SEQ ID NO: 39512
  peptide (1)..(257): Ceres Seq. ID no. 12715597
  misc_feature (229)..(246): Pfam Name: Zinc knuckle Pfam Description: Zinc knuckle
  misc_feature (1)..(257): Homolog of NCBI NO: 18410883 NR Description: DNA-binding protein; protein id: At1g75560.1,
  misc_feature (4)..(257): Homolog of NCBI NO: 21537255 NR Description: DNA-binding protein [Arabidopsis thaliana]
  misc_feature (23)..(257): Homolog of NCBI NO: 25404984 NR Description: protein F10A5.22 [imported] - Arabidopsis >gi|9369368|gb|AAF87117.1|AC006434_13 F10A5.22 [Arabidopsis
  misc_feature (20)..(252): Homolog of NCBI NO: 37536582 NR Description: putative zinc finger protein [Oryza sativa
  misc_feature (1)..(172): Homolog of NCBI NO: 25404984 NR Description: protein F10A5.22 [imported] - Arabidopsis >gi|9369368|gb|AAF87117.1|AC006434_13 F10A5.22 [Arabidopsis
  misc_feature (57)..(193): Homolog of NCBI NO: 6324074 NR Description: GIG3 suppressor; Gis2p [Saccharomyces cerevisiae]
  misc_feature (56)..(172): Homolog of NCBI NO: 6324074 NR Description: GIG3 suppressor; Gis2p [Saccharomyces cerevisiae]
  misc_feature (75)..(191): Homolog of NCBI NO: 26347241 NR Description: unnamed protein product [Mus musculus]
  misc_feature (45)..(255): Homolog of NCBI NO: 729704 NR Description: DNA-binding protein HEXBP (Hexamer-binding
  misc_feature (71)..(191): Homolog of NCBI NO: 16549164 NR Description: unnamed protein product [Homo sapiens]

SEQ ID NO: 89133 - protein, 254 aa, Arabidopsis thaliana; identical to SEQ ID NO: 39513
  peptide (1)..(254): Ceres Seq. ID no. 12715598
  misc_feature (226)..(243): Pfam Name: Zinc knuckle Pfam Description: Zinc knuckle
  misc_feature (1)..(254): Homolog of NCBI NO: 18410883 NR Description: DNA-binding protein; protein id: At1g75560.1,
  misc_feature (1)..(254): Homolog of NCBI NO: 21537255 NR Description: DNA-binding protein [Arabidopsis thaliana]
  misc_feature (20)..(254): Homolog of NCBI NO: 25404984 NR Description: protein F10A5.22 [imported] - Arabidopsis >gi|9369368|gb|AAF87117.1|AC006434_13 F10A5.22 [Arabidopsis
  misc_feature (17)..(249): Homolog of NCBI NO: 37536582 NR Description: putative zinc finger protein [Oryza sativa
  misc_feature (1)..(169): Homolog of NCBI NO: 25404984 NR Description: protein F10A5.22 [imported] - Arabidopsis >gi|9369368|gb|AAF87117.1|AC006434_13 F10A5.22 [Arabidopsis
  misc_feature (54)..(190): Homolog of NCBI NO: 6324074 NR Description: GIG3 suppressor; Gis2p [Saccharomyces cerevisiae]
  misc_feature (53)..(169): Homolog of NCBI NO: 6324074 NR Description: GIG3 suppressor; Gis2p [Saccharomyces cerevisiae]
  misc_feature (72)..(188): Homolog of NCBI NO: 26347241 NR Description: unnamed protein product [Mus musculus]
  misc_feature (42)..(252): Homolog of NCBI NO: 729704 NR Description: DNA-binding protein HEXBP (Hexamer-binding
  misc_feature (68)..(188): Homolog of NCBI NO: 16549164 NR Description: unnamed protein product [Homo sapiens]

SEQ ID NO: 89134 - protein, 229 aa, Arabidopsis thaliana; identical to SEQ ID NO: 39514
  peptide (1)..(229): Ceres Seq. ID no. 12715599
  misc_feature (201)..(218): Pfam Name: Zinc knuckle Pfam Description: Zinc knuckle
  misc_feature (1)..(229): Homolog of NCBI NO: 18410883 NR Description: DNA-binding protein; protein id: At1g75560.1,
  misc_feature (1)..(229): Homolog of NCBI NO: 21537255 NR Description: DNA-binding protein [Arabidopsis thaliana]
  misc_feature (1)..(229): Homolog of NCBI NO: 25404984 NR Description: protein F10A5.22 [imported] - Arabidopsis >gi|9369368|gb|AAF87117.1|AC006434_13 F10A5.22 [Arabidopsis
  misc_feature (1)..(224): Homolog of NCBI NO: 37536582 NR Description: putative zinc finger protein [Oryza sativa
  misc_feature (1)..(144): Homolog of NCBI NO: 25404984 NR Description: protein F10A5.22 [imported] - Arabidopsis >gi|9369368|gb|AAF87117.1|AC006434_13 F10A5.22 [Arabidopsis
  misc_feature (29)..(165): Homolog of NCBI NO: 6324074 NR Description: GIG3 suppressor; Gis2p [Saccharomyces cerevisiae]
  misc_feature (28)..(144): Homolog of NCBI NO: 6324074 NR Description: GIG3 suppressor; Gis2p [Saccharomyces cerevisiae]
  misc_feature (47)..(163): Homolog of NCBI NO: 26347241 NR Description: unnamed protein product [Mus musculus]
  misc_feature (17)..(227): Homolog of NCBI NO: 729704 NR Description: DNA-binding protein HEXBP (Hexamer-binding
  misc_feature (43)..(163): Homolog of NCBI NO: 16549164 NR Description: unnamed protein product [Homo sapiens]

SEQ ID NO: 89135 - DNA, 411 bp, Arabidopsis thaliana
  misc_feature (1)..(411): Ceres Seq. ID no. 12715604
  misc_feature: MA Experiment ID: 20000328 Result: Down-regulated in Transcription
  misc_feature: MA Experiment 20000328 PARAMETER Experiment Name: At_42deg_Heat_Sub_P Parameter: Age (day) Value: 14
  misc_feature: MA Experiment 20000328 PARAMETER Experiment Name: At_42deg_Heat_Sub_P Parameter: Organism Value: A. thaliana
  misc_feature: MA Experiment 20000328 PARAMETER Experiment Name: At_42deg_Heat_Sub_P Parameter: Plant Line Value: WS
  misc_feature: MA Experiment 20000328 PARAMETER Experiment Name: At_42deg_Heat_Sub_P Parameter: Temperature (deg C) Value: 42 vs. 22
  misc_feature: MA Experiment 20000328 PARAMETER Experiment Name: At_42deg_Heat_Sub_P Parameter: Timepoint (hr) Value: 6
  misc_feature: MA Experiment 20000328 PARAMETER Experiment Name: At_42deg_Heat_Sub_P Parameter: Tissue Value: Aerial
  misc_feature: MA Experiment ID: 20000355 Result: Up-regulated in Transcription
  misc_feature: MA Experiment 20000355 PARAMETER Experiment Name: At_Siliques_Sub_P Parameter: Age (day) Value: 21
  misc_feature: MA Experiment 20000355 PARAMETER Experiment Name: At_Siliques_Sub_P Parameter: Organism Value: A. thaliana
  misc_feature: MA Experiment 20000355 PARAMETER Experiment Name: At_Siliques_Sub_P Parameter: Plant Line Value: WS
  misc_feature: MA Experiment 20000355 PARAMETER Experiment Name: At_Siliques_Sub_P Parameter: Tissue Value: Less Than 5mm Siliques vs. Whole Plant
  misc_feature: MA Experiment ID: 20000440 Result: Up-regulated in Transcription
  misc_feature: MA Experiment 20000440 PARAMETER Experiment Name: At_Closed-Flower__Sub_P Parameter: Tissue Value: Closed Flower vs. Whole Plant
atggctcgtacgaagcaaactgcaagaaaatcacacggaggaaaagctccgaggactctgctcgctaccaaggcggcgaggaaatctgcgccgactactggaggagtcaagaaacctcaccgttaccgtcccggaaccgtcgctcttcgtgagattcgtaaataccagaagagcacagagttgttgatccgtaaacttccttttcaacgtcttgttcgtgaaatcgctcaagattacaagacggatctgagattccagagccatgcggtgttagctcttcaagaagctgctgaagcatatttggttggtttgtttgaagatacaaatctgtgtgccattcatgccaagagggttacgatcatgcctaaagatgttcaattggcaagaaggattcgtggagagcgtgcttag

SEQ ID NO: 89136 - protein, 136 aa, Arabidopsis thaliana
  peptide (1)..(136): Ceres Seq. ID no. 12715605
  misc_feature (17)..(135): Pfam Name: Core histone H2A/H2B/H3/H4 Pfam Description: Core histone H2A/H2B/H3/H4
  misc_feature (1)..(136): Homolog of NCBI NO: 15222297 NR Description: histone H3, putative; protein id: At1g75600.1
  misc_feature (1)..(136): Homolog of NCBI NO: 15236103 NR Description: histone H3.3; protein id: At4g40030.1, supported cDNA: gi_14326561 [Arabidopsis thaliana] Histon H3; protein id: At4g40040.1, supported by cDNA: 2670.
  misc_feature (1)..(136): Homolog of NCBI NO: 18698662 NR Description: disease-resistent-related protein [Oryza sativa]
  misc_feature (1)..(136): Homolog of NCBI NO: 21555021 NR Description: histone H3 protein, putative [Arabidopsis
  misc_feature (1)..(136): Homolog of NCBI NO: 15222272 NR Description: histone H3 protein, putative; protein id: supported by cDNA: 268982. [Arabidopsis thaliana]
  misc_feature (1)..(136): Homolog of NCBI NO: 13919643 NR Description: histone H3 [Trichinella spiralis]
  misc_feature (1)..(136): Homolog of NCBI NO: 2119013 NR Description: histone H3.2 protein - shrew mouse
  misc_feature (1)..(136): Homolog of NCBI NO: 7305139 NR Description: histone 1, H3f; histone gene complex 1 [Mus
  misc_feature (1)..(136): Homolog of NCBI NO: 30061401 NR Description: histone 2, H3ca1 [Mus musculus]
  misc_feature (1)..(136): Homolog of NCBI NO: 37546835 NR Description: similar to histone protein Hist2h3c1 [Homo
MARTKQTARKSHGGKAPRTLLATKAARKSAPTTGGVKKPHRYRPGTVALREIRKYQKSTELLIRKLPFQRLVREIAQDYKTDLRFQSHAVLALQEAAEAYLVGLFEDTNLCAIHAKRVTIMPKDVQLARRIRGERA

SEQ ID NO: 89137 - DNA, 1199 bp, Arabidopsis thaliana
  misc_feature (1)..(1199): Ceres Seq. ID no. 12715636
  misc_feature: MA Experiment ID: 20000265 Result: Up-regulated in Transcription
  misc_feature: MA Experiment 20000265 PARAMETER Experiment Name: At_Open_Flower_P Parameter: Age (day) Value: 21
  misc_feature: MA Experiment 20000265 PARAMETER Experiment Name: At_Open_Flower_P Parameter: Plant Line Value: WS
  misc_feature: MA Experiment 20000265 PARAMETER Experiment Name: At_Open_Flower_P Parameter: Tissue Value: Closed Flower vs. Whole Plant
  misc_feature: MA Experiment ID: 20000286 Result: Up-regulated in Transcription
  misc_feature: MA Experiment 20000286 PARAMETER Experiment Name: At_Open_Flower_P Parameter: Age (day) Value: 21
  misc_feature: MA Experiment 20000286 PARAMETER Experiment Name: At_Open_Flower_P Parameter: Plant Line Value: WS
  misc_feature: MA Experiment 20000286 PARAMETER Experiment Name: At_Open_Flower_P Parameter: Tissue Value: Half Open vs. Whole Plant
  misc_feature: MA Experiment ID: 20001910 Result: Down-regulated in Transcription
  misc_feature: MA Experiment 20001910 PARAMETER Experiment Name: At_Drought_Reproduction_P Parameter: Age (day) Value: 37
  misc_feature: MA Experiment 20001910 PARAMETER Experiment Name: At_Drought_Reproduction_P Parameter: Organism Value: A. thaliana
  misc_feature: MA Experiment 20001910 PARAMETER Experiment Name: At_Drought_Reproduction_P Parameter: Plant Line Value: WS
  misc_feature: MA Experiment 20001910 PARAMETER Experiment Name: At_Drought_Reproduction_P Parameter: Timepoint (day) Value: 7
  misc_feature: MA Experiment 20001910 PARAMETER Experiment Name: At_Drought_Reproduction_P Parameter: Tissue Value: Flowers
  misc_feature: MA Experiment 20001910 PARAMETER Experiment Name: At_Drought_Reproduction_P Parameter: Treatment Value: Drought vs. No Drought
atgaacttaattagggttctatatgtttagaaaaaaaatgttggtgttagcattattttccatttacttcttatcaatagaagctgtccggaatgaatcatttcctgcgctattagcttttggagattcaatggtcgatactggtaacaacaattacctcctgactctaatgaaaggaaattactggccatatgggtggaatttcgactcaaaaataccgaccggaagatttggaaacggaagagttttctccgatgtagttgctgaaggtttggggatcaaaagaattgtaccagcttatcgtaagttatacattgctccaagcgaccttaaaacgggtgtttcttttgcatcaggtggtgcaggagtcgaccctgttacatccaaattgctgagagttttatcgccagctgaccaagtaaaagatttcaaaggctacaaaagaaagctaaaaggtgtagtaggcaggtcaaaagcaaaaaaaatagttgcaaattcagtgattcttgtttctgaaggaaataatgatattggaatcacatatgcgattcatgatgctggtatgcgattaatgactccgaaagtatacaccagtaaattagttggttggaacaaaaaatttataaaagatttatatgatcacggagcaagaaaatttgcggtgatgggagtgataccattgggatgtttgcctatgtcaagacttatttttggtgggttcttcgtgtggtgtaatttcttggcaaacacaatctctgaagattacaacaaaaaattgaaaagcggaattaaaagttggagaggagcatcagattttaggggtgctaggtttgtctatgtcgacatgtacaactctcttatggatgttatcaacaatcataggaaatacggatttacccatgagaagaatggatgttgttgtatgcttacggcaatagtaccatgctccaacccagataaatatgtcttctatgactttgctcatccctccgagaaagcctacaaaacaattgctaaaaagcttgtcgaggatatcaagacaggacttgcctgatttcttacaatgctattttcatcttggaattaccataattaattatatacgtacttcttctgtttcaaaatctttgatgttctagagaatttttttttgttttacattataatgttctcatttttaatgtaaaatttattagttt

SEQ ID NO: 89138 - protein, 343 aa, Arabidopsis thaliana
  peptide (1)..(343): Ceres Seq. ID no. 12715637
  misc_feature (30)..(334): Pfam Name: GDSL-like Lipase/Acylhydrolase Pfam Description: GDSL-like Lipase/Acylhydrolase
  misc_feature (1)..(343): Homolog of NCBI NO: 8778809 NR Description: T4O12.14 [Arabidopsis thaliana]
  misc_feature (6)..(343): Homolog of NCBI NO: 18410967 NR Description: family II extracellular lipase 5 (EXL5); protein At1g75920.1, supported by cDNA: gi_15054391 [Arabidopsis >gi|15054392|gb|AAK30020.1| family II lipase EXL5 [Arabidopsis
  misc_feature (1)..(343): Homolog of NCBI NO: 15222902 NR Description: family II extracellular lipase 4 (EXL4); protein At1g75910.1, supported by cDNA: gi_15054387 [Arabidopsis
  misc_feature (1)..(343): Homolog of NCBI NO: 15054388 NR Description: family II lipase EXL4 [Arabidopsis thaliana]
  misc_feature (24)..(343): Homolog of NCBI NO: 25404994 NR Description: protein T4O12.13 [imported] - Arabidopsis >gi|8778808|gb|AAF79815.1|AC007396_8 T4O12.13 [Arabidopsis
  misc_feature (1)..(343): Homolog of NCBI NO: 15222904 NR Description: family II extracellular lipase 6 (EXL6); protein At1g75930.1, supported by cDNA: gi_15054389 [Arabidopsis >gi|15054390|gb|AAK30021.1| family II lipase EXL6 [Arabidopsis
  misc_feature (1)..(328): Homolog of NCBI NO: 25404995 NR Description: protein T4O12.15 [imported] - Arabidopsis >gi|8778810|gb|AAF26759.2|AC007396_8 T4O12.15 [Arabidopsis
  misc_feature (1)..(343): Homolog of NCBI NO: 15219505 NR Description: putative lipase/acylhydrolase; protein id: [Arabidopsis thaliana] >gi|25336263|pir||A96763 protein
  misc_feature (9)..(343): Homolog of NCBI NO: 15242657 NR Description: lipase/acylhydrolase-like protein; protein id:
  misc_feature (1)..(343): Homolog of NCBI NO: 15220775 NR Description: hypothetical protein; protein id: At1g23500.1
MFRKKMLVLALFSIYFLSIEAVRNESFPALLAFGDSMVDTGNNNYLLTLMKGNYWPYGWNFDSKIPTGRFGNGRVFSDVVAEGLGIKRIVPAYRKLYIAPSDLKTGVSFASGGAGVDPVTSKLLRVLSPADQVKDFKGYKRKLKGVVGRSKAKKIVANSVILVSEGNNDIGITYAIHDAGMRLMTPKVYTSKLVGWNKKFIKDLYDHGARKFAVMGVIPLGCLPMSRLIFGGFFVWCNFLANTISEDYNKKLKSGIKSWRGASDFRGARFVYVDMYNSLMDVINNHRKYGFTHEKNGCCCMLTAIVPCSNPDKYVFYDFAHPSEKAYKTIAKKLVEDIKTGLA

SEQ ID NO: 89139 - protein, 338 aa, Arabidopsis thaliana
  peptide (1)..(338): Ceres Seq. ID no. 12715638
  misc_feature (25)..(329): Pfam Name: GDSL-like Lipase/Acylhydrolase Pfam Description: GDSL-like Lipase/Acylhydrolase
  misc_feature (1)..(338): Homolog of NCBI NO: 8778809 NR Description: T4O12.14 [Arabidopsis thaliana]
  misc_feature (1)..(338): Homolog of NCBI NO: 18410967 NR Description: family II extracellular lipase 5 (EXL5); protein At1g75920.1, supported by cDNA: gi_15054391 [Arabidopsis >gi|15054392|gb|AAK30020.1| family II lipase EXL5 [Arabidopsis
  misc_feature (1)..(338): Homolog of NCBI NO: 15222902 NR Description: family II extracellular lipase 4 (EXL4); protein At1g75910.1, supported by cDNA: gi_15054387 [Arabidopsis
  misc_feature (1)..(338): Homolog of NCBI NO: 15054388 NR Description: family II lipase EXL4 [Arabidopsis thaliana]
  misc_feature (19)..(338): Homolog of NCBI NO: 25404994 NR Description: protein T4O12.13 [imported] - Arabidopsis >gi|8778808|gb|AAF79815.1|AC007396_8 T4O12.13 [Arabidopsis
  misc_feature (1)..(338): Homolog of NCBI NO: 15222904 NR Description: family II extracellular lipase 6 (EXL6); protein At1g75930.1, supported by cDNA: gi_15054389 [Arabidopsis >gi|15054390|gb|AAK30021.1| family II lipase EXL6 [Arabidopsis
  misc_feature (1)..(323): Homolog of NCBI NO: 25404995 NR Description: protein T4O12.15 [imported] - Arabidopsis >gi|8778810|gb|AAF26759.2|AC007396_8 T4O12.15 [Arabidopsis
  misc_feature (1)..(338): Homolog of NCBI NO: 15219505 NR Description: putative lipase/acylhydrolase; protein id: [Arabidopsis thaliana] >gi|25336263|pir||A96763 protein
  misc_feature (4)..(338): Homolog of NCBI NO: 15242657 NR Description: lipase/acylhydrolase-like protein; protein id:
  misc_feature (1)..(338): Homolog of NCBI NO: 15220775 NR Description: hypothetical protein; protein id: At1g23500.1
MLVLALFSIYFLSIEAVRNESFPALLAFGDSMVDTGNNNYLLTLMKGNYWPYGWNFDSKIPTGRFGNGRVFSDVVAEGLGIKRIVPAYRKLYIAPSDLKTGVSFASGGAGVDPVTSKLLRVLSPADQVKDFKGYKRKLKGVVGRSKAKKIVANSVILVSEGNNDIGITYAIHDAGMRLMTPKVYTSKLVGWNKKFIKDLYDHGARKFAVMGVIPLGCLPMSRLIFGGFFVWCNFLANTISEDYNKKLKSGIKSWRGASDFRGARFVYVDMYNSLMDVINNHRKYGFTHEKNGCCCMLTAIVPCSNPDKYVFYDFAHPSEKAYKTIAKKLVEDIKTGLA

SEQ ID NO: 89140 - protein, 307 aa, Arabidopsis thaliana
  peptide (1)..(307): Ceres Seq. ID no. 12715639
  misc_feature (1)..(298): Pfam Name: GDSL-like Lipase/Acylhydrolase Pfam Description: GDSL-like Lipase/Acylhydrolase
  misc_feature (1)..(307): Homolog of NCBI NO: 8778809 NR Description: T4O12.14 [Arabidopsis thaliana]
  misc_feature (1)..(307): Homolog of NCBI NO: 18410967 NR Description: family II extracellular lipase 5 (EXL5); protein At1g75920.1, supported by cDNA: gi_15054391 [Arabidopsis >gi|15054392|gb|AAK30020.1| family II lipase EXL5 [Arabidopsis
  misc_feature (1)..(307): Homolog of NCBI NO: 15222902 NR Description: family II extracellular lipase 4 (EXL4); protein At1g75910.1, supported by cDNA: gi_15054387 [Arabidopsis
  misc_feature (1)..(307): Homolog of NCBI NO: 15054388 NR Description: family II lipase EXL4 [Arabidopsis thaliana]
  misc_feature (1)..(307): Homolog of NCBI NO: 25404994 NR Description: protein T4O12.13 [imported] - Arabidopsis >gi|8778808|gb|AAF79815.1|AC007396_8 T4O12.13 [Arabidopsis
  misc_feature (1)..(307): Homolog of NCBI NO: 15222904 NR Description: family II extracellular lipase 6 (EXL6); protein At1g75930.1, supported by cDNA: gi_15054389 [Arabidopsis >gi|15054390|gb|AAK30021.1| family II lipase EXL6 [Arabidopsis
  misc_feature (1)..(292): Homolog of NCBI NO: 25404995 NR Description: protein T4O12.15 [imported] - Arabidopsis >gi|8778810|gb|AAF26759.2|AC007396_8 T4O12.15 [Arabidopsis
  misc_feature (1)..(307): Homolog of NCBI NO: 15219505 NR Description: putative lipase/acylhydrolase; protein id: [Arabidopsis thaliana] >gi|25336263|pir||A96763 protein
  misc_feature (1)..(307): Homolog of NCBI NO: 15242657 NR Description: lipase/acylhydrolase-like protein; protein id:
  misc_feature (1)..(307): Homolog of NCBI NO: 15220775 NR Description: hypothetical protein; protein id: At1g23500.1
MVDTGNNNYLLTLMKGNYWPYGWNFDSKIPTGRFGNGRVFSDVVAEGLGIKRIVPAYRKLYIAPSDLKTGVSFASGGAGVDPVTSKLLRVLSPADQVKDFKGYKRKLKGVVGRSKAKKIVANSVILVSEGNNDIGITYAIHDAGMRLMTPKVYTSKLVGWNKKFIKDLYDHGARKFAVMGVIPLGCLPMSRLIFGGFFVWCNFLANTISEDYNKKLKSGIKSWRGASDFRGARFVYVDMYNSLMDVINNHRKYGFTHEKNGCCCMLTAIVPCSNPDKYVFYDFAHPSEKAYKTIAKKLVEDIKTGLA

SEQ ID NO: 89141 - DNA, 2604 bp, Arabidopsis thaliana
  misc_feature (1)..(2604): Ceres Seq. ID no. 12715643
  misc_feature: MA Experiment ID: 108473 Result: Down-regulated in Transcription
  misc_feature: MA Experiment 108473 PARAMETER Experiment Name: At_Drought_Flowers_cDNA_P Parameter: Timepoint (hr) Value: 7 d
  misc_feature: MA Experiment 108473 PARAMETER Experiment Name: At_Drought_Flowers_cDNA_P Parameter: Tissue Value: Flower
  misc_feature: MA Experiment 108473 PARAMETER Experiment Name: At_Drought_Flowers_cDNA_P Parameter: Treatment Value: Drought vs. No Drought
  misc_feature: MA Experiment ID: 108501 Result: Down-regulated in Transcription
  misc_feature: MA Experiment 108501 PARAMETER Experiment Name: At_ap2_floral_buds_cDNA_P Parameter: Plant Line Value: ap2 (Ler.)
  misc_feature: MA Experiment 108501 PARAMETER Experiment Name: At_ap2_floral_buds_cDNA_P Parameter: Tissue Value: Closed Flower
atgtttaggggaaaaatatttgtgttatcattattttctatttacgtcctctcatcagcggctgaaaaaaatacatcattttctgcgctttttgcttttggtgattcagtcttagatacgggaaacaataattttcttcttactcttctcaaaggaaattattggccatatggtttgagttttgactataaatttccgacgggaagattcggaaatggaagagttttcaccgatatagttgccgaaggtttacagatcaaaagacttgtaccagcttatagcaagattcgtcgcatcagttctgaagaccttaagactggcgtttgttttgcatcaggtggttcaggaattgacgatcttacatcccgaacactgagagttttatcggcaggtgaccaagtaaaagactttaaagactatttgaagaaactaagaagagtagtgaaacgtaagaaaaaagtaaaagaaatagtttcaaacgctgtgtttcttatttctgaaggaaataatgatcttggatactttgtcgctcccgctcttcttcgattacagtccacaacaacatacaccagtaaaatggttgtttggaccagaaagtttctaaaagatttatacgatcttggagcgagaaaatttgcggtgatgggagtgatgcctgtgggatgtttgcctatccatcgagcctcattcggtggggtattcggatggtgtaacttcctcttgaatagaattacggaggacttcaacatgaaattgcagaaaggtcttacaagttacgcagtagaatatgatttcaaagatgcaaagtttgtttacgtcgacatatacggtactcttatggatcttgtcaaaaatcctatggcctatgggtttacagaagcgaaaaaagcttgttgttgtatgccgaatgcaataataccatgcttccatccagataaatacgtcttctatgactttgctcacccttcccagaaagcctacgaacaaaaatcccttccaacatatttgccatttacacttcttcaagttttccatatactaatggggaggtttcataaatttcctctcctaggtttagttctgttcctcggtctgaccggctcacttatcgccgccaatgagtatgcctgttctagtaccgatatacactttactcgtgccaatttccctaaaggtttcatttttggtaccgcaactgctgcttttcaggttgaaggagctgtaaatgaaggatgtagaggtccaagcatgtgggacgtatacaccaagaaattcccacataaatgtaattatcacaatgccgacgttgctgtcgatttctaccatcgttacaaggaagatatcaagttgatgaaaaatctgaacactgatggctttagattttccattgcatggcccagaatattcccccatggtaggatggagaaaggaataagcaaagcaggtgtgcagtattaccacgatctgatcgatgagctcctcgcaaatggtataacaccattagtaactgtttttcactgggacactcctcaagacttagaagatgaatatggtggctttttaagcgaccagtacggagacaaagtgaagcattggatcacatttaacgaaccatgggtgttcagtcgagctggctacgacattgggaacaaagcaccgggacgttgttctaagtacatcaaagaacatggagagatgtgtcacgatggacggtcaggacacgaagcttatatcgttagtcataacatgctcttggcacatgccgatgccgttgatgcctttaggaaatgcgacaagtgcaaaggtggtaaaattgggattgctcacagtccagcttggtttgaggctcatgagctctcggatgaagagcacgaaactcctgtaactggcctgattgacttcatattgggatggcatttgcatccgaccacatatggagattatccacaatcaatgaaggatcacatcggacatcgactgccgaaattcacagaggcacagaaagagaagttgaaaaattcagctgattttgtaggaatcaactattacacatcagtgtttgcattgcacgacgaagagccagatccttcgcaaccaagttggcagagtgattctctcgtggactgggaaccaaggtatgtggataaattcaatgcttttgctaacaagcctgatgttgctaaagtggaagtctacgcaaagggtttgaggagcctcttgaaatatatcaaggacaaatacggcaatcctgaaatcatgatcaccgagaatggatacggagaggatctaggtgagcaagacacaagccttgtagtggcgctgtcagatcagcacagaacatactatatccagaaacatctcttgagcttgcacgaagcaatttgcgatgataaagtaaacgttacagggtattttcattggtcattgatggacaattttgaatggcaagatggatacaaggcgagatttgggctctactacgtcgattacaaaaataatttgacgcgccacgaaaaattatcagcccagtggtactcgagtttcctccacgatggatcaaaagagttcgaaatcgagcacgagttcgaacacgatgagttgtag

SEQ ID NO: 89142 - protein, 867 aa, Arabidopsis thaliana
  peptide (1)..(867): Ceres Seq. ID no. 12715644
  misc_feature (30)..(334): Pfam Name: GDSL-like Lipase/Acylhydrolase Pfam Description: GDSL-like Lipase/Acylhydrolase
  misc_feature (348)..(867): Homolog of NCBI NO: 15222905 NR Description: glycosyl hydrolase family 1, protein id: At1g75940.1, supported by cDNA: gi_2746340
  misc_feature (348)..(867): Homolog of NCBI NO: 25289457 NR Description: probable beta-glucosidase (EC 3.2.1.21) ATA27 - Arabidopsis thaliana >gi|2746341|gb|AAC39504.1| ATA27
  misc_feature (382)..(867): Homolog of NCBI NO: 18377977 NR Description: putative beta-glucosidase [Arabidopsis thaliana]
  misc_feature (353)..(854): Homolog of NCBI NO: 22331243 NR Description: glycosyl hydrolase family 1; protein id: supported by cDNA: gi_16604492, supported by cDNA: gi_17381179,
  misc_feature (353)..(854): Homolog of NCBI NO: 16604493 NR Description: AT3g21370/MHC9_5 [Arabidopsis thaliana]
  misc_feature (516)..(861): Homolog of NCBI NO: 15241841 NR Description: glycosyl hydrolase family 1; protein id:
  misc_feature (353)..(562): Homolog of NCBI NO: 15241841 NR Description: glycosyl hydrolase family 1; protein id:
  misc_feature (348)..(849): Homolog of NCBI NO: 12043529 NR Description: beta-glucosidase 1 [Arabidopsis thaliana]
  misc_feature (348)..(849): Homolog of NCBI NO: 15218992 NR Description: glycosyl hydrolase family 1, beta-glucosidase protein id: At1g52400.1, supported by cDNA: gi_14532461,
  misc_feature (348)..(849): Homolog of NCBI NO: 12229686 NR Description: Beta-glucosidase homolog precursor
MFRGKIFVLSLFSIYVLSSAAEKNTSFSALFAFGDSVLDTGNNNFLLTLLKGNYWPYGLSFDYKFPTGRFGNGRVFTDIVAEGLQIKRLVPAYSKIRRISSEDLKTGVCFASGGSGIDDLTSRTLRVLSAGDQVKDFKDYLKKLRRVVKRKKKVKEIVSNAVFLISEGNNDLGYFVAPALLRLQSTTTYTSKMVVWTRKFLKDLYDLGARKFAVMGVMPVGCLPIHRASFGGVFGWCNFLLNRITEDFNMKLQKGLTSYAVEYDFKDAKFVYVDIYGTLMDLVKNPMAYGFTEAKKACCCMPNAIIPCFHPDKYVFYDFAHPSQKAYEQKSLPTYLPFTLLQVFHILMGRFHKFPLLGLVLFLGLTGSLIAANEYACSSTDIHFTRANFPKGFIFGTATAAFQVEGAVNEGCRGPSMWDVYTKKFPHKCNYHNADVAVDFYHRYKEDIKLMKNLNTDGFRFSIAWPRIFPHGRMEKGISKAGVQYYHDLIDELLANGITPLVTVFHWDTPQDLEDEYGGFLSDQYGDKVKHWITFNEPWVFSRAGYDIGNKAPGRCSKYIKEHGEMCHDGRSGHEAYIVSHNMLLAHADAVDAFRKCDKCKGGKIGIAHSPAWFEAHELSDEEHETPVTGLIDFILGWHLHPTTYGDYPQSMKDHIGHRLPKFTEAQKEKLKNSADFVGINYYTSVFALHDEEPDPSQPSWQSDSLVDWEPRYVDKFNAFANKPDVAKVEVYAKGLRSLLKYIKDKYGNPEIMITENGYGEDLGEQDTSLVVALSDQHRTYYIQKHLLSLHEAICDDKVNVTGYFHWSLMDNFEWQDGYKARFGLYYVDYKNNLTRHEKLSAQWYSSFLHDGSKEFEIEHEFEHDEL

SEQ ID NO: 89143 - protein, 675 aa, Arabidopsis thaliana
  peptide (1)..(675): Ceres Seq. ID no. 12715645
  misc_feature (1)..(142): Pfam Name: GDSL-like Lipase/Acylhydrolase Pfam Description: GDSL-like Lipase/Acylhydrolase
  misc_feature (156)..(675): Homolog of NCBI NO: 15222905 NR Description: glycosyl hydrolase family 1, protein id: At1g75940.1, supported by cDNA: gi_2746340
  misc_feature (156)..(675): Homolog of NCBI NO: 25289457 NR Description: probable beta-glucosidase (EC 3.2.1.21) ATA27 - Arabidopsis thaliana >gi|2746341|gb|AAC39504.1| ATA27
  misc_feature (190)..(675): Homolog of NCBI NO: 18377977 NR Description: putative beta-glucosidase [Arabidopsis thaliana]
  misc_feature (161)..(662): Homolog of NCBI NO: 22331243 NR Description: glycosyl hydrolase family 1; protein id: supported by cDNA: gi_16604492, supported by cDNA: gi_17381179,
  misc_feature (161)..(662): Homolog of NCBI NO: 16604493 NR Description: AT3g21370/MHC9_5 [Arabidopsis thaliana]
  misc_feature (324)..(669): Homolog of NCBI NO: 15241841 NR Description: glycosyl hydrolase family 1; protein id:
  misc_feature (161)..(370): Homolog of NCBI NO: 15241841 NR Description: glycosyl hydrolase family 1; protein id:
  misc_feature (156)..(657): Homolog of NCBI NO: 12043529 NR Description: beta-glucosidase 1 [Arabidopsis thaliana]
  misc_feature (156)..(657): Homolog of NCBI NO: 15218992 NR Description: glycosyl hydrolase family 1, beta-glucosidase protein id: At1g52400.1, supported by cDNA: gi_14532461,
  misc_feature (156)..(657): Homolog of NCBI NO: 12229686 NR Description: Beta-glucosidase homolog precursor
MVVWTRKFLKDLYDLGARKFAVMGVMPVGCLPIHRASFGGVFGWCNFLLNRITEDFNMKLQKGLTSYAVEYDFKDAKFVYVDIYGTLMDLVKNPMAYGFTEAKKACCCMPNAIIPCFHPDKYVFYDFAHPSQKAYEQKSLPTYLPFTLLQVFHILMGRFHKFPLLGLVLFLGLTGSLIAANEYACSSTDIHFTRANFPKGFIFGTATAAFQVEGAVNEGCRGPSMWDVYTKKFPHKCNYHNADVAVDFYHRYKEDIKLMKNLNTDGFRFSIAWPRIFPHGRMEKGISKAGVQYYHDLIDELLANGITPLVTVFHWDTPQDLEDEYGGFLSDQYGDKVKHWITFNEPWVFSRAGYDIGNKAPGRCSKYIKEHGEMCHDGRSGHEAYIVSHNMLLAHADAVDAFRKCDKCKGGKIGIAHSPAWFEAHELSDEEHETPVTGLIDFILGWHLHPTTYGDYPQSMKDHIGHRLPKFTEAQKEKLKNSADFVGINYYTSVFALHDEEPDPSQPSWQSDSLVDWEPRYVDKFNAFANKPDVAKVEVYAKGLRSLLKYIKDKYGNPEIMITENGYGEDLGEQDTSLVVALSDQHRTYYIQKHLLSLHEAICDDKVNVTGYFHWSLMDNFEWQDGYKARFGLYYVDYKNNLTRHEKLSAQWYSSFLHDGSKEFEIEHEFEHDEL

SEQ ID NO: 89144 - protein, 653 aa, Arabidopsis thaliana
  peptide (1)..(653): Ceres Seq. ID no. 12715646
  misc_feature (1)..(120): Pfam Name: GDSL-like Lipase/Acylhydrolase Pfam Description: GDSL-like Lipase/Acylhydrolase
  misc_feature (134)..(653): Homolog of NCBI NO: 15222905 NR Description: glycosyl hydrolase family 1, protein id: At1g75940.1, supported by cDNA: gi_2746340
  misc_feature (134)..(653): Homolog of NCBI NO: 25289457 NR Description: probable beta-glucosidase (EC 3.2.1.21) ATA27 - Arabidopsis thaliana >gi|2746341|gb|AAC39504.1| ATA27
  misc_feature (168)..(653): Homolog of NCBI NO: 18377977 NR Description: putative beta-glucosidase [Arabidopsis thaliana]
  misc_feature (139)..(640): Homolog of NCBI NO: 22331243 NR Description: glycosyl hydrolase family 1; protein id: supported by cDNA: gi_16604492, supported by cDNA: gi_17381179,
  misc_feature (139)..(640): Homolog of NCBI NO: 16604493 NR Description: AT3g21370/MHC9_5 [Arabidopsis thaliana]
  misc_feature (302)..(647): Homolog of NCBI NO: 15241841 NR Description: glycosyl hydrolase family 1; protein id:
  misc_feature (139)..(348): Homolog of NCBI NO: 15241841 NR Description: glycosyl hydrolase family 1; protein id:
  misc_feature (134)..(635): Homolog of NCBI NO: 12043529 NR Description: beta-glucosidase 1 [Arabidopsis thaliana]
  misc_feature (134)..(635): Homolog of NCBI NO: 15218992 NR Description: glycosyl hydrolase family 1, beta-glucosidase protein id: At1g52400.1, supported by cDNA: gi_14532461,
  misc_feature (134)..(635): Homolog of NCBI NO: 12229686 NR Description: Beta-glucosidase homolog precursor
MGVMPVGCLPIHRASFGGVFGWCNFLLNRITEDFNMKLQKGLTSYAVEYDFKDAKFVYVDIYGTLMDLVKNPMAYGFTEAKKACCCMPNAIIPCFHPDKYVFYDFAHPSQKAYEQKSLPTYLPFTLLQVFHILMGRFHKFPLLGLVLFLGLTGSLIAANEYACSSTDIHFTRANFPKGFIFGTATAAFQVEGAVNEGCRGPSMWDVYTKKFPHKCNYHNADVAVDFYHRYKEDIKLMKNLNTDGFRFSIAWPRIFPHGRMEKGISKAGVQYYHDLIDELLANGITPLVTVFHWDTPQDLEDEYGGFLSDQYGDKVKHWITFNEPWVFSRAGYDIGNKAPGRCSKYIKEHGEMCHDGRSGHEAYIVSHNMLLAHADAVDAFRKCDKCKGGKIGIAHSPAWFEAHELSDEEHETPVTGLIDFILGWHLHPTTYGDYPQSMKDHIGHRLPKFTEAQKEKLKNSADFVGINYYTSVFALHDEEPDPSQPSWQSDSLVDWEPRYVDKFNAFANKPDVAKVEVYAKGLRSLLKYIKDKYGNPEIMITENGYGEDLGEQDTSLVVALSDQHRTYYIQKHLLSLHEAICDDKVNVTGYFHWSLMDNFEWQDGYKARFGLYYVDYKNNLTRHEKLSAQWYSSFLHDGSKEFEIEHEFEHDEL

SEQ ID NO: 89145 - DNA, 561 bp, Arabidopsis thaliana
  misc_feature (1)..(561): Ceres Seq. ID no. 12715779
  misc_feature: MA Experiment ID: 20000166 Result: Up-regulated in Transcription
  misc_feature: MA Experiment 20000166 PARAMETER Experiment Name: At_100uM_ABA_P Parameter: Age (day) Value: 14
  misc_feature: MA Experiment 20000166 PARAMETER Experiment Name: At_100uM_ABA_P Parameter: Organism Value: A. thaliana
  misc_feature: MA Experiment 20000166 PARAMETER Experiment Name: At_100uM_ABA_P Parameter: Plant Line Value: WS
  misc_feature: MA Experiment 20000166 PARAMETER Experiment Name: At_100uM_ABA_P Parameter: Timepoint (hr) Value: 1
  misc_feature: MA Experiment 20000166 PARAMETER Experiment Name: At_100uM_ABA_P Parameter: Tissue Value: Aerial
  misc_feature: MA Experiment 20000166 PARAMETER Experiment Name: At_100uM_ABA_P Parameter: Treatment Value: 100uM ABA vs. No Treatment
  misc_feature: MA Experiment ID: 20000171 Result: Up-regulated in Transcription
  misc_feature: MA Experiment 20000171 PARAMETER Experiment Name: At_42deg_Heat_P Parameter: Age (day) Value: 14
  misc_feature: MA Experiment 20000171 PARAMETER Experiment Name: At_42deg_Heat_P Parameter: Organism Value: A. thaliana
  misc_feature: MA Experiment 20000171 PARAMETER Experiment Name: At_42deg_Heat_P Parameter: Plant Line Value: WS
  misc_feature: MA Experiment 20000171 PARAMETER Experiment Name: At_42deg_Heat_P Parameter: Temperature (deg C) Value: 42 vs. 22
  misc_feature: MA Experiment 20000171 PARAMETER Experiment Name: At_42deg_Heat_P Parameter: Timepoint (hr) Value: 1
  misc_feature: MA Experiment 20000171 PARAMETER Experiment Name: At_42deg_Heat_P Parameter: Tissue Value: Aerial
  misc_feature: MA Experiment ID: 20000173 Result: Up-regulated in Transcription
  misc_feature: MA Experiment 20000173 PARAMETER Experiment Name: At_42deg_Heat_P Parameter: Age (day) Value: 14
  misc_feature: MA Experiment 20000173 PARAMETER Experiment Name: At_42deg_Heat_P Parameter: Organism Value: A. thaliana
  misc_feature: MA Experiment 20000173 PARAMETER Experiment Name: At_42deg_Heat_P Parameter: Plant Line Value: WS
  misc_feature: MA Experiment 20000173 PARAMETER Experiment Name: At_42deg_Heat_P Parameter: Temperature (deg C) Value: 42 vs. 22
  misc_feature: MA Experiment 20000173 PARAMETER Experiment Name: At_42deg_Heat_P Parameter: Timepoint (hr) Value: 6
  misc_feature: MA Experiment 20000173 PARAMETER Experiment Name: At_42deg_Heat_P Parameter: Tissue Value: Aerial
  misc_feature: MA Experiment ID: 20000179 Result: Down-regulated in Transcription
  misc_feature: MA Experiment 20000179 PARAMETER Experiment Name: At_Germinating_Seeds_P Parameter: Age (hr) Value: 6 vs. 0
  misc_feature: MA Experiment 20000179 PARAMETER Experiment Name: At_Germinating_Seeds_P Parameter: Tissue Value: Germinating Seeds
  misc_feature: MA Experiment ID: 20000180 Result: Down-regulated in Transcription
  misc_feature: MA Experiment 20000180 PARAMETER Experiment Name: At_Germinating_Seeds_P Parameter: Age (hr) Value: 24 vs. 0
  misc_feature: MA Experiment 20000180 PARAMETER Experiment Name: At_Germinating_Seeds_P Parameter: Tissue Value: Germinating Seeds
  misc_feature: MA Experiment ID: 20000182 Result: Up-regulated in Transcription
  misc_feature: MA Experiment 20000182 PARAMETER Experiment Name: At_2mM_SA_P Parameter: Age (day) Value: 14
  misc_feature: MA Experiment 20000182 PARAMETER Experiment Name: At_2mM_SA_P Parameter: Organism Value: A. thaliana
  misc_feature: MA Experiment 20000182 PARAMETER Experiment Name: At_2mM_SA_P Parameter: Plant Line Value: WS
  misc_feature: MA Experiment 20000182 PARAMETER Experiment Name: At_2mM_SA_P Parameter: Timepoint (hr) Value: 6
  misc_feature: MA Experiment 20000182 PARAMETER Experiment Name: At_2mM_SA_P Parameter: Tissue Value: Aerial
  misc_feature: MA Experiment 20000182 PARAMETER Experiment Name: At_2mM_SA_P Parameter: Treatment Value: 2mM SA vs. No Treatment
  misc_feature: MA Experiment ID: 20000184 Result: Down-regulated in Transcription
  misc_feature: MA Experiment 20000184 PARAMETER Experiment Name: At_Shoots__P Parameter: Age (day) Value: 7
  misc_feature: MA Experiment 20000184 PARAMETER Experiment Name: At_Shoots__P Parameter: Tissue Value: Shoots vs. Whole Plant
  misc_feature: MA Experiment ID: 20000234 Result: Down-regulated in Transcription
  misc_feature: MA Experiment 20000234 PARAMETER Experiment Name: At_Siliques_P Parameter: Age (day) Value: 21
  misc_feature: MA Experiment 20000234 PARAMETER Experiment Name: At_Siliques_P Parameter: Organism Value: A. thaliana
  misc_feature: MA Experiment 20000234 PARAMETER Experiment Name: At_Siliques_P Parameter: Plant Line Value: WS
  misc_feature: MA Experiment 20000234 PARAMETER Experiment Name: At_Siliques_P Parameter: Tissue Value: Less Than 5mm Siliques vs. Whole Plant
  misc_feature: MA Experiment ID: 20000235 Result: Down-regulated in Transcription
  misc_feature: MA Experiment 20000235 PARAMETER Experiment Name: At_Siliques_P Parameter: Age (day) Value: 21
  misc_feature: MA Experiment 20000235 PARAMETER Experiment Name: At_Siliques_P Parameter: Organism Value: A. thaliana
  misc_feature: MA Experiment 20000235 PARAMETER Experiment Name: At_Siliques_P Parameter: Plant Line Value: WS
  misc_feature: MA Experiment 20000235 PARAMETER Experiment Name: At_Siliques_P Parameter: Tissue Value: 5-10mm Siliques vs. Whole Plant
  misc_feature: MA Experiment ID: 20000264 Result: Down-regulated in Transcription
  misc_feature: MA Experiment 20000264 PARAMETER Experiment Name: At_Open_Flower_P Parameter: Age (day) Value: 21
  misc_feature: MA Experiment 20000264 PARAMETER Experiment Name: At_Open_Flower_P Parameter: Plant Line Value: WS
  misc_feature: MA Experiment 20000264 PARAMETER Experiment Name: At_Open_Flower_P Parameter: Tissue Value: Open Flower vs. Whole Plant
  misc_feature: MA Experiment ID: 20000265 Result: Down-regulated in Transcription
  misc_feature: MA Experiment 20000265 PARAMETER Experiment Name: At_Open_Flower_P Parameter: Age (day) Value: 21
  misc_feature: MA Experiment 20000265 PARAMETER Experiment Name: At_Open_Flower_P Parameter: Plant Line Value: WS
  misc_feature: MA Experiment 20000265 PARAMETER Experiment Name: At_Open_Flower_P Parameter: Tissue Value: Closed Flower vs. Whole Plant
  misc_feature: MA Experiment ID: 20000286 Result: Down-regulated in Transcription
  misc_feature: MA Experiment 20000286 PARAMETER Experiment Name: At_Open_Flower_P Parameter: Age (day) Value: 21
  misc_feature: MA Experiment 20000286 PARAMETER Experiment Name: At_Open_Flower_P Parameter: Plant Line Value: WS
  misc_feature: MA Experiment 20000286 PARAMETER Experiment Name: At_Open_Flower_P Parameter: Tissue Value: Half Open vs. Whole Plant
  misc_feature: MA Experiment ID: 20000437 Result: Up-regulated in Transcription
  misc_feature: MA Experiment 20000437 PARAMETER Experiment Name: At_Drought_P Parameter: Age (day) Value: 8
  misc_feature: MA Experiment 20000437 PARAMETER Experiment Name: At_Drought_P Parameter: Organism Value: A. thaliana
  misc_feature: MA Experiment 20000437 PARAMETER Experiment Name: At_Drought_P Parameter: Plant Line Value: WS
  misc_feature: MA Experiment 20000437 PARAMETER Experiment Name: At_Drought_P Parameter: Timepoint (hr) Value: 24
  misc_feature: MA Experiment 20000437 PARAMETER Experiment Name: At_Drought_P Parameter: Tissue Value: Whole Plant
  misc_feature: MA Experiment 20000437 PARAMETER Experiment Name: At_Drought_P Parameter: Treatment Value: Drought vs. No Drought
  misc_feature: MA Experiment ID: 20000438 Result: Down-regulated in Transcription
  misc_feature: MA Experiment 20000438 PARAMETER Experiment Name: At_Shoots__P Parameter: Age (day) Value: 14
  misc_feature: MA Experiment 20000438 PARAMETER Experiment Name: At_Shoots__P Parameter: Tissue Value: Shoots vs. Whole Plant
  misc_feature: MA Experiment ID: 20000453 Result: Up-regulated in Transcription
  misc_feature: MA Experiment 20000453 PARAMETER Experiment Name: At_100uM_ABA_P Parameter: Age (day) Value: 15
  misc_feature: MA Experiment 20000453 PARAMETER Experiment Name: At_100uM_ABA_P Parameter: Organism Value: A. thaliana
  misc_feature: MA Experiment 20000453 PARAMETER Experiment Name: At_100uM_ABA_P Parameter: Plant Line Value: WS
  misc_feature: MA Experiment 20000453 PARAMETER Experiment Name: At_100uM_ABA_P Parameter: Timepoint (hr) Value: 24
  misc_feature: MA Experiment 20000453 PARAMETER Experiment Name: At_100uM_ABA_P Parameter: Tissue Value: Aerial
  misc_feature: MA Experiment 20000453 PARAMETER Experiment Name: At_100uM_ABA_P Parameter: Treatment Value: 100uM ABA vs. No Treatment
  misc_feature: MA Experiment ID: 20000456 Result: Up-regulated in Transcription
  misc_feature: MA Experiment 20000456 PARAMETER Experiment Name: At_100uM_BA_P Parameter: Age (day) Value: 14
  misc_feature: MA Experiment 20000456 PARAMETER Experiment Name: At_100uM_BA_P Parameter: Organism Value: A. thaliana
  misc_feature: MA Experiment 20000456 PARAMETER Experiment Name: At_100uM_BA_P Parameter: Plant Line Value: WS
  misc_feature: MA Experiment 20000456 PARAMETER Experiment Name: At_100uM_BA_P Parameter: Timepoint (hr) Value: 6
  misc_feature: MA Experiment 20000456 PARAMETER Experiment Name: At_100uM_BA_P Parameter: Tissue Value: Aerial
  misc_feature: MA Experiment 20000456 PARAMETER Experiment Name: At_100uM_BA_P Parameter: Treatment Value: 100uM BA vs. No Treatment
  misc_feature: MA Experiment ID: 20000460 Result: Up-regulated in Transcription
  misc_feature: MA Experiment 20000460 PARAMETER Experiment Name: At_10percent_PEG_P Parameter: Age (day) Value: 12
  misc_feature: MA Experiment 20000460 PARAMETER Experiment Name: At_10percent_PEG_P Parameter: Organism Value: A. thaliana
  misc_feature: MA Experiment 20000460 PARAMETER Experiment Name: At_10percent_PEG_P Parameter: Plant Line Value: WS
  misc_feature: MA Experiment 20000460 PARAMETER Experiment Name: At_10percent_PEG_P Parameter: Timepoint (day) Value: 12
  misc_feature: MA Experiment 20000460 PARAMETER Experiment Name: At_10percent_PEG_P Parameter: Tissue Value: Whole Plant
  misc_feature: MA Experiment 20000460 PARAMETER Experiment Name: At_10percent_PEG_P Parameter: Treatment Value: 10percent PEG vs. No Treatment
  misc_feature: MA Experiment ID: 20000506 Result: Up-regulated in Transcription
  misc_feature: MA Experiment 20000506 PARAMETER Experiment Name: At_Wounding_P Parameter: Organism Value: A. thaliana
  misc_feature: MA Experiment 20000506 PARAMETER Experiment Name: At_Wounding_P Parameter: Plant Line Value: WS
  misc_feature: MA Experiment 20000506 PARAMETER Experiment Name: At_Wounding_P Parameter: Timepoint (hr) Value: 6
  misc_feature: MA Experiment 20000506 PARAMETER Experiment Name: At_Wounding_P Parameter: Tissue Value: Aerial
  misc_feature: MA Experiment 20000506 PARAMETER Experiment Name: At_Wounding_P Parameter: Treatment Value: Wounding vs. No Wounding
  misc_feature: MA Experiment ID: 20000527 Result: Down-regulated in Transcription
  misc_feature: MA Experiment 20000527 PARAMETER Experiment Name: At_10percent_PEG_P Parameter: Age (day) Value: 20
  misc_feature: MA Experiment 20000527 PARAMETER Experiment Name: At_10percent_PEG_P Parameter: Organism Value: A. thaliana
  misc_feature: MA Experiment 20000527 PARAMETER Experiment Name: At_10percent_PEG_P Parameter: Plant Line Value: WS
  misc_feature: MA Experiment 20000527 PARAMETER Experiment Name: At_10percent_PEG_P Parameter: Timepoint (day) Value: 20
  misc_feature: MA Experiment 20000527 PARAMETER Experiment Name: At_10percent_PEG_P Parameter: Tissue Value: Whole Plant
  misc_feature: MA Experiment 20000527 PARAMETER Experiment Name: At_10percent_PEG_P Parameter: Treatment Value: 10percent PEG vs. No Treatment
  misc_feature: MA Experiment ID: 20000574 Result: Up-regulated in Transcription
  misc_feature: MA Experiment 20000574 PARAMETER Experiment Name: At_100uM_ABA_Mutants__P Parameter: Organism Value: A. thaliana
  misc_feature: MA Experiment 20000574 PARAMETER Experiment Name: At_100uM_ABA_Mutants__P Parameter: Plant Line Value: CS23 vs. Ler wt
  misc_feature: MA Experiment 20000574 PARAMETER Experiment Name: At_100uM_ABA_Mutants__P Parameter: Timepoint (hr) Value: N/A
  misc_feature: MA Experiment 20000574 PARAMETER Experiment Name: At_100uM_ABA_Mutants__P Parameter: Tissue Value: Whole Plant
  misc_feature: MA Experiment 20000574 PARAMETER Experiment Name: At_100uM_ABA_Mutants__P Parameter: Treatment Value: None
  misc_feature: MA Experiment ID: 20000576 Result: Down-regulated in Transcription
  misc_feature: MA Experiment 20000576 PARAMETER Experiment Name: At_100uM_ABA_Mutants__P Parameter: Organism Value: A. thaliana
  misc_feature: MA Experiment 20000576 PARAMETER Experiment Name: At_100uM_ABA_Mutants__P Parameter: Plant Line Value: CS23
  misc_feature: MA Experiment 20000576 PARAMETER Experiment Name: At_100uM_ABA_Mutants__P Parameter: Timepoint (hr) Value: 6
  misc_feature: MA Experiment 20000576 PARAMETER Experiment Name: At_100uM_ABA_Mutants__P Parameter: Tissue Value: Whole Plant
  misc_feature: MA Experiment 20000576 PARAMETER Experiment Name: At_100uM_ABA_Mutants__P Parameter: Treatment Value: 1uM ABA vs. No Treatment
  misc_feature: MA Experiment ID: 20000709 Result: Up-regulated in Transcription
  misc_feature: MA Experiment 20000709 PARAMETER Experiment Name: At_15mM_NH4NO3_L-to-H_P Parameter: Age (hr) Value: 14
  misc_feature: MA Experiment 20000709 PARAMETER Experiment Name: At_15mM_NH4NO3_L-to-H_P Parameter: Organism Value: A. thaliana
  misc_feature: MA Experiment 20000709 PARAMETER Experiment Name: At_15mM_NH4NO3_L-to-H_P Parameter: Plant Line Value: WS
  misc_feature: MA Experiment 20000709 PARAMETER Experiment Name: At_15mM_NH4NO3_L-to-H_P Parameter: Timepoint (hr) Value: 4
  misc_feature: MA Experiment 20000709 PARAMETER Experiment Name: At_15mM_NH4NO3_L-to-H_P Parameter: Tissue Value: Aerial
  misc_feature: MA Experiment 20000709 PARAMETER Experiment Name: At_15mM_NH4NO3_L-to-H_P Parameter: Treatment Value: 15mM NH4NO3 vs. 30mM Mannitol
  misc_feature: MA Experiment ID: 20000794 Result: Down-regulated in Transcription
  misc_feature: MA Experiment 20000794 PARAMETER Experiment Name: At_Petals_P Parameter: Age (day) Value: 23-25 days
  misc_feature: MA Experiment 20000794 PARAMETER Experiment Name: At_Petals_P Parameter: Plant Line Value: WS
  misc_feature: MA Experiment 20000794 PARAMETER Experiment Name: At_Petals_P Parameter: Tissue Value: Petals vs. Whole plant
  misc_feature: MA Experiment ID: 20001247 Result: Up-regulated in Transcription
  misc_feature: MA Experiment 20001247 PARAMETER Experiment Name: At_Far-red-induction_P Parameter: Age (day) Value: 7
  misc_feature: MA Experiment 20001247 PARAMETER Experiment Name: At_Far-red-induction_P Parameter: Light Value: Far-red vs. White
  misc_feature: MA Experiment 20001247 PARAMETER Experiment Name: At_Far-red-induction_P Parameter: Organism Value: A. thaliana
  misc_feature: MA Experiment 20001247 PARAMETER Experiment Name: At_Far-red-induction_P Parameter: Plant Line Value: Columbia
  misc_feature: MA Experiment 20001247 PARAMETER Experiment Name: At_Far-red-induction_P Parameter: Timepoint (hr) Value: 1
  misc_feature: MA Experiment 20001247 PARAMETER Experiment Name: At_Far-red-induction_P Parameter: Tissue Value: Whole Plant
  misc_feature: MA Experiment ID: 20001557 Result: Up-regulated in Transcription
  misc_feature: MA Experiment 20001557 PARAMETER Experiment Name: At_Drought_Soil_Dry_P Parameter: Age (day) Value: 27
  misc_feature: MA Experiment 20001557 PARAMETER Experiment Name: At_Drought_Soil_Dry_P Parameter: Organism Value: A. thaliana
  misc_feature: MA Experiment 20001557 PARAMETER Experiment Name: At_Drought_Soil_Dry_P Parameter: Plant Line Value: WS
  misc_feature: MA Experiment 20001557 PARAMETER Experiment Name: At_Drought_Soil_Dry_P Parameter: Post Timepoint (hr) Value: 3
  misc_feature: MA Experiment 20001557 PARAMETER Experiment Name: At_Drought_Soil_Dry_P Parameter: Post-Treatment Value: Re-Water vs. No Drought
  misc_feature: MA Experiment 20001557 PARAMETER Experiment Name: At_Drought_Soil_Dry_P Parameter: Timepoint (day) Value: 13
  misc_feature: MA Experiment 20001557 PARAMETER Experiment Name: At_Drought_Soil_Dry_P Parameter: Treatment Value: Drought vs. No Drought
  misc_feature: MA Experiment ID: 20001558 Result: Up-regulated in Transcription
  misc_feature: MA Experiment 20001558 PARAMETER Experiment Name: At_Drought_Soil_Dry_P Parameter: Age (day) Value: 27
  misc_feature: MA Experiment 20001558 PARAMETER Experiment Name: At_Drought_Soil_Dry_P Parameter: Organism Value: A. thaliana
  misc_feature: MA Experiment 20001558 PARAMETER Experiment Name: At_Drought_Soil_Dry_P Parameter: Plant Line Value: WS
  misc_feature: MA Experiment 20001558 PARAMETER Experiment Name: At_Drought_Soil_Dry_P Parameter: Post Timepoint (hr) Value: 6
  misc_feature: MA Experiment 20001558 PARAMETER Experiment Name: At_Drought_Soil_Dry_P Parameter: Post-Treatment Value: Re-Water vs. No Drought
  misc_feature: MA Experiment 20001558 PARAMETER Experiment Name: At_Drought_Soil_Dry_P Parameter: Timepoint (day) Value: 13
  misc_feature: MA Experiment 20001558 PARAMETER Experiment Name: At_Drought_Soil_Dry_P Parameter: Treatment Value: Drought vs. No Drought
  misc_feature: MA Experiment ID: 20001560 Result: Up-regulated in Transcription
  misc_feature: MA Experiment 20001560 PARAMETER Experiment Name: At_Drought_Soil_Dry_P Parameter: Age (day) Value: 28
  misc_feature: MA Experiment 20001560 PARAMETER Experiment Name: At_Drought_Soil_Dry_P Parameter: Organism Value: A. thaliana
  misc_feature: MA Experiment 20001560 PARAMETER Experiment Name: At_Drought_Soil_Dry_P Parameter: Plant Line Value: WS
  misc_feature: MA Experiment 20001560 PARAMETER Experiment Name: At_Drought_Soil_Dry_P Parameter: Post Timepoint (hr) Value: None
  misc_feature: MA Experiment 20001560 PARAMETER Experiment Name: At_Drought_Soil_Dry_P Parameter: Post-Treatment Value: None
  misc_feature: MA Experiment 20001560 PARAMETER Experiment Name: At_Drought_Soil_Dry_P Parameter: Timepoint (day) Value: 14
  misc_feature: MA Experiment 20001560 PARAMETER Experiment Name: At_Drought_Soil_Dry_P Parameter: Treatment Value: Drought vs. No Drought
  misc_feature: MA Experiment ID: 20001772 Result: Down-regulated in Transcription
  misc_feature: MA Experiment 20001772 PARAMETER Experiment Name: At_Far-red-enriched-adult_P Parameter: Age (day) Value: 29
  misc_feature: MA Experiment 20001772 PARAMETER Experiment Name: At_Far-red-enriched-adult_P Parameter: Light Value: Far-red enriched vs. White
  misc_feature: MA Experiment 20001772 PARAMETER Experiment Name: At_Far-red-enriched-adult_P Parameter: Organism Value: A. thaliana
  misc_feature: MA Experiment 20001772 PARAMETER Experiment Name: At_Far-red-enriched-adult_P Parameter: Plant Line Value: Columbia
  misc_feature: MA Experiment 20001772 PARAMETER Experiment Name: At_Far-red-enriched-adult_P Parameter: Timepoint (hr) Value: 24
  misc_feature: MA Experiment 20001772 PARAMETER Experiment Name: At_Far-red-enriched-adult_P Parameter: Tissue Value: Aerial
  misc_feature: MA Experiment ID: 20001773 Result: Down-regulated in Transcription
  misc_feature: MA Experiment 20001773 PARAMETER Experiment Name: At_Far-red-enriched-adult_P Parameter: Age (day) Value: 30
  misc_feature: MA Experiment 20001773 PARAMETER Experiment Name: At_Far-red-enriched-adult_P Parameter: Light Value: Far-red enriched vs. White
  misc_feature: MA Experiment 20001773 PARAMETER Experiment Name: At_Far-red-enriched-adult_P Parameter: Organism Value: A. thaliana
  misc_feature: MA Experiment 20001773 PARAMETER Experiment Name: At_Far-red-enriched-adult_P Parameter: Plant Line Value: Columbia
  misc_feature: MA Experiment 20001773 PARAMETER Experiment Name: At_Far-red-enriched-adult_P Parameter: Timepoint (hr) Value: 48
  misc_feature: MA Experiment 20001773 PARAMETER Experiment Name: At_Far-red-enriched-adult_P Parameter: Tissue Value: Aerial
  misc_feature: MA Experiment ID: 20001904 Result: Up-regulated in Transcription
  misc_feature: MA Experiment 20001904 PARAMETER Experiment Name: At_Drought_Reproduction_P Parameter: Age (day) Value: 37
  misc_feature: MA Experiment 20001904 PARAMETER Experiment Name: At_Drought_Reproduction_P Parameter: Organism Value: A. thaliana
  misc_feature: MA Experiment 20001904 PARAMETER Experiment Name: At_Drought_Reproduction_P Parameter: Plant Line Value: WS
  misc_feature: MA Experiment 20001904 PARAMETER Experiment Name: At_Drought_Reproduction_P Parameter: Timepoint (day) Value: 7
  misc_feature: MA Experiment 20001904 PARAMETER Experiment Name: At_Drought_Reproduction_P Parameter: Tissue Value: Rosettes
  misc_feature: MA Experiment 20001904 PARAMETER Experiment Name: At_Drought_Reproduction_P Parameter: Treatment Value: Drought vs. No Drought
  misc_feature: MA Experiment ID: 20001911 Result: Up-regulated in Transcription
  misc_feature: MA Experiment 20001911 PARAMETER Experiment Name: At_Drought_Reproduction_P Parameter: Age (day) Value: 40
  misc_feature: MA Experiment 20001911 PARAMETER Experiment Name: At_Drought_Reproduction_P Parameter: Organism Value: A. thaliana
  misc_feature: MA Experiment 20001911 PARAMETER Experiment Name: At_Drought_Reproduction_P Parameter: Plant Line Value: WS
  misc_feature: MA Experiment 20001911 PARAMETER Experiment Name: At_Drought_Reproduction_P Parameter: Timepoint (day) Value: 10
  misc_feature: MA Experiment 20001911 PARAMETER Experiment Name: At_Drought_Reproduction_P Parameter: Tissue Value: Flowers
  misc_feature: MA Experiment 20001911 PARAMETER Experiment Name: At_Drought_Reproduction_P Parameter: Treatment Value: Drought vs. No Drought
atggcaggaggaggaacagaagcgtttcctgatcttggagagcattgccaagaccctgattgcaaattactcgattttctcccttttacttgcgacggctgcaaattggtgttttgtttggagcatagatcatacaagtcacataactgtccgaaatccgatcatgggagcagaacggtttccatctgtgaaacatgttcaatagcgattgaaacaactggttttgatgaaaaaggaatcaaatctttgcttgagaaacacgaaagatccggagattgtgatccaaacaagaaaaagaaaccaacgtgtcctgtaaaacgttgcaaagagattctgacttttgcgaataaccttacttgcaaatattgtggagtcaagttctgtttgaaacaccggtttccgacagatcatgtctgtaacaagaagatcattaataccgcgggaacaagctcgaggtggaacgagaggtttatggaagctttgagtttaagaaaccagaaagggtgtggaagagggagctctgtttcatcaaaatcttcaccatcagttagatcgttttag

SEQ ID NO: 89146 - protein, 186 aa, Arabidopsis thaliana; identical to SEQ ID NO: 77756
  peptide (1)..(186): Ceres Seq. ID no. 12715780
  misc_feature (103)..(148): Pfam Name: AN1-like Zinc finger Pfam Description: AN1-like Zinc finger
  misc_feature (1)..(186): Homolog of NCBI NO: 15232930 NR Description: zinc finger protein (PMZ), putative; protein id:
  misc_feature (5)..(179): Homolog of NCBI NO: 30688811 NR Description: zinc finger protein (PMZ) -related [Arabidopsis >gi|17529076|gb|AAL38748.1| unknown protein [Arabidopsis >gi|20465575|gb|AAM20270.1| unknown protein [Arabidopsis
  misc_feature (5)..(180): Homolog of NCBI NO: 15230311 NR Description: putative protein; protein id: At3g57480.1
  misc_feature (5)..(139): Homolog of NCBI NO: 33146779 NR Description: putative arsenite inducible RNA associated
  misc_feature (9)..(174): Homolog of NCBI NO: 33416395 NR Description: Unknown (protein for MGC:66295) [Danio rerio]
  misc_feature (9)..(183): Homolog of NCBI NO: 21312112 NR Description: RIKEN cDNA 1110060O18 [Mus musculus]
  misc_feature (9)..(182): Homolog of NCBI NO: 15079311 NR Description: RIKEN cDNA 1110060O18 gene [Mus musculus]
  misc_feature (9)..(140): Homolog of NCBI NO: 34876869 NR Description: similar to RIKEN cDNA 1110060O18 [Rattus
  misc_feature (9)..(139): Homolog of NCBI NO: 34871288 NR Description: similar to arsenite inducible RNA associated
  misc_feature (9)..(140): Homolog of NCBI NO: 20270357 NR Description: hypothetical protein BC018415 [Homo sapiens]

SEQ ID NO: 89147 - DNA, 1808 bp, Arabidopsis thaliana
  misc_feature (1)..(1808): Ceres Seq. ID no. 12715867
  misc_feature: MA Experiment ID: 108569 Result: Up-regulated in Transcription
  misc_feature: MA Experiment 108569 PARAMETER Experiment Name: At_0.001%_MeJA__cDNA_P Parameter: Timepoint (hr) Value: 6
  misc_feature: MA Experiment 108569 PARAMETER Experiment Name: At_0.001%_MeJA__cDNA_P Parameter: Tissue Value: Aerial
  misc_feature: MA Experiment 108569 PARAMETER Experiment Name: At_0.001%_MeJA__cDNA_P Parameter: Treatment Value: 0.001% MeJA vs. No Treatment
  misc_feature: MA Experiment ID: 108573 Result: Up-regulated in Transcription
  misc_feature: MA Experiment 108573 PARAMETER Experiment Name: At_Drought_cDNA_P Parameter: Timepoint (hr) Value: 6
  misc_feature: MA Experiment 108573 PARAMETER Experiment Name: At_Drought_cDNA_P Parameter: Tissue Value: Aerial
  misc_feature: MA Experiment 108573 PARAMETER Experiment Name: At_Drought_cDNA_P Parameter: Treatment Value: Drought vs. No Drought
  misc_feature: MA Experiment ID: 108576 Result: Down-regulated in Transcription
  misc_feature: MA Experiment 108576 PARAMETER Experiment Name: At_42deg_Heat_cDNA_P Parameter: Temperature (deg C) Value: 42 vs. 22
  misc_feature: MA Experiment 108576 PARAMETER Experiment Name: At_42deg_Heat_cDNA_P Parameter: Timepoint (hr) Value: 1
  misc_feature: MA Experiment 108576 PARAMETER Experiment Name: At_42deg_Heat_cDNA_P Parameter: Tissue Value: Aerial
  misc_feature: MA Experiment ID: 108577 Result: Down-regulated in Transcription
  misc_feature: MA Experiment 108577 PARAMETER Experiment Name: At_42deg_Heat_cDNA_P Parameter: Temperature (deg C) Value: 42 vs. 22
  misc_feature: MA Experiment 108577 PARAMETER Experiment Name: At_42deg_Heat_cDNA_P Parameter: Timepoint (hr) Value: 6
  misc_feature: MA Experiment 108577 PARAMETER Experiment Name: At_42deg_Heat_cDNA_P Parameter: Tissue Value: Aerial
  misc_feature: MA Experiment ID: 108595 Result: Down-regulated in Transcription
  misc_feature: MA Experiment 108595 PARAMETER Experiment Name: At_Ler-pi_Ovule_cDNA_P Parameter: Plant Line Value: null
  misc_feature: MA Experiment ID: 20000087 Result: Down-regulated in Transcription
  misc_feature: MA Experiment 20000087 PARAMETER Experiment Name: At_100uM_ABA_Mutants_cDNA_P Parameter: Plant Line Value: WS
  misc_feature: MA Experiment 20000087 PARAMETER Experiment Name: At_100uM_ABA_Mutants_cDNA_P Parameter: Timepoint (hr) Value: 6
  misc_feature: MA Experiment 20000087 PARAMETER Experiment Name: At_100uM_ABA_Mutants_cDNA_P Parameter: Tissue Value: Aerial
  misc_feature: MA Experiment 20000087 PARAMETER Experiment Name: At_100uM_ABA_Mutants_cDNA_P Parameter: Treatment Value: 100uM ABA vs. No Treatment
  misc_feature: MA Experiment ID: 20000093 Result: Down-regulated in Transcription
  misc_feature: MA Experiment 20000093 PARAMETER Experiment Name: At_42deg_Heat_cDNA_P Parameter: Temperature (deg C) Value: 42 vs. 22
  misc_feature: MA Experiment 20000093 PARAMETER Experiment Name: At_42deg_Heat_cDNA_P Parameter: Timepoint (hr) Value: 0.5
  misc_feature: MA Experiment 20000093 PARAMETER Experiment Name: At_42deg_Heat_cDNA_P Parameter: Tissue Value: Aerial
  misc_feature: MA Experiment ID: 20000111 Result: Down-regulated in Transcription
  misc_feature: MA Experiment 20000111 PARAMETER Experiment Name: At_42deg_Heat_cDNA_P Parameter: Temperature (deg C) Value: 42 vs. 22
  misc_feature: MA Experiment 20000111 PARAMETER Experiment Name: At_42deg_Heat_cDNA_P Parameter: Timepoint (hr) Value: 6
  misc_feature: MA Experiment 20000111 PARAMETER Experiment Name: At_42deg_Heat_cDNA_P Parameter: Tissue Value: Aerial
  misc_feature: MA Experiment ID: 20000112 Result: Down-regulated in Transcription
  misc_feature: MA Experiment 20000112 PARAMETER Experiment Name: At_42deg_Heat_cDNA_P Parameter: Temperature (deg C) Value: 42 vs. 22
  misc_feature: MA Experiment 20000112 PARAMETER Experiment Name: At_42deg_Heat_cDNA_P Parameter: Timepoint (hr) Value: 2
  misc_feature: MA Experiment 20000112 PARAMETER Experiment Name: At_42deg_Heat_cDNA_P Parameter: Tissue Value: Aerial
  misc_feature: MA Experiment ID: 20000113 Result: Down-regulated in Transcription
  misc_feature: MA Experiment 20000113 PARAMETER Experiment Name: At_42deg_Heat_cDNA_P Parameter: Temperature (deg C) Value: 42 vs. 22
  misc_feature: MA Experiment 20000113 PARAMETER Experiment Name: At_42deg_Heat_cDNA_P Parameter: Timepoint (hr) Value: 8
  misc_feature: MA Experiment 20000113 PARAMETER Experiment Name: At_42deg_Heat_cDNA_P Parameter: Tissue Value: Aerial
  misc_feature: MA Experiment ID: 20000117 Result: Down-regulated in Transcription
  misc_feature: MA Experiment 20000117 PARAMETER Experiment Name: At_100uM_ABA_Mutants_cDNA_P Parameter: Plant Line Value: Columbia
  misc_feature: MA Experiment 20000117 PARAMETER Experiment Name: At_100uM_ABA_Mutants_cDNA_P Parameter: Timepoint (hr) Value: 6
  misc_feature: MA Experiment 20000117 PARAMETER Experiment Name: At_100uM_ABA_Mutants_cDNA_P Parameter: Tissue Value: Aerial
  misc_feature: MA Experiment 20000117 PARAMETER Experiment Name: At_100uM_ABA_Mutants_cDNA_P Parameter: Treatment Value: 100uM ABA vs. No Treatment
  misc_feature: MA Experiment ID: 20000144 Result: Down-regulated in Transcription
  misc_feature: MA Experiment 20000144 PARAMETER Experiment Name: At_42deg_Heat_cDNA_P Parameter: Temperature (deg C) Value: 42 vs. 22
  misc_feature: MA Experiment 20000144 PARAMETER Experiment Name: At_42deg_Heat_cDNA_P Parameter: Timepoint (hr) Value: 1
  misc_feature: MA Experiment 20000144 PARAMETER Experiment Name: At_42deg_Heat_cDNA_P Parameter: Tissue Value: Aerial
  misc_feature: MA Experiment ID: 20000180 Result: Up-regulated in Transcription
  misc_feature: MA Experiment 20000180 PARAMETER Experiment Name: At_Germinating_Seeds_P Parameter: Age (hr) Value: 24 vs. 0
  misc_feature: MA Experiment 20000180 PARAMETER Experiment Name: At_Germinating_Seeds_P Parameter: Tissue Value: Germinating Seeds
  misc_feature: MA Experiment ID: 20000185 Result: Down-regulated in Transcription
  misc_feature: MA Experiment 20000185 PARAMETER Experiment Name: At_Roots__P Parameter: Age (day) Value: 7 vs. 21
  misc_feature: MA Experiment 20000185 PARAMETER Experiment Name: At_Roots__P Parameter: Organism Value: A. thaliana
  misc_feature: MA Experiment 20000185 PARAMETER Experiment Name: At_Roots__P Parameter: Tissue Value: Roots vs. Whole Plant
  misc_feature: MA Experiment ID: 20000439 Result: Down-regulated in Transcription
  misc_feature: MA Experiment 20000439 PARAMETER Experiment Name: At_Roots__P Parameter: Age (day) Value: 14 vs. 21
  misc_feature: MA Experiment 20000439 PARAMETER Experiment Name: At_Roots__P Parameter: Organism Value: A. thaliana
  misc_feature: MA Experiment 20000439 PARAMETER Experiment Name: At_Roots__P Parameter: Tissue Value: Roots vs. Whole Plant
  misc_feature: MA Experiment ID: 20001248 Result: Down-regulated in Transcription
  misc_feature: MA Experiment 20001248 PARAMETER Experiment Name: At_Far-red-induction_P Parameter: Age (day) Value: 7
  misc_feature: MA Experiment 20001248 PARAMETER Experiment Name: At_Far-red-induction_P Parameter: Light Value: Far-red vs. White
  misc_feature: MA Experiment 20001248 PARAMETER Experiment Name: At_Far-red-induction_P Parameter: Organism Value: A. thaliana
  misc_feature: MA Experiment 20001248 PARAMETER Experiment Name: At_Far-red-induction_P Parameter: Plant Line Value: Columbia
  misc_feature: MA Experiment 20001248 PARAMETER Experiment Name: At_Far-red-induction_P Parameter: Timepoint (hr) Value: 4
  misc_feature: MA Experiment 20001248 PARAMETER Experiment Name: At_Far-red-induction_P Parameter: Tissue Value: Whole Plant
  misc_feature: MA Experiment ID: 20001555 Result: Down-regulated in Transcription
  misc_feature: MA Experiment 20001555 PARAMETER Experiment Name: At_Drought_Soil_Dry_P Parameter: Age (day) Value: 24
  misc_feature: MA Experiment 20001555 PARAMETER Experiment Name: At_Drought_Soil_Dry_P Parameter: Organism Value: A. thaliana
  misc_feature: MA Experiment 20001555 PARAMETER Experiment Name: At_Drought_Soil_Dry_P Parameter: Plant Line Value: WS
  misc_feature: MA Experiment 20001555 PARAMETER Experiment Name: At_Drought_Soil_Dry_P Parameter: Post Timepoint (hr) Value: None
  misc_feature: MA Experiment 20001555 PARAMETER Experiment Name: At_Drought_Soil_Dry_P Parameter: Post-Treatment Value: None
  misc_feature: MA Experiment 20001555 PARAMETER Experiment Name: At_Drought_Soil_Dry_P Parameter: Timepoint (day) Value: 10
  misc_feature: MA Experiment 20001555 PARAMETER Experiment Name: At_Drought_Soil_Dry_P Parameter: Treatment Value: Drought vs. No Drought
  misc_feature: MA Experiment ID: 20001757 Result: Up-regulated in Transcription
  misc_feature: MA Experiment 20001757 PARAMETER Experiment Name: At_50mM_NH4NO3_L-to-H_P Parameter: Timepoint (hr) Value: 6
  misc_feature: MA Experiment 20001757 PARAMETER Experiment Name: At_50mM_NH4NO3_L-to-H_P Parameter: Tissue Value: Leaf
  misc_feature: MA Experiment 20001757 PARAMETER Experiment Name: At_50mM_NH4NO3_L-to-H_P Parameter: Treatment Value: 50mM NH4NO3 vs 100mM Mannitol
  misc_feature: MA Experiment ID: 20001904 Result: Down-regulated in Transcription
  misc_feature: MA Experiment 20001904 PARAMETER Experiment Name: At_Drought_Reproduction_P Parameter: Age (day) Value: 37
  misc_feature: MA Experiment 20001904 PARAMETER Experiment Name: At_Drought_Reproduction_P Parameter: Organism Value: A. thaliana
  misc_feature: MA Experiment 20001904 PARAMETER Experiment Name: At_Drought_Reproduction_P Parameter: Plant Line Value: WS
  misc_feature: MA Experiment 20001904 PARAMETER Experiment Name: At_Drought_Reproduction_P Parameter: Timepoint (day) Value: 7
  misc_feature: MA Experiment 20001904 PARAMETER Experiment Name: At_Drought_Reproduction_P Parameter: Tissue Value: Rosettes
  misc_feature: MA Experiment 20001904 PARAMETER Experiment Name: At_Drought_Reproduction_P Parameter: Treatment Value: Drought vs. No Drought
  misc_feature: MA Experiment ID: 20001905 Result: Down-regulated in Transcription
  misc_feature: MA Experiment 20001905 PARAMETER Experiment Name: At_Drought_Reproduction_P Parameter: Age (day) Value: 40
  misc_feature: MA Experiment 20001905 PARAMETER Experiment Name: At_Drought_Reproduction_P Parameter: Organism Value: A. thaliana
  misc_feature: MA Experiment 20001905 PARAMETER Experiment Name: At_Drought_Reproduction_P Parameter: Plant Line Value: WS
  misc_feature: MA Experiment 20001905 PARAMETER Experiment Name: At_Drought_Reproduction_P Parameter: Timepoint (day) Value: 10
  misc_feature: MA Experiment 20001905 PARAMETER Experiment Name: At_Drought_Reproduction_P Parameter: Tissue Value: Rosettes
  misc_feature: MA Experiment 20001905 PARAMETER Experiment Name: At_Drought_Reproduction_P Parameter: Treatment Value: Drought vs. No Drought
  misc_feature: MA Experiment ID: 20001908 Result: Down-regulated in Transcription
  misc_feature: MA Experiment 20001908 PARAMETER Experiment Name: At_Drought_Reproduction_P Parameter: Age (day) Value: 40
  misc_feature: MA Experiment 20001908 PARAMETER Experiment Name: At_Drought_Reproduction_P Parameter: Organism Value: A. thaliana
  misc_feature: MA Experiment 20001908 PARAMETER Experiment Name: At_Drought_Reproduction_P Parameter: Plant Line Value: WS
  misc_feature: MA Experiment 20001908 PARAMETER Experiment Name: At_Drought_Reproduction_P Parameter: Timepoint (day) Value: 10
  misc_feature: MA Experiment 20001908 PARAMETER Experiment Name: At_Drought_Reproduction_P Parameter: Tissue Value: Siliques
  misc_feature: MA Experiment 20001908 PARAMETER Experiment Name: At_Drought_Reproduction_P Parameter: Treatment Value: Drought vs. No Drought
  misc_feature: MA Experiment ID: 20001911 Result: Down-regulated in Transcription
  misc_feature: MA Experiment 20001911 PARAMETER Experiment Name: At_Drought_Reproduction_P Parameter: Age (day) Value: 40
  misc_feature: MA Experiment 20001911 PARAMETER Experiment Name: At_Drought_Reproduction_P Parameter: Organism Value: A. thaliana
  misc_feature: MA Experiment 20001911 PARAMETER Experiment Name: At_Drought_Reproduction_P Parameter: Plant Line Value: WS
  misc_feature: MA Experiment 20001911 PARAMETER Experiment Name: At_Drought_Reproduction_P Parameter: Timepoint (day) Value: 10
  misc_feature: MA Experiment 20001911 PARAMETER Experiment Name: At_Drought_Reproduction_P Parameter: Tissue Value: Flowers
  misc_feature: MA Experiment 20001911 PARAMETER Experiment Name: At_Drought_Reproduction_P Parameter: Treatment Value: Drought vs. No Drought
gatatcatcaaaaaccacaaaactttcttttctttttctaactattttatttattattcctacaaaatgtcatgtttgaagtatttcttgatcttattgatgttgggactgtgtgtctccatcggaggagaattttcaatatgactacttgaaagttccggcaagcgagtttgtgagctccataaacacaattgtggtagtgataagacaagtgagttcaattttgtctcagttcgctgatttcagcggagatcgccggctgcagaatgcggtttccgattgccttgatctgcttgacttttcttcagaggagctcacttggtctgcttctgcttctgagaatccaaaaggtaagggcaacggaacaggggacgttggatcggacacaaggacatggttaagtgctgctctctccaaccaagccacttgtatggaaggcttcgatggtacctctggtctcgtaaaatcccttgtcgctggcagtctcgatcaactatattctatgcttagggaattgttaccacttgtgcaaccagagcagaaacccaaggctgtttctaaacctggccctattgctaaaggaccgaaggcaccacctggccgtaaactcagagacaccgacgaagacgaaagccttcaattcccagactgggtcagaccggacgatcgtaaactattagaatcaaacggtaggacttacgacgttagtgtagcattggatgggacaggcaacttcacaaagataatggacgccataaagaaagctcctgattatagctcgacacgtttcgtcatatacattaaaaaaggtttatatttggagaatgttgagatcaagaagaagaaatggaacattgtaatgttaggtgatggcattgacgtgactgttatttccggtaaccgcagcttcatcgatggttggaccactttccgatcagctacattcgcggtaagcggaagaggattcttagcaagagatataacgttccagaacacagcagggccagagaagcatcaggcggtagcactgagatcagactctgacctctctgtgttcttcagatgtgcgatgaggggttatcaagatacactctacacgcacaccatgcgtcagttctaccgtgagtgcaccatcacgggaacagtagattttatatttggggatgggactgttgtgtttcaaaactgtcaaattttggctaaaagaggactccctaaccaaaagaacaccatcactgcacaaggccggaaagatgtcaaccaaccctcaggattctcaattcaattcagcaatatctcggcggacgcagatttggtcccatacctaaacacgacaaggacgtatctaggaaggccatggaagctatattcgagaacggttttcattaggaacaatatgagcgacgttgtgagacccgaaggatggcttgagtggaacgctgattttgcgttggacacactcttctacggagagttcatgaactacgggcctggttcaggactcagcagccgagtcaaatggcctggttaccacgtctttaacaactcggatcaggctaacaacttcaccgtttctcagttcattaaaggaaatctttggctgccttctacgggagtaacgtttagtgatggcttgtatatctaaactggctcagtgtttctattgtgaatgttcctgttttttgttccttttcattttgttttgcgttttcttgtcatgttcttctaagttggtttgttgtggtatttcacggttttggaaaaatattgataaatggggaatttaagtcgatcggctgaagttgaac

SEQ ID NO: 89148 - protein, 404 aa, Arabidopsis thaliana; identical to SEQ ID NO: 89052
  peptide (1)..(404): Ceres Seq. ID no. 12715868
  misc_feature (91)..(388): Pfam Name: Pectinesterase Pfam Description: Pectinesterase
  misc_feature (1)..(404): Homolog of NCBI NO: 14190429 NR Description: AT4g33220/F4I10_150 [Arabidopsis thaliana]
  misc_feature (1)..(404): Homolog of NCBI NO: 7447375 NR Description: pectinesterase homolog F4I10.150 - Arabidopsis
  misc_feature (1)..(404): Homolog of NCBI NO: 18418172 NR Description: pectinesterase family; protein id: At4g33220.1,
  misc_feature (70)..(399): Homolog of NCBI NO: 6093744 NR Description: Pectinesterase PPE8B precursor (Pectin
  misc_feature (1)..(64): Homolog of NCBI NO: 6093744 NR Description: Pectinesterase PPE8B precursor (Pectin
  misc_feature (1)..(402): Homolog of NCBI NO: 30690925 NR Description: pectinesterase family [Arabidopsis thaliana]
  misc_feature (1)..(404): Homolog of NCBI NO: 15081598 NR Description: pectin methylesterase PME1 [Vitis vinifera]
  misc_feature (62)..(401): Homolog of NCBI NO: 33520429 NR Description: pectinesterase [Fragaria x ananassa]
  misc_feature (1)..(35): Homolog of NCBI NO: 33520429 NR Description: pectinesterase [Fragaria x ananassa]
  misc_feature (1)..(402): Homolog of NCBI NO: 15230020 NR Description: pectinesterase family; protein id: At3g05620.1 thaliana] >gi|6714448|gb|AAF26135.1|AC011620_11 putative

SEQ ID NO: 89149 - protein, 380 aa, Arabidopsis thaliana
  peptide (1)..(380): Ceres Seq. ID no. 12715869
  misc_feature (67)..(364): Pfam Name: Pectinesterase Pfam Description: Pectinesterase
  misc_feature (1)..(380): Homolog of NCBI NO: 14190429 NR Description: AT4g33220/F4I10_150 [Arabidopsis thaliana]
  misc_feature (1)..(380): Homolog of NCBI NO: 7447375 NR Description: pectinesterase homolog F4I10.150 - Arabidopsis
  misc_feature (1)..(380): Homolog of NCBI NO: 18418172 NR Description: pectinesterase family; protein id: At4g33220.1,
  misc_feature (46)..(375): Homolog of NCBI NO: 6093744 NR Description: Pectinesterase PPE8B precursor (Pectin
  misc_feature (1)..(40): Homolog of NCBI NO: 6093744 NR Description: Pectinesterase PPE8B precursor (Pectin
  misc_feature (1)..(378): Homolog of NCBI NO: 30690925 NR Description: pectinesterase family [Arabidopsis thaliana]
  misc_feature (1)..(380): Homolog of NCBI NO: 15081598 NR Description: pectin methylesterase PME1 [Vitis vinifera]
  misc_feature (38)..(377): Homolog of NCBI NO: 33520429 NR Description: pectinesterase [Fragaria x ananassa]
  misc_feature (1)..(11): Homolog of NCBI NO: 33520429 NR Description: pectinesterase [Fragaria x ananassa]
  misc_feature (1)..(378): Homolog of NCBI NO: 15230020 NR Description: pectinesterase family; protein id: At3g05620.1 thaliana] >gi|6714448|gb|AAF26135.1|AC011620_11 putative
MLRELLPLVQPEQKPKAVSKPGPIAKGPKAPPGRKLRDTDEDESLQFPDWVRPDDRKLLESNGRTYDVSVALDGTGNFTKIMDAIKKAPDYSSTRFVIYIKKGLYLENVEIKKKKWNIVMLGDGIDVTVISGNRSFIDGWTTFRSATFAVSGRGFLARDITFQNTAGPEKHQAVALRSDSDLSVFFRCAMRGYQDTLYTHTMRQFYRECTITGTVDFIFGDGTVVFQNCQILAKRGLPNQKNTITAQGRKDVNQPSGFSIQFSNISADADLVPYLNTTRTYLGRPWKLYSRTVFIRNNMSDVVRPEGWLEWNADFALDTLFYGEFMNYGPGSGLSSRVKWPGYHVFNNSDQANNFTVSQFIKGNLWLPSTGVTFSDGLYI

SEQ ID NO: 89150 - protein, 299 aa, Arabidopsis thaliana
  peptide (1)..(299): Ceres Seq. ID no. 12715870
  misc_feature (1)..(283): Pfam Name: Pectinesterase Pfam Description: Pectinesterase
  misc_feature (1)..(299): Homolog of NCBI NO: 14190429 NR Description: AT4g33220/F4I10_150 [Arabidopsis thaliana]
  misc_feature (1)..(299): Homolog of NCBI NO: 7447375 NR Description: pectinesterase homolog F4I10.150 - Arabidopsis
  misc_feature (1)..(299): Homolog of NCBI NO: 18418172 NR Description: pectinesterase family; protein id: At4g33220.1,
  misc_feature (1)..(294): Homolog of NCBI NO: 6093744 NR Description: Pectinesterase PPE8B precursor (Pectin
  misc_feature (1)..(297): Homolog of NCBI NO: 30690925 NR Description: pectinesterase family [Arabidopsis thaliana]
  misc_feature (1)..(299): Homolog of NCBI NO: 15081598 NR Description: pectin methylesterase PME1 [Vitis vinifera]
  misc_feature (1)..(296): Homolog of NCBI NO: 33520429 NR Description: pectinesterase [Fragaria x ananassa]
  misc_feature (1)..(297): Homolog of NCBI NO: 15230020 NR Description: pectinesterase family; protein id: At3g05620.1 thaliana] >gi|6714448|gb|AAF26135.1|AC011620_11 putative
  misc_feature (1)..(297): Homolog of NCBI NO: 15238729 NR Description: pectinesterase; protein id: At5g53370.1, by cDNA: gi_13507548, supported by cDNA: gi_15293286 [Arabidopsis >gi|9759184|dbj|BAB09799.1| pectinesterase [Arabidopsis thaliana]
  misc_feature (1)..(297): Homolog of NCBI NO: 34393863 NR Description: putative pectinesterase [Oryza sativa (japonica
MDAIKKAPDYSSTRFVIYIKKGLYLENVEIKKKKWNIVMLGDGIDVTVISGNRSFIDGWTTFRSATFAVSGRGFLARDITFQNTAGPEKHQAVALRSDSDLSVFFRCAMRGYQDTLYTHTMRQFYRECTITGTVDFIFGDGTVVFQNCQILAKRGLPNQKNTITAQGRKDVNQPSGFSIQFSNISADADLVPYLNTTRTYLGRPWKLYSRTVFIRNNMSDVVRPEGWLEWNADFALDTLFYGEFMNYGPGSGLSSRVKWPGYHVFNNSDQANNFTVSQFIKGNLWLPSTGVTFSDGLYI

SEQ ID NO: 89151 - DNA, 2821 bp, Arabidopsis thaliana
  misc_feature (1)..(2821): Ceres Seq. ID no. 12715871
  misc_feature: MA Experiment ID: 108433 Result: Down-regulated in Transcription
  misc_feature: MA Experiment 108433 PARAMETER Experiment Name: At_rhl_Mutant2_cDNA_P Parameter: Age (day) Value: 7
  misc_feature: MA Experiment 108433 PARAMETER Experiment Name: At_rhl_Mutant2_cDNA_P Parameter: Organism Value: A. thaliana
  misc_feature: MA Experiment 108433 PARAMETER Experiment Name: At_rhl_Mutant2_cDNA_P Parameter: Plant Line Value: rhl Mutant vs. wt landsburg
  misc_feature: MA Experiment 108433 PARAMETER Experiment Name: At_rhl_Mutant2_cDNA_P Parameter: Tissue Value: Roots
  misc_feature: MA Experiment ID: 108462 Result: Down-regulated in Transcription
  misc_feature: MA Experiment 108462 PARAMETER Experiment Name: At_Germinating_Seeds_cDNA_P Parameter: Age (day) Value: 2 vs. 0
  misc_feature: MA Experiment 108462 PARAMETER Experiment Name: At_Germinating_Seeds_cDNA_P Parameter: Tissue Value: Germinating Seeds
aagcacgaaaatcccgagtaattgaccttctcttcttcccagtgttgtcttctcttctccacgaacttaattttttcaaaaccctagcaactttgattcattcaaaatccgatccaacgatgactattgaagaagtttccggtgagactcctccgtctacgcctccttcttcttctacgccttctccgtcttcctccaccaccaacgccgcgccgttgggatcctctgtgattccgattgtaaacaagctacaagacatattcgctcagctcggaagccagtctacgatcgcgcttcctcaggttgttgttgttggaagccaaagcagtggcaagtctagcgtccttgaagcactcgtcggccgtgactttctccctcgtggtaatgatatctgcacgcgtcgtcctcttgttctccagctcctccagactaaaagccgcgctaatggcggatccgatgatgagtggggggagtttcgtcaccttcctgaaactcgtttctatgatttctctgagattcgtcgagaaattgaggctgagacgaatagattagttggagagaacaaaggtgtagcagatacacagattcgtcttaaaatttcttcacctaatgtattgaacatcacgcttgtggatctgcctggtattaccaaggtgccagttggtgaccagccatccgacattgaagcacgtataagaacgatgatcttgtcttacatcaagcaagatacttgcttgatattggctgttacccctgctaataccgatctagcaaactctgatgcccttcaaattgctagcattgtagatcctgatggtcacagaacgataggtgtaatcacaaagttggatattatggacaaaggtactgatgctcgaaaactccttcttggaaatgttgttcctcttcgacttggatacgtgggagttgtaaatcgttgccaggaggatattttgctaaaccgcacagtcaaggaagcacttctcgcagaggagaagttcttccggagtcacccggtttaccatggtcttgccgatcgtttgggtgttcctcagctagcaaagaagttaaatcagatccttgttcaacatatcaaggtcttgcttccggatttgaagtcgcggataagtaatgctttggttgctacagcaaaagagcatcagagctatggtgaattaacagaatcaagggctgggcaaggagctcttctcctcaactttctctccaaatactgtgaagcatactcttcattgctggaagggaaaagtgaagaaatgtctacgtcagagctctctggaggagcaagaattcactatattttccagtcaatctttgttaagagtttggaggaggttgatccatgcgaggacttgacagatgatgatattcggactgcaattcagaatgcaactggtccaagatctgcattatttgttccagatgttccatttgaagttcttgttaggaggcagatatctcgtttgttagatcctagccttcagtgtgcccggttcatttttgaagagctaataaaggtgagtgtttttttggtttgttgttaataagtaataagattacttcataaatttgaatttctctacagattagccatagatgtatgatgaatgagttacaacgatttccagtcctacgaaagcgcatggatgaggttatcggggatttcctgcgagaaggtcttgaaccctcagaagcaatgatcggggatatcattgatatggagatggattacataaacacttcacatccaaattttattggtggaaccaaggccgtggaagctgcaatgcatcaagtgaagtcttcgaggattccccatcctgtggcacgaccaaagcaggacactgtggagcctgatagaacatcttcttccacgagtcaagtgaaatctagatcgtttctcggcaggcaagctaatggaattgttactgatcagggagttgtatctgcagatgctgaaaaagctcaacctgctgcaaatgcgagtgatacaaggtggggtatcccttcaattttccgagggggtgatactagagcagttactaaagatagcttattaaacaaaccattcagtgaagctgttgaggatatgtctcacaacttatccatgatctatctaaaggagcccccagctgtcttgaggccaaccgaaacccattcagaacaggaagcagttgagattcagataacaaagctgttactaagatcatactatgacattgtaaggaagaatattgaggactcggtaccaaaagcaatcatgcatttcctggtaaaccacacaaaacgtgagctgcataacgtcttcatcaagaagctttacagggagaacttgtttgaagaaatgttgcaagagccagatgagatagcagttaagaggaaacgcacacaagagactctccacgttcttcagcaagcttacaggacactagatgagttgccactggaagcagattcggtgtcagcaggaatgtcaaaacatcaggagttactgacatcttcaaagtattcgacaagcagctcatactcggcatctccaagtacgacaagaagatcgagaagagcaggagatcaacaccaaaatggatacggattctaacatgatccaaatatctcgaatatctctcgactgtgataacgcatttcattcatttaatggctctttcaggttttggtattaaattatgtgttggtcatatgaagaatttatataggaaaccagtacacagtgtgggttttggtccttttggactctgcattggttgacttgataagggagtgaaaggtgatatagttttttttt

SEQ ID NO: 89152 - protein, 519 aa, Arabidopsis thaliana
  peptide (1)..(519): Ceres Seq. ID no. 12715872
  misc_feature (291)..(513): Pfam Name: Dynamin central region Pfam Description: Dynamin central region
  misc_feature (40)..(519): Homolog of NCBI NO: 14334428 NR Description: putative dynamin protein ADL2 [Arabidopsis >gi|17104743|gb|AAL34260.1| putative dynamin protein ADL2
  misc_feature (56)..(412): Homolog of NCBI NO: 19386736 NR Description: putative dynamin-like protein ADL2 [Oryza sativa
  misc_feature (449)..(513): Homolog of NCBI NO: 19386736 NR Description: putative dynamin-like protein ADL2 [Oryza sativa
  misc_feature (60)..(513): Homolog of NCBI NO: 38346632 NR Description: OSJNBa0072D21.2 [Oryza sativa (japonica
  misc_feature (76)..(512): Homolog of NCBI NO: 2689219 NR Description: dynamin like protein [Dictyostelium discoideum]
  misc_feature (51)..(510): Homolog of NCBI NO: 30048092 NR Description: DNM1 protein [Homo sapiens]
  misc_feature (76)..(510): Homolog of NCBI NO: 6978771 NR Description: dynamin 2 [Rattus norvegicus]
  misc_feature (76)..(510): Homolog of NCBI NO: 12836637 NR Description: unnamed protein product [Mus musculus]
  misc_feature (76)..(510): Homolog of NCBI NO: 22002044 NR Description: Dynamin 2 (Dynamin UDNM)
  misc_feature (76)..(512): Homolog of NCBI NO: 1083647 NR Description: dynamin II isoform ba - rat
ARKSRVIDLLFFPVLSSLLHELNFFKTLATLIHSKSDPTMTIEEVSGETPPSTPPSSSTPSPSSSTTNAAPLGSSVIPIVNKLQDIFAQLGSQSTIALPQVVVVGSQSSGKSSVLEALVGRDFLPRGNDICTRRPLVLQLLQTKSRANGGSDDEWGEFRHLPETRFYDFSEIRREIEAETNRLVGENKGVADTQIRLKISSPNVLNITLVDLPGITKVPVGDQPSDIEARIRTMILSYIKQDTCLILAVTPANTDLANSDALQIASIVDPDGHRTIGVITKLDIMDKGTDARKLLLGNVVPLRLGYVGVVNRCQEDILLNRTVKEALLAEEKFFRSHPVYHGLADRLGVPQLAKKLNQILVQHIKVLLPDLKSRISNALVATAKEHQSYGELTESRAGQGALLLNFLSKYCEAYSSLLEGKSEEMSTSELSGGARIHYIFQSIFVKSLEEVDPCEDLTDDDIRTAIQNATGPRSALFVPDVPFEVLVRRQISRLLDPSLQCARFIFEELIKVSVFLVCC

SEQ ID NO: 89153 - protein, 480 aa, Arabidopsis thaliana
  peptide (1)..(480): Ceres Seq. ID no. 12715873
  misc_feature (252)..(474): Pfam Name: Dynamin central region Pfam Description: Dynamin central region
  misc_feature (1)..(480): Homolog of NCBI NO: 14334428 NR Description: putative dynamin protein ADL2 [Arabidopsis >gi|17104743|gb|AAL34260.1| putative dynamin protein ADL2
  misc_feature (17)..(373): Homolog of NCBI NO: 19386736 NR Description: putative dynamin-like protein ADL2 [Oryza sativa
  misc_feature (410)..(474): Homolog of NCBI NO: 19386736 NR Description: putative dynamin-like protein ADL2 [Oryza sativa
  misc_feature (21)..(474): Homolog of NCBI NO: 38346632 NR Description: OSJNBa0072D21.2 [Oryza sativa (japonica
  misc_feature (37)..(473): Homolog of NCBI NO: 2689219 NR Description: dynamin like protein [Dictyostelium discoideum]
  misc_feature (12)..(471): Homolog of NCBI NO: 30048092 NR Description: DNM1 protein [Homo sapiens]
  misc_feature (37)..(471): Homolog of NCBI NO: 6978771 NR Description: dynamin 2 [Rattus norvegicus]
  misc_feature (37)..(471): Homolog of NCBI NO: 22002044 NR Description: Dynamin 2 (Dynamin UDNM)
  misc_feature (37)..(471): Homolog of NCBI NO: 12836637 NR Description: unnamed protein product [Mus musculus]
  misc_feature (37)..(473): Homolog of NCBI NO: 1083647 NR Description: dynamin II isoform ba - rat
MTIEEVSGETPPSTPPSSSTPSPSSSTTNAAPLGSSVIPIVNKLQDIFAQLGSQSTIALPQVVVVGSQSSGKSSVLEALVGRDFLPRGNDICTRRPLVLQLLQTKSRANGGSDDEWGEFRHLPETRFYDFSEIRREIEAETNRLVGENKGVADTQIRLKISSPNVLNITLVDLPGITKVPVGDQPSDIEARIRTMILSYIKQDTCLILAVTPANTDLANSDALQIASIVDPDGHRTIGVITKLDIMDKGTDARKLLLGNVVPLRLGYVGVVNRCQEDILLNRTVKEALLAEEKFFRSHPVYHGLADRLGVPQLAKKLNQILVQHIKVLLPDLKSRISNALVATAKEHQSYGELTESRAGQGALLLNFLSKYCEAYSSLLEGKSEEMSTSELSGGARIHYIFQSIFVKSLEEVDPCEDLTDDDIRTAIQNATGPRSALFVPDVPFEVLVRRQISRLLDPSLQCARFIFEELIKVSVFLVCC

SEQ ID NO: 89154 - protein, 332 aa, Arabidopsis thaliana
  peptide (1)..(332): Ceres Seq. ID no. 12715874
  misc_feature (1)..(68): Pfam Name: Dynamin central region Pfam Description: Dynamin central region
  misc_feature (94)..(332): Homolog of NCBI NO: 19386736 NR Description: putative dynamin-like protein ADL2 [Oryza sativa
  misc_feature (1)..(99): Homolog of NCBI NO: 19386736 NR Description: putative dynamin-like protein ADL2 [Oryza sativa
  misc_feature (1)..(326): Homolog of NCBI NO: 38346632 NR Description: OSJNBa0072D21.2 [Oryza sativa (japonica
  misc_feature (173)..(280): Homolog of NCBI NO: 2689219 NR Description: dynamin like protein [Dictyostelium discoideum]
  misc_feature (4)..(61): Homolog of NCBI NO: 2689219 NR Description: dynamin like protein [Dictyostelium discoideum]
  misc_feature (186)..(319): Homolog of NCBI NO: 30048092 NR Description: DNM1 protein [Homo sapiens]
  misc_feature (4)..(69): Homolog of NCBI NO: 30048092 NR Description: DNM1 protein [Homo sapiens]
  misc_feature (193)..(280): Homolog of NCBI NO: 6978771 NR Description: dynamin 2 [Rattus norvegicus]
  misc_feature (193)..(280): Homolog of NCBI NO: 22002044 NR Description: Dynamin 2 (Dynamin UDNM)
  misc_feature (193)..(280): Homolog of NCBI NO: 12836637 NR Description: unnamed protein product [Mus musculus]
MMNELQRFPVLRKRMDEVIGDFLREGLEPSEAMIGDIIDMEMDYINTSHPNFIGGTKAVEAAMHQVKSSRIPHPVARPKQDTVEPDRTSSSTSQVKSRSFLGRQANGIVTDQGVVSADAEKAQPAANASDTRWGIPSIFRGGDTRAVTKDSLLNKPFSEAVEDMSHNLSMIYLKEPPAVLRPTETHSEQEAVEIQITKLLLRSYYDIVRKNIEDSVPKAIMHFLVNHTKRELHNVFIKKLYRENLFEEMLQEPDEIAVKRKRTQETLHVLQQAYRTLDELPLEADSVSAGMSKHQELLTSSKYSTSSSYSASPSTTRRSRRAGDQHQNGYGF

SEQ ID NO: 89155 - DNA, 1586 bp, Arabidopsis thaliana
  misc_feature (1)..(1586): Ceres Seq. ID no. 12715879
  misc_feature: MA Experiment ID: 108434 Result: Up-regulated in Transcription
  misc_feature: MA Experiment 108434 PARAMETER Experiment Name: At_Root_Tips_cDNA_P Parameter: Tissue Value: Root Tips
  misc_feature: MA Experiment ID: 108462 Result: Down-regulated in Transcription
  misc_feature: MA Experiment 108462 PARAMETER Experiment Name: At_Germinating_Seeds_cDNA_P Parameter: Age (day) Value: 2 vs. 0
  misc_feature: MA Experiment 108462 PARAMETER Experiment Name: At_Germinating_Seeds_cDNA_P Parameter: Tissue Value: Germinating Seeds
  misc_feature: MA Experiment ID: 108463 Result: Down-regulated in Transcription
  misc_feature: MA Experiment 108463 PARAMETER Experiment Name: At_Germinating_Seeds_cDNA_P Parameter: Age (day) Value: 3 vs. 0
  misc_feature: MA Experiment 108463 PARAMETER Experiment Name: At_Germinating_Seeds_cDNA_P Parameter: Tissue Value: Germinating Seeds
  misc_feature: MA Experiment ID: 108464 Result: Down-regulated in Transcription
  misc_feature: MA Experiment 108464 PARAMETER Experiment Name: At_Germinating_Seeds_cDNA_P Parameter: Age (day) Value: 4 vs. 0
  misc_feature: MA Experiment 108464 PARAMETER Experiment Name: At_Germinating_Seeds_cDNA_P Parameter: Tissue Value: Germinating Seeds
  misc_feature: MA Experiment ID: 108595 Result: Down-regulated in Transcription
  misc_feature: MA Experiment 108595 PARAMETER Experiment Name: At_Ler-pi_Ovule_cDNA_P Parameter: Plant Line Value: null
  misc_feature: MA Experiment ID: 20000087 Result: Down-regulated in Transcription
  misc_feature: MA Experiment 20000087 PARAMETER Experiment Name: At_100uM_ABA_Mutants_cDNA_P Parameter: Plant Line Value: WS
  misc_feature: MA Experiment 20000087 PARAMETER Experiment Name: At_100uM_ABA_Mutants_cDNA_P Parameter: Timepoint (hr) Value: 6
  misc_feature: MA Experiment 20000087 PARAMETER Experiment Name: At_100uM_ABA_Mutants_cDNA_P Parameter: Tissue Value: Aerial
  misc_feature: MA Experiment 20000087 PARAMETER Experiment Name: At_100uM_ABA_Mutants_cDNA_P Parameter: Treatment Value: 100uM ABA vs. No Treatment
  misc_feature: MA Experiment ID: 20000227 Result: Up-regulated in Transcription
  misc_feature: MA Experiment 20000227 PARAMETER Experiment Name: At_Root-Tips-vs-Tops_P Parameter: Tissue Value: Root Tips vs. Root Tops
  misc_feature: MA Experiment ID: 20000234 Result: Up-regulated in Transcription
  misc_feature: MA Experiment 20000234 PARAMETER Experiment Name: At_Siliques_P Parameter: Age (day) Value: 21
  misc_feature: MA Experiment 20000234 PARAMETER Experiment Name: At_Siliques_P Parameter: Organism Value: A. thaliana
  misc_feature: MA Experiment 20000234 PARAMETER Experiment Name: At_Siliques_P Parameter: Plant Line Value: WS
  misc_feature: MA Experiment 20000234 PARAMETER Experiment Name: At_Siliques_P Parameter: Tissue Value: Less Than 5mm Siliques vs. Whole Plant
  misc_feature: MA Experiment ID: 20000437 Result: Down-regulated in Transcription
  misc_feature: MA Experiment 20000437 PARAMETER Experiment Name: At_Drought_P Parameter: Age (day) Value: 8
  misc_feature: MA Experiment 20000437 PARAMETER Experiment Name: At_Drought_P Parameter: Organism Value: A. thaliana
  misc_feature: MA Experiment 20000437 PARAMETER Experiment Name: At_Drought_P Parameter: Plant Line Value: WS
  misc_feature: MA Experiment 20000437 PARAMETER Experiment Name: At_Drought_P Parameter: Timepoint (hr) Value: 24
  misc_feature: MA Experiment 20000437 PARAMETER Experiment Name: At_Drought_P Parameter: Tissue Value: Whole Plant
  misc_feature: MA Experiment 20000437 PARAMETER Experiment Name: At_Drought_P Parameter: Treatment Value: Drought vs. No Drought
tttgctctgcaaatttgtctgaaaaaatctttgtgcgaagcaggaaaaatgtcgtcgacccatcagttagtttcttcgatgatctcttcttcctcatccactttcttagccccttcaaattttaatctcagaactcgaaatgcttgcttacccatggcaaaacgggtcaatacttgcaaatgtgttgctacgccgcaagagaagatcgagtataagaccaaagtgtcacggaattcaaacatgtccaaacttcaggctggatacctattcccggagattgcaagaagaaggtctgcacacttgttgaaatatccagatgcacaagttataagtcttggaataggcgacacaactgagccaattcctgaagtgatcacttctgctatggcaaagaaagctcatgagttgtcaacaatagagggatatagtggttatggtgctgaacaaggtgcaaagccactgagagctgctattgcgaaaacattctacggtggccttggcataggggatgatgacgtttttgtttctgatggagctaaatgtgatatctcacgtctccaggttatgtttggttccaatgttacaattgctgttcaggatccttcatatccggcttatgtggactccagtgttattatgggtcagactgggcaatttaacactgatgtgcaaaagtatggaaacatcgagtacatgagatgcactccagagaatggcttctttcccgacttgtccaccgttggcaggacagatataattttcttctgttccccaaataaccctacgggtgctgctgccacgagagagcaactaacgcagttagttgagtttgcaaagaagaacggttctataatagtgtatgattccgcctatgcaatgtacatgtctgatgataacccacgatccatcttcgaaatccctggagcagaggaggtcgctatggagacagcttcgttcagcaaatatgctggtttcactggagttcgacttggttggactgtcatcccgaaaaagctactctattcagacggtttccctgttgccaaagacttcaatcggattatctgcacttgtttcaatggtgcatctaatatctctcaagctggtgctcttgcttgccttacacccgaaggacttgaggcaatgcataaggtgattggattctataaagaaaacacaaacataatcattgacacattcacatctctcgggtatgatgtatatggaggaaagaatgcgccttacgtatgggttcacttcccgaaccaaagctcatgggatgtgtttgctgagattctggagaagactcatgtggttacaactccaggaagtgggtttggaccagggggtgaagggttcgttcgtgtcagtgcctttggtcacagagagaacatcttagaggcatgtcgaagattcaagcagctttacaaatgaagaaccttgtttgtaatcgttcctcatcatcatcaccctctttaatgacatgatttgagttaaaataatgtcgtttccattgttttctggaatttgtagaagacacttttgacaccagtgtttcaagcaatttggcaaagtattttaacaac

SEQ ID NO: 89156 - protein, 477 aa, Arabidopsis thaliana
  peptide (1)..(477): Ceres Seq. ID no. 12715880
  misc_feature (164)..(476): Pfam Name: Aminotransferase class I and II Pfam Description: Aminotransferase class I and II
  misc_feature (17)..(477): Homolog of NCBI NO: 18418270 NR Description: putative protein; protein id: At4g33680.1, by cDNA: gi_15912290, supported by cDNA: gi_17529043 [Arabidopsis >gi|15912291|gb|AAL08279.1| AT4g33680/T16L1_170 [Arabidopsis
  misc_feature (52)..(477): Homolog of NCBI NO: 7447845 NR Description: probable transaminase (EC 2.6.1.-) T16L1.170 - Arabidopsis thaliana >gi|3549670|emb|CAA20581.1| putative [Arabidopsis thaliana] >gi|7270317|emb|CAB80085.1| putative
  misc_feature (29)..(477): Homolog of NCBI NO: 37703720 NR Description: putative aminotransferase AGD2 [Oryza sativa
  misc_feature (72)..(473): Homolog of NCBI NO: 37703722 NR Description: putative aminotransferase ALD1 [Oryza sativa
  misc_feature (72)..(473): Homolog of NCBI NO: 24414269 NR Description: Putative transaminase [Oryza sativa (japonica
  misc_feature (67)..(477): Homolog of NCBI NO: 18397344 NR Description: putative aspartate aminotransferase; protein id: supported by cDNA: gi_15982837 [Arabidopsis thaliana] At2g13810/F13J11.16 [Arabidopsis thaliana]
  misc_feature (73)..(477): Homolog of NCBI NO: 25315768 NR Description: probable aspartate aminotransferase [imported] -
  misc_feature (78)..(475): Homolog of NCBI NO: 24213476 NR Description: aminotransferase [Leptospira interrogans serovar str. 56601] >gi|24194250|gb|AAN47975.1|AE011264_3
  misc_feature (78)..(477): Homolog of NCBI NO: 23124300 NR Description: hypothetical protein [Nostoc punctiforme]
  misc_feature (78)..(477): Homolog of NCBI NO: 17232595 NR Description: aminotransferase [Nostoc sp. PCC 7120]
FALQICLKKSLCEAGKMSSTHQLVSSMISSSSSTFLAPSNFNLRTRNACLPMAKRVNTCKCVATPQEKIEYKTKVSRNSNMSKLQAGYLFPEIARRRSAHLLKYPDAQVISLGIGDTTEPIPEVITSAMAKKAHELSTIEGYSGYGAEQGAKPLRAAIAKTFYGGLGIGDDDVFVSDGAKCDISRLQVMFGSNVTIAVQDPSYPAYVDSSVIMGQTGQFNTDVQKYGNIEYMRCTPENGFFPDLSTVGRTDIIFFCSPNNPTGAAATREQLTQLVEFAKKNGSIIVYDSAYAMYMSDDNPRSIFEIPGAEEVAMETASFSKYAGFTGVRLGWTVIPKKLLYSDGFPVAKDFNRIICTCFNGASNISQAGALACLTPEGLEAMHKVIGFYKENTNIIIDTFTSLGYDVYGGKNAPYVWVHFPNQSSWDVFAEILEKTHVVTTPGSGFGPGGEGFVRVSAFGHRENILEACRRFKQLYK

SEQ ID NO: 89157 - protein, 461 aa, Arabidopsis thaliana [sequence omitted]

SEQ ID NO: 89158 - protein, 451 aa, Arabidopsis thaliana; identical to SEQ ID NO: 76835
  peptide (1)..(451): Ceres Seq. ID no. 12715882
  misc_feature (138)..(450): Pfam Name: Aminotransferase class I and II Pfam Description: Aminotransferase class I and II
  misc_feature (1)..(451): Homolog of NCBI NO: 18418270 NR Description: putative protein; protein id: At4g33680.1, by cDNA: gi_15912290, supported by cDNA: gi_17529043 [Arabidopsis >gi|15912291|gb|AAL08279.1| AT4g33680/T16L1_170 [Arabidopsis
  misc_feature (26)..(451): Homolog of NCBI NO: 7447845 NR Description: probable transaminase (EC 2.6.1.-) T16L1.170 - Arabidopsis thaliana >gi|3549670|emb|CAA20581.1| putative [Arabidopsis thaliana] >gi|7270317|emb|CAB80085.1| putative
  misc_feature (3)..(451): Homolog of NCBI NO: 37703720 NR Description: putative aminotransferase AGD2 [Oryza sativa
  misc_feature (46)..(447): Homolog of NCBI NO: 37703722 NR Description: putative aminotransferase ALD1 [Oryza sativa
  misc_feature (46)..(447): Homolog of NCBI NO: 24414269 NR Description: Putative transaminase [Oryza sativa (japonica
  misc_feature (41)..(451): Homolog of NCBI NO: 18397344 NR Description: putative aspartate aminotransferase; protein id: supported by cDNA: gi_15982837 [Arabidopsis thaliana] At2g13810/F13J11.16 [Arabidopsis thaliana]
  misc_feature (47)..(451): Homolog of NCBI NO: 25315768 NR Description: probable aspartate aminotransferase [imported] -
  misc_feature (52)..(449): Homolog of NCBI NO: 24213476 NR Description: aminotransferase [Leptospira interrogans serovar str. 56601] >gi|24194250|gb|AAN47975.1|AE011264_3
  misc_feature (52)..(451): Homolog of NCBI NO: 23124300 NR Description: hypothetical protein [Nostoc punctiforme]
  misc_feature (52)..(451): Homolog of NCBI NO: 17232595 NR Description: aminotransferase [Nostoc sp. PCC 7120]

SEQ ID NO: 89159 - DNA, 737 bp, Arabidopsis thaliana
  misc_feature (1)..(737): Ceres Seq. ID no. 12715887
  misc_feature: MA Experiment ID: 108434 Result: Up-regulated in Transcription
  misc_feature: MA Experiment 108434 PARAMETER Experiment Name: At_Root_Tips_cDNA_P Parameter: Tissue Value: Root Tips
  misc_feature: MA Experiment ID: 108463 Result: Down-regulated in Transcription
  misc_feature: MA Experiment 108463 PARAMETER Experiment Name: At_Germinating_Seeds_cDNA_P Parameter: Age (day) Value: 3 vs. 0
  misc_feature: MA Experiment 108463 PARAMETER Experiment Name: At_Germinating_Seeds_cDNA_P Parameter: Tissue Value: Germinating Seeds
  misc_feature: MA Experiment ID: 20000794 Result: Down-regulated in Transcription
  misc_feature: MA Experiment 20000794 PARAMETER Experiment Name: At_Petals_P Parameter: Age (day) Value: 23-25 days
  misc_feature: MA Experiment 20000794 PARAMETER Experiment Name: At_Petals_P Parameter: Plant Line Value: WS
  misc_feature: MA Experiment 20000794 PARAMETER Experiment Name: At_Petals_P Parameter: Tissue Value: Petals vs. Whole plant
gatctatcaaagttcgaagagaccgacgcaaaagggacagaaacggagaaggagaaagaggcagagatgggagtagagatccaatcgccgcaggaacagagctcttacaccgttgagcagctcgtcgcccttaatcctttcaaccctgaaatcctgcctgatctcgaaaactacgttaacgttacatcgcaaacgtatagtctggaagtaaacctatgcttgcttcggctctatcagtttgagcctgagcgcatgaacactcatatcgtggctcgaatcttggtcaaggctcttatggctatgccaactccagacttcagcctttgcctcttcttgattcaccttcttagcttaagctaccaaaaggttccaagatcagtgctggctgaggctgttaacatggatggtgcatctctagacaaattcatcgagcagcaagtgactaacagtggatggattgttgagaaagagggtggaagtattgtcttaccacaaaatgaatttaaccatccggagctcaagaaaaatacaggtgagaatgttcccttggaacacattgcccgcatcttccccatccttggttgaaccaattcatgagaacactgcaaattttccttttgtctcttgttatcttgtgatgtacacttttaagacaccgtaatgtgaattttggcaatggccttcctctttgcaatttgacagattttcttaaaaatctagtagaccgagactttgcc

SEQ ID NO: 89160 - protein, 194 aa, Arabidopsis thaliana
  peptide (1)..(194): Ceres Seq. ID no. 12715888
  misc_feature (27)..(113): Pfam Name: Eukaryotic translation initiation factor 3 Pfam Description: Eukaryotic translation initiation factor 3
  misc_feature (98)..(194): Homolog of NCBI NO: 15234123 NR Description: putative protein; protein id: At4g33250.1, by cDNA: gi_12407752, supported by cDNA: gi_14335023, supported cDNA: gi_15292988, supported by cDNA: gi_20147104, supported by
  misc_feature (23)..(113): Homolog of NCBI NO: 15234123 NR Description: putative protein; protein id: At4g33250.1, by cDNA: gi_12407752, supported by cDNA: gi_14335023, supported cDNA: gi_15292988, supported by cDNA: gi_20147104, supported by
  misc_feature (104)..(193): Homolog of NCBI NO: 23396617 NR Description: Eukaryotic translation initiation factor 3
  misc_feature (29)..(113): Homolog of NCBI NO: 23396617 NR Description: Eukaryotic translation initiation factor 3
  misc_feature (134)..(194): Homolog of NCBI NO: 20453126 NR Description: AT4g33250/F17M5_10 [Arabidopsis thaliana]
  misc_feature (32)..(113): Homolog of NCBI NO: 5114051 NR Description: HSPC029 [Homo sapiens]
  misc_feature (32)..(113): Homolog of NCBI NO: 10801345 NR Description: muscle specific gene [Homo sapiens]
  misc_feature (32)..(113): Homolog of NCBI NO: 21312044 NR Description: RIKEN cDNA 1200009C21 [Mus musculus]
  misc_feature (32)..(113): Homolog of NCBI NO: 27730981 NR Description: similar to RIKEN cDNA 1200009C21 [Mus musculus]
  misc_feature (33)..(112): Homolog of NCBI NO: 38047673 NR Description: similar to Drosophila melanogaster CG10306
DLSKFEETDAKGTETEKEKEAEMGVEIQSPQEQSSYTVEQLVALNPFNPEILPDLENYVNVTSQTYSLEVNLCLLRLYQFEPERMNTHIVARILVKALMAMPTPDFSLCLFLIHLLSLSYQKVPRSVLAEAVNMDGASLDKFIEQQVTNSGWIVEKEGGSIVLPQNEFNHPELKKNTGENVPLEHIARIFPILG

SEQ ID NO: 89161 - protein, 172 aa, Arabidopsis thaliana
  peptide (1)..(172): Ceres Seq. ID no. 12715889
  misc_feature (5)..(91): Pfam Name: Eukaryotic translation initiation factor 3 Pfam Description: Eukaryotic translation initiation factor 3
  misc_feature (76)..(172): Homolog of NCBI NO: 15234123 NR Description: putative protein; protein id: At4g33250.1, by cDNA: gi_12407752, supported by cDNA: gi_14335023, supported cDNA: gi_15292988, supported by cDNA: gi_20147104, supported by
  misc_feature (1)..(91): Homolog of NCBI NO: 15234123 NR Description: putative protein; protein id: At4g33250.1, by cDNA: gi_12407752, supported by cDNA: gi_14335023, supported cDNA: gi_15292988, supported by cDNA: gi_20147104, supported by
  misc_feature (82)..(171): Homolog of NCBI NO: 23396617 NR Description: Eukaryotic translation initiation factor 3
  misc_feature (7)..(91): Homolog of NCBI NO: 23396617 NR Description: Eukaryotic translation initiation factor 3
  misc_feature (112)..(172): Homolog of NCBI NO: 20453126 NR Description: AT4g33250/F17M5_10 [Arabidopsis thaliana]
  misc_feature (10)..(91): Homolog of NCBI NO: 5114051 NR Description: HSPC029 [Homo sapiens]
  misc_feature (10)..(91): Homolog of NCBI NO: 10801345 NR Description: muscle specific gene [Homo sapiens]
  misc_feature (10)..(91): Homolog of NCBI NO: 27730981 NR Description: similar to RIKEN cDNA 1200009C21 [Mus musculus]
  misc_feature (10)..(91): Homolog of NCBI NO: 21312044 NR Description: RIKEN cDNA 1200009C21 [Mus musculus]
  misc_feature (11)..(90): Homolog of NCBI NO: 38047673 NR Description: similar to Drosophila melanogaster CG10306
MGVEIQSPQEQSSYTVEQLVALNPFNPEILPDLENYVNVTSQTYSLEVNLCLLRLYQFEPERMNTHIVARILVKALMAMPTPDFSLCLFLIHLLSLSYQKVPRSVLAEAVNMDGASLDKFIEQQVTNSGWIVEKEGGSIVLPQNEFNHPELKKNTGENVPLEHIARIFPILG

SEQ ID NO: 89162 - protein, 110 aa, Arabidopsis thaliana
  peptide (1)..(110): Ceres Seq. ID no. 12715890
  misc_feature (14)..(110): Pfam Name: Eukaryotic translation initiation factor 3 Pfam Description: Eukaryotic translation initiation factor 3
  misc_feature (14)..(110): Homolog of NCBI NO: 15234123 NR Description: putative protein; protein id: At4g33250.1, by cDNA: gi_12407752, supported by cDNA: gi_14335023, supported cDNA: gi_15292988, supported by cDNA: gi_20147104, supported by
  misc_feature (1)..(29): Homolog of NCBI NO: 15234123 NR Description: putative protein; protein id: At4g33250.1, by cDNA: gi_12407752, supported by cDNA: gi_14335023, supported cDNA: gi_15292988, supported by cDNA: gi_20147104, supported by
  misc_feature (20)..(109): Homolog of NCBI NO: 23396617 NR Description: Eukaryotic translation initiation factor 3
  misc_feature (1)..(29): Homolog of NCBI NO: 23396617 NR Description: Eukaryotic translation initiation factor 3
  misc_feature (50)..(110): Homolog of NCBI NO: 20453126 NR Description: AT4g33250/F17M5_10 [Arabidopsis thaliana]
  misc_feature (1)..(29): Homolog of NCBI NO: 5114051 NR Description: HSPC029 [Homo sapiens]
  misc_feature (1)..(29): Homolog of NCBI NO: 10801345 NR Description: muscle specific gene [Homo sapiens]
  misc_feature (1)..(29): Homolog of NCBI NO: 27730981 NR Description: similar to RIKEN cDNA 1200009C21 [Mus musculus]
  misc_feature (1)..(29): Homolog of NCBI NO: 21312044 NR Description: RIKEN cDNA 1200009C21 [Mus musculus]
  misc_feature (1)..(28): Homolog of NCBI NO: 38047673 NR Description: similar to Drosophila melanogaster CG10306
MNTHIVARILVKALMAMPTPDFSLCLFLIHLLSLSYQKVPRSVLAEAVNMDGASLDKFIEQQVTNSGWIVEKEGGSIVLPQNEFNHPELKKNTGENVPLEHIARIFPILG

SEQ ID NO: 89163 - DNA, 1501 bp, Arabidopsis thaliana
  misc_feature (1)..(1501): Ceres Seq. ID no. 12715895
  misc_feature: MA Experiment ID: 108585 Result: Down-regulated in Transcription
  misc_feature: MA Experiment 108585 PARAMETER Experiment Name: At_5mM_NaNP_cDNA_P Parameter: Timepoint (hr) Value: 6
  misc_feature: MA Experiment 108585 PARAMETER Experiment Name: At_5mM_NaNP_cDNA_P Parameter: Tissue Value: Aerial
  misc_feature: MA Experiment 108585 PARAMETER Experiment Name: At_5mM_NaNP_cDNA_P Parameter: Treatment Value: null
  misc_feature: MA Experiment ID: 20000227 Result: Up-regulated in Transcription
  misc_feature: MA Experiment 20000227 PARAMETER Experiment Name: At_Root-Tips-vs-Tops_P Parameter: Tissue Value: Root Tips vs. Root Tops
  misc_feature: MA Experiment ID: 20000234 Result: Up-regulated in Transcription
  misc_feature: MA Experiment 20000234 PARAMETER Experiment Name: At_Siliques_P Parameter: Age (day) Value: 21
  misc_feature: MA Experiment 20000234 PARAMETER Experiment Name: At_Siliques_P Parameter: Organism Value: A. thaliana
  misc_feature: MA Experiment 20000234 PARAMETER Experiment Name: At_Siliques_P Parameter: Plant Line Value: WS
  misc_feature: MA Experiment 20000234 PARAMETER Experiment Name: At_Siliques_P Parameter: Tissue Value: Less Than 5mm Siliques vs. Whole Plant
  misc_feature: MA Experiment ID: 20000437 Result: Down-regulated in Transcription
  misc_feature: MA Experiment 20000437 PARAMETER Experiment Name: At_Drought_P Parameter: Age (day) Value: 8
  misc_feature: MA Experiment 20000437 PARAMETER Experiment Name: At_Drought_P Parameter: Organism Value: A. thaliana
  misc_feature: MA Experiment 20000437 PARAMETER Experiment Name: At_Drought_P Parameter: Plant Line Value: WS
  misc_feature: MA Experiment 20000437 PARAMETER Experiment Name: At_Drought_P Parameter: Timepoint (hr) Value: 24
  misc_feature: MA Experiment 20000437 PARAMETER Experiment Name: At_Drought_P Parameter: Tissue Value: Whole Plant
  misc_feature: MA Experiment 20000437 PARAMETER Experiment Name: At_Drought_P Parameter: Treatment Value: Drought vs. No Drought
tttgctctgcaaatttgtctgaaaaaatctttgtgcgaagcaggaaaaatgtcgtcgacccatcagttagtttcttcgatgatctcttcttcctcatccactttcttagccccttcaaattttaatctcagaactcgaaatgcttgcttacccatggcaaaacgggtcaatacttgcaaatttcaggctggatacctattcccggagattgcaagaagaaggtctgcacacttgttgaaatatccagatgcacaagttataagtcttggaataggcgacacaactgagccaattcctgaagtgatcacttctgctatggcaaagaaagctcatgagttgtcaacaatagagggatatagtggttatggtgctgaacaaggtgcaaagccactgagagctgctattgcgaaaacattctacggtggccttggcataggggatgatgacgtttttgtttctgatggagctaaatgtgatatctcacgtctccaggttatgtttggttccaatgttacaattgctgttcaggatccttcatatccggcttatgtggactccagtgttattatgggtcagactgggcaatttaacactgatgtgcaaaagtatggaaacatcgagtacatgagatgcactccagagaatggcttctttcccgacttgtccaccgttggcaggacagatataattttcttctgttccccaaataaccctacgggtgctgctgccacgagagagcaactaacgcagttagttgagtttgcaaagaagaacggttctataatagtgtatgattccgcctatgcaatgtacatgtctgatgataacccacgatccatcttcgaaatccctggagcagaggaggtcgctatggagacagcttcgttcagcaaatatgctggtttcactggagttcgacttggttggactgtcatcccgaaaaagctactctattcagacggtttccctgttgccaaagacttcaatcggattatctgcacttgtttcaatggtgcatctaatatctctcaagctggtgctcttgcttgccttacacccgaaggacttgaggcaatgcataaggtgattggattctataaagaaaacacaaacataatcattgacacattcacatctctcgggtatgatgtatatggaggaaagaatgcgccttacgtatgggttcacttcccgaaccaaagctcatgggatgtgtttgctgagattctggagaagactcatgtggttacaactccaggaagtgggtttggaccagggggtgaagggttcgttcgtgtcagtgcctttggtcacagagagaacatcttagaggcatgtcgaagattcaagcagctttacaaatgaagaaccttgtttgtaatcgttcctcatcatcatcaccctctttaatgacatgatttgagttaaaataatgtcgtttccattgttttctggaatttgtagaagacacttttgacaccagtgtttcaagcaatttggc

SEQ ID NO: 89164 - protein, 454 aa, Arabidopsis thaliana
  peptide (1)..(454): Ceres Seq. ID no. 12715896
  misc_feature (141)..(453): Pfam Name: Aminotransferase class I and II Pfam Description: Aminotransferase class I and II
  misc_feature (52)..(454): Homolog of NCBI NO: 18418270 NR Description: putative protein; protein id: At4g33680.1, by cDNA: gi_15912290, supported by cDNA: gi_17529043 [Arabidopsis >gi|15912291|gb|AAL08279.1| AT4g33680/T16L1_170 [Arabidopsis
  misc_feature (17)..(60): Homolog of NCBI NO: 18418270 NR Description: putative protein; protein id: At4g33680.1, by cDNA: gi_15912290, supported by cDNA: gi_17529043 [Arabidopsis >gi|15912291|gb|AAL08279.1| AT4g33680/T16L1_170 [Arabidopsis
  misc_feature (52)..(454): Homolog of NCBI NO: 7447845 NR Description: probable transaminase (EC 2.6.1.-) T16L1.170 - Arabidopsis thaliana >gi|3549670|emb|CAA20581.1| putative [Arabidopsis thaliana] >gi|7270317|emb|CAB80085.1| putative
  misc_feature (54)..(454): Homolog of NCBI NO: 37703720 NR Description: putative aminotransferase AGD2 [Oryza sativa
  misc_feature (57)..(450): Homolog of NCBI NO: 37703722 NR Description: putative aminotransferase ALD1 [Oryza sativa
  misc_feature (57)..(450): Homolog of NCBI NO: 24414269 NR Description: Putative transaminase [Oryza sativa (japonica
  misc_feature (25)..(454): Homolog of NCBI NO: 18397344 NR Description: putative aspartate aminotransferase; protein id: supported by cDNA: gi_15982837 [Arabidopsis thaliana] At2g13810/F13J11.16 [Arabidopsis thaliana]
  misc_feature (52)..(454): Homolog of NCBI NO: 25315768 NR Description: probable aspartate aminotransferase [imported] -
  misc_feature (57)..(452): Homolog of NCBI NO: 24213476 NR Description: aminotransferase [Leptospira interrogans serovar str. 56601] >gi|24194250|gb|AAN47975.1|AE011264_3
  misc_feature (57)..(454): Homolog of NCBI NO: 23124300 NR Description: hypothetical protein [Nostoc punctiforme]
FALQICLKKSLCEAGKMSSTHQLVSSMISSSSSTFLAPSNFNLRTRNACLPMAKRVNTCKFQAGYLFPEIARRRSAHLLKYPDAQVISLGIGDTTEPIPEVITSAMAKKAHELSTIEGYSGYGAEQGAKPLRAAIAKTFYGGLGIGDDDVFVSDGAKCDISRLQVMFGSNVTIAVQDPSYPAYVDSSVIMGQTGQFNTDVQKYGNIEYMRCTPENGFFPDLSTVGRTDIIFFCSPNNPTGAAATREQLTQLVEFAKKNGSIIVYDSAYAMYMSDDNPRSIFEIPGAEEVAMETASFSKYAGFTGVRLGWTVIPKKLLYSDGFPVAKDFNRIICTCFNGASNISQAGALACLTPEGLEAMHKVIGFYKENTNIIIDTFTSLGYDVYGGKNAPYVWVHFPNQSSWDVFAEILEKTHVVTTPGSGFGPGGEGFVRVSAFGHRENILEACRRFKQLYK

SEQ ID NO: 89165 - protein, 438 aa, Arabidopsis thaliana
  peptide (1)..(438): Ceres Seq. ID no. 12715897
  misc_feature (125)..(437): Pfam Name: Aminotransferase class I and II Pfam Description: Aminotransferase class I and II
  misc_feature (36)..(438): Homolog of NCBI NO: 18418270 NR Description: putative protein; protein id: At4g33680.1, by cDNA: gi_15912290, supported by cDNA: gi_17529043 [Arabidopsis >gi|15912291|gb|AAL08279.1| AT4g33680/T16L1_170 [Arabidopsis
  misc_feature (1)..(44): Homolog of NCBI NO: 18418270 NR Description: putative protein; protein id: At4g33680.1, by cDNA: gi_15912290, supported by cDNA: gi_17529043 [Arabidopsis >gi|15912291|gb|AAL08279.1| AT4g33680/T16L1_170 [Arabidopsis
  misc_feature (36)..(438): Homolog of NCBI NO: 7447845 NR Description: probable transaminase (EC 2.6.1.-) T16L1.170 - Arabidopsis thaliana >gi|3549670|emb|CAA20581.1| putative [Arabidopsis thaliana] >gi|7270317|emb|CAB80085.1| putative
  misc_feature (38)..(438): Homolog of NCBI NO: 37703720 NR Description: putative aminotransferase AGD2 [Oryza sativa
  misc_feature (41)..(434): Homolog of NCBI NO: 37703722 NR Description: putative aminotransferase ALD1 [Oryza sativa
  misc_feature (41)..(434): Homolog of NCBI NO: 24414269 NR Description: Putative transaminase [Oryza sativa (japonica
  misc_feature (9)..(438): Homolog of NCBI NO: 18397344 NR Description: putative aspartate aminotransferase; protein id: supported by cDNA: gi_15982837 [Arabidopsis thaliana] At2g13810/F13J11.16 [Arabidopsis thaliana]
  misc_feature (36)..(438): Homolog of NCBI NO: 25315768 NR Description: probable aspartate aminotransferase [imported] -
  misc_feature (41)..(436): Homolog of NCBI NO: 24213476 NR Description: aminotransferase [Leptospira interrogans serovar str. 56601] >gi|24194250|gb|AAN47975.1|AE011264_3
  misc_feature (41)..(438): Homolog of NCBI NO: 23124300 NR Description: hypothetical protein [Nostoc punctiforme]
MSSTHQLVSSMISSSSSTFLAPSNFNLRTRNACLPMAKRVNTCKFQAGYLFPEIARRRSAHLLKYPDAQVISLGIGDTTEPIPEVITSAMAKKAHELSTIEGYSGYGAEQGAKPLRAAIAKTFYGGLGIGDDDVFVSDGAKCDISRLQVMFGSNVTIAVQDPSYPAYVDSSVIMGQTGQFNTDVQKYGNIEYMRCTPENGFFPDLSTVGRTDIIFFCSPNNPTGAAATREQLTQLVEFAKKNGSIIVYDSAYAMYMSDDNPRSIFEIPGAEEVAMETASFSKYAGFTGVRLGWTVIPKKLLYSDGFPVAKDFNRIICTCFNGASNISQAGALACLTPEGLEAMHKVIGFYKENTNIIIDTFTSLGYDVYGGKNAPYVWVHFPNQSSWDVFAEILEKTHVVTTPGSGFGPGGEGFVRVSAFGHRENILEACRRFKQLYK

SEQ ID NO: 89166 - protein, 428 aa, Arabidopsis thaliana
  peptide (1)..(428): Ceres Seq. ID no. 12715898
  misc_feature (115)..(427): Pfam Name: Aminotransferase class I and II Pfam Description: Aminotransferase class I and II
  misc_feature (26)..(428): Homolog of NCBI NO: 18418270 NR Description: putative protein; protein id: At4g33680.1, by cDNA: gi_15912290, supported by cDNA: gi_17529043 [Arabidopsis >gi|15912291|gb|AAL08279.1| AT4g33680/T16L1_170 [Arabidopsis
  misc_feature (1)..(34): Homolog of NCBI NO: 18418270 NR Description: putative protein; protein id: At4g33680.1, by cDNA: gi_15912290, supported by cDNA: gi_17529043 [Arabidopsis >gi|15912291|gb|AAL08279.1| AT4g33680/T16L1_170 [Arabidopsis
  misc_feature (26)..(428): Homolog of NCBI NO: 7447845 NR Description: probable transaminase (EC 2.6.1.-) T16L1.170 - Arabidopsis thaliana >gi|3549670|emb|CAA20581.1| putative [Arabidopsis thaliana] >gi|7270317|emb|CAB80085.1| putative
  misc_feature (28)..(428): Homolog of NCBI NO: 37703720 NR Description: putative aminotransferase AGD2 [Oryza sativa
  misc_feature (31)..(424): Homolog of NCBI NO: 37703722 NR Description: putative aminotransferase ALD1 [Oryza sativa
  misc_feature (31)..(424): Homolog of NCBI NO: 24414269 NR Description: Putative transaminase [Oryza sativa (japonica
  misc_feature (1)..(428): Homolog of NCBI NO: 18397344 NR Description: putative aspartate aminotransferase; protein id: supported by cDNA: gi_15982837 [Arabidopsis thaliana] At2g13810/F13J11.16 [Arabidopsis thaliana]
  misc_feature (26)..(428): Homolog of NCBI NO: 25315768 NR Description: probable aspartate aminotransferase [imported] -
  misc_feature (31)..(426): Homolog of NCBI NO: 24213476 NR Description: aminotransferase [Leptospira interrogans serovar str. 56601] >gi|24194250|gb|AAN47975.1|AE011264_3
  misc_feature (31)..(428): Homolog of NCBI NO: 23124300 NR Description: hypothetical protein [Nostoc punctiforme]
MISSSSSTFLAPSNFNLRTRNACLPMAKRVNTCKFQAGYLFPEIARRRSAHLLKYPDAQVISLGIGDTTEPIPEVITSAMAKKAHELSTIEGYSGYGAEQGAKPLRAAIAKTFYGGLGIGDDDVFVSDGAKCDISRLQVMFGSNVTIAVQDPSYPAYVDSSVIMGQTGQFNTDVQKYGNIEYMRCTPENGFFPDLSTVGRTDIIFFCSPNNPTGAAATREQLTQLVEFAKKNGSIIVYDSAYAMYMSDDNPRSIFEIPGAEEVAMETASFSKYAGFTGVRLGWTVIPKKLLYSDGFPVAKDFNRIICTCFNGASNISQAGALACLTPEGLEAMHKVIGFYKENTNIIIDTFTSLGYDVYGGKNAPYVWVHFPNQSSWDVFAEILEKTHVVTTPGSGFGPGGEGFVRVSAFGHRENILEACRRFKQLYK

SEQ ID NO: 89167 - DNA, 1645 bp, Arabidopsis thaliana
  misc_feature (1)..(1645): Ceres Seq. ID no. 12715909
  misc_feature: MA Experiment ID: 108434 Result: Up-regulated in Transcription
  misc_feature: MA Experiment 108434 PARAMETER Experiment Name: At_Root_Tips_cDNA_P Parameter: Tissue Value: Root Tips
  misc_feature: MA Experiment ID: 108573 Result: Down-regulated in Transcription
  misc_feature: MA Experiment 108573 PARAMETER Experiment Name: At_Drought_cDNA_P Parameter: Timepoint (hr) Value: 6
  misc_feature: MA Experiment 108573 PARAMETER Experiment Name: At_Drought_cDNA_P Parameter: Tissue Value: Aerial
  misc_feature: MA Experiment 108573 PARAMETER Experiment Name: At_Drought_cDNA_P Parameter: Treatment Value: Drought vs. No Drought
  misc_feature: MA Experiment ID: 20000182 Result: Down-regulated in Transcription
  misc_feature: MA Experiment 20000182 PARAMETER Experiment Name: At_2mM_SA_P Parameter: Age (day) Value: 14
  misc_feature: MA Experiment 20000182 PARAMETER Experiment Name: At_2mM_SA_P Parameter: Organism Value: A. thaliana
  misc_feature: MA Experiment 20000182 PARAMETER Experiment Name: At_2mM_SA_P Parameter: Plant Line Value: WS
  misc_feature: MA Experiment 20000182 PARAMETER Experiment Name: At_2mM_SA_P Parameter: Timepoint (hr) Value: 6
  misc_feature: MA Experiment 20000182 PARAMETER Experiment Name: At_2mM_SA_P Parameter: Tissue Value: Aerial
  misc_feature: MA Experiment 20000182 PARAMETER Experiment Name: At_2mM_SA_P Parameter: Treatment Value: 2mM SA vs. No Treatment
  misc_feature: MA Experiment ID: 20000184 Result: Down-regulated in Transcription
  misc_feature: MA Experiment 20000184 PARAMETER Experiment Name: At_Shoots__P Parameter: Age (day) Value: 7
  misc_feature: MA Experiment 20000184 PARAMETER Experiment Name: At_Shoots__P Parameter: Tissue Value: Shoots vs. Whole Plant
  misc_feature: MA Experiment ID: 20000227 Result: Up-regulated in Transcription
  misc_feature: MA Experiment 20000227 PARAMETER Experiment Name: At_Root-Tips-vs-Tops_P Parameter: Tissue Value: Root Tips vs. Root Tops
  misc_feature: MA Experiment ID: 20000234 Result: Up-regulated in Transcription
  misc_feature: MA Experiment 20000234 PARAMETER Experiment Name: At_Siliques_P Parameter: Age (day) Value: 21
  misc_feature: MA Experiment 20000234 PARAMETER Experiment Name: At_Siliques_P Parameter: Organism Value: A. thaliana
  misc_feature: MA Experiment 20000234 PARAMETER Experiment Name: At_Siliques_P Parameter: Plant Line Value: WS
  misc_feature: MA Experiment 20000234 PARAMETER Experiment Name: At_Siliques_P Parameter: Tissue Value: Less Than 5mm Siliques vs. Whole Plant
  misc_feature: MA Experiment ID: 20000235 Result: Up-regulated in Transcription
  misc_feature: MA Experiment 20000235 PARAMETER Experiment Name: At_Siliques_P Parameter: Age (day) Value: 21
  misc_feature: MA Experiment 20000235 PARAMETER Experiment Name: At_Siliques_P Parameter: Organism Value: A. thaliana
  misc_feature: MA Experiment 20000235 PARAMETER Experiment Name: At_Siliques_P Parameter: Plant Line Value: WS
  misc_feature: MA Experiment 20000235 PARAMETER Experiment Name: At_Siliques_P Parameter: Tissue Value: 5-10mm Siliques vs. Whole Plant
  misc_feature: MA Experiment ID: 20000264 Result: Up-regulated in Transcription
  misc_feature: MA Experiment 20000264 PARAMETER Experiment Name: At_Open_Flower_P Parameter: Age (day) Value: 21
  misc_feature: MA Experiment 20000264 PARAMETER Experiment Name: At_Open_Flower_P Parameter: Plant Line Value: WS
  misc_feature: MA Experiment 20000264 PARAMETER Experiment Name: At_Open_Flower_P Parameter: Tissue Value: Open Flower vs. Whole Plant
  misc_feature: MA Experiment ID: 20000286 Result: Up-regulated in Transcription
  misc_feature: MA Experiment 20000286 PARAMETER Experiment Name: At_Open_Flower_P Parameter: Age (day) Value: 21
  misc_feature: MA Experiment 20000286 PARAMETER Experiment Name: At_Open_Flower_P Parameter: Plant Line Value: WS
  misc_feature: MA Experiment 20000286 PARAMETER Experiment Name: At_Open_Flower_P Parameter: Tissue Value: Half Open vs. Whole Plant
  misc_feature: MA Experiment ID: 20000438 Result: Down-regulated in Transcription
  misc_feature: MA Experiment 20000438 PARAMETER Experiment Name: At_Shoots__P Parameter: Age (day) Value: 14
  misc_feature: MA Experiment 20000438 PARAMETER Experiment Name: At_Shoots__P Parameter: Tissue Value: Shoots vs. Whole Plant
  misc_feature: MA Experiment ID: 20000439 Result: Down-regulated in Transcription
  misc_feature: MA Experiment 20000439 PARAMETER Experiment Name: At_Roots__P Parameter: Age (day) Value: 14 vs. 21
  misc_feature: MA Experiment 20000439 PARAMETER Experiment Name: At_Roots__P Parameter: Organism Value: A. thaliana
  misc_feature: MA Experiment 20000439 PARAMETER Experiment Name: At_Roots__P Parameter: Tissue Value: Roots vs. Whole Plant
  misc_feature: MA Experiment ID: 20000441 Result: Down-regulated in Transcription
  misc_feature: MA Experiment 20000441 PARAMETER Experiment Name: At_1uM_BR-BRZ__P Parameter: Tissue Value: Shoot Apices
  misc_feature: MA Experiment 20000441 PARAMETER Experiment Name: At_1uM_BR-BRZ__P Parameter: Treatment Value: 1uM BR vs. No Treatment
  misc_feature: MA Experiment ID: 20000443 Result: Down-regulated in Transcription
  misc_feature: MA Experiment 20000443 PARAMETER Experiment Name: At_1uM_BR-BRZ__P Parameter: Tissue Value: Shoot Apices
  misc_feature: MA Experiment 20000443 PARAMETER Experiment Name: At_1uM_BR-BRZ__P Parameter: Treatment Value: 1uM BRZ vs. No Treatment
  misc_feature: MA Experiment ID: 20000451 Result: Down-regulated in Transcription
  misc_feature: MA Experiment 20000451 PARAMETER Experiment Name: At_CS6879_Shoots-Roots_P Parameter: Age (day) Value: 14
  misc_feature: MA Experiment 20000451 PARAMETER Experiment Name: At_CS6879_Shoots-Roots_P Parameter: Organism Value: A. thaliana
  misc_feature: MA Experiment 20000451 PARAMETER Experiment Name: At_CS6879_Shoots-Roots_P Parameter: Plant Line Value: CS6879 vs. WS
  misc_feature: MA Experiment 20000451 PARAMETER Experiment Name: At_CS6879_Shoots-Roots_P Parameter: Tissue Value: Roots
  misc_feature: MA Experiment ID: 20000527 Result: Down-regulated in Transcription
  misc_feature: MA Experiment 20000527 PARAMETER Experiment Name: At_10percent_PEG_P Parameter: Age (day) Value: 20
  misc_feature: MA Experiment 20000527 PARAMETER Experiment Name: At_10percent_PEG_P Parameter: Organism Value: A. thaliana
  misc_feature: MA Experiment 20000527 PARAMETER Experiment Name: At_10percent_PEG_P Parameter: Plant Line Value: WS
  misc_feature: MA Experiment 20000527 PARAMETER Experiment Name: At_10percent_PEG_P Parameter: Timepoint (day) Value: 20
  misc_feature: MA Experiment 20000527 PARAMETER Experiment Name: At_10percent_PEG_P Parameter: Tissue Value: Whole Plant
  misc_feature: MA Experiment 20000527 PARAMETER Experiment Name: At_10percent_PEG_P Parameter: Treatment Value: 10percent PEG vs. No Treatment
  misc_feature: MA Experiment ID: 20001558 Result: Up-regulated in Transcription
  misc_feature: MA Experiment 20001558 PARAMETER Experiment Name: At_Drought_Soil_Dry_P Parameter: Age (day) Value: 27
  misc_feature: MA Experiment 20001558 PARAMETER Experiment Name: At_Drought_Soil_Dry_P Parameter: Organism Value: A. thaliana
  misc_feature: MA Experiment 20001558 PARAMETER Experiment Name: At_Drought_Soil_Dry_P Parameter: Plant Line Value: WS
  misc_feature: MA Experiment 20001558 PARAMETER Experiment Name: At_Drought_Soil_Dry_P Parameter: Post Timepoint (hr) Value: 6
  misc_feature: MA Experiment 20001558 PARAMETER Experiment Name: At_Drought_Soil_Dry_P Parameter: Post-Treatment Value: Re-Water vs. No Drought
  misc_feature: MA Experiment 20001558 PARAMETER Experiment Name: At_Drought_Soil_Dry_P Parameter: Timepoint (day) Value: 13
  misc_feature: MA Experiment 20001558 PARAMETER Experiment Name: At_Drought_Soil_Dry_P Parameter: Treatment Value: Drought vs. No Drought
  misc_feature: MA Experiment ID: 20001560 Result: Up-regulated in Transcription
  misc_feature: MA Experiment 20001560 PARAMETER Experiment Name: At_Drought_Soil_Dry_P Parameter: Age (day) Value: 28
  misc_feature: MA Experiment 20001560 PARAMETER Experiment Name: At_Drought_Soil_Dry_P Parameter: Organism Value: A. thaliana
  misc_feature: MA Experiment 20001560 PARAMETER Experiment Name: At_Drought_Soil_Dry_P Parameter: Plant Line Value: WS
  misc_feature: MA Experiment 20001560 PARAMETER Experiment Name: At_Drought_Soil_Dry_P Parameter: Post Timepoint (hr) Value: None
  misc_feature: MA Experiment 20001560 PARAMETER Experiment Name: At_Drought_Soil_Dry_P Parameter: Post-Treatment Value: None
  misc_feature: MA Experiment 20001560 PARAMETER Experiment Name: At_Drought_Soil_Dry_P Parameter: Timepoint (day) Value: 14
  misc_feature: MA Experiment 20001560 PARAMETER Experiment Name: At_Drought_Soil_Dry_P Parameter: Treatment Value: Drought vs. No Drought
  misc_feature: MA Experiment ID: 20001768 Result: Up-regulated in Transcription
  misc_feature: MA Experiment 20001768 PARAMETER Experiment Name: At_Far-red-enriched-adult_P Parameter: Age (day) Value: 28
  misc_feature: MA Experiment 20001768 PARAMETER Experiment Name: At_Far-red-enriched-adult_P Parameter: Light Value: Far-red enriched vs. White
  misc_feature: MA Experiment 20001768 PARAMETER Experiment Name: At_Far-red-enriched-adult_P Parameter: Organism Value: A. thaliana
  misc_feature: MA Experiment 20001768 PARAMETER Experiment Name: At_Far-red-enriched-adult_P Parameter: Plant Line Value: Columbia
  misc_feature: MA Experiment 20001768 PARAMETER Experiment Name: At_Far-red-enriched-adult_P Parameter: Timepoint (hr) Value: 1
  misc_feature: MA Experiment 20001768 PARAMETER Experiment Name: At_Far-red-enriched-adult_P Parameter: Tissue Value: Aerial
  misc_feature: MA Experiment ID: 20001771 Result: Up-regulated in Transcription
  misc_feature: MA Experiment 20001771 PARAMETER Experiment Name: At_Far-red-enriched-adult_P Parameter: Age (day) Value: 28
  misc_feature: MA Experiment 20001771 PARAMETER Experiment Name: At_Far-red-enriched-adult_P Parameter: Light Value: Far-red enriched vs. White
  misc_feature: MA Experiment 20001771 PARAMETER Experiment Name: At_Far-red-enriched-adult_P Parameter: Organism Value: A. thaliana
  misc_feature: MA Experiment 20001771 PARAMETER Experiment Name: At_Far-red-enriched-adult_P Parameter: Plant Line Value: Columbia
  misc_feature: MA Experiment 20001771 PARAMETER Experiment Name: At_Far-red-enriched-adult_P Parameter: Timepoint (hr) Value: 16
  misc_feature: MA Experiment 20001771 PARAMETER Experiment Name: At_Far-red-enriched-adult_P Parameter: Tissue Value: Aerial
  misc_feature: MA Experiment ID: 20001773 Result: Up-regulated in Transcription
  misc_feature: MA Experiment 20001773 PARAMETER Experiment Name: At_Far-red-enriched-adult_P Parameter: Age (day) Value: 30
  misc_feature: MA Experiment 20001773 PARAMETER Experiment Name: At_Far-red-enriched-adult_P Parameter: Light Value: Far-red enriched vs. White
  misc_feature: MA Experiment 20001773 PARAMETER Experiment Name: At_Far-red-enriched-adult_P Parameter: Organism Value: A. thaliana
  misc_feature: MA Experiment 20001773 PARAMETER Experiment Name: At_Far-red-enriched-adult_P Parameter: Plant Line Value: Columbia
  misc_feature: MA Experiment 20001773 PARAMETER Experiment Name: At_Far-red-enriched-adult_P Parameter: Timepoint (hr) Value: 48
  misc_feature: MA Experiment 20001773 PARAMETER Experiment Name: At_Far-red-enriched-adult_P Parameter: Tissue Value: Aerial
  misc_feature: MA Experiment ID: 20001906 Result: Down-regulated in Transcription
  misc_feature: MA Experiment 20001906 PARAMETER Experiment Name: At_Drought_Reproduction_P Parameter: Age (day) Value: 35
  misc_feature: MA Experiment 20001906 PARAMETER Experiment Name: At_Drought_Reproduction_P Parameter: Organism Value: A. thaliana
  misc_feature: MA Experiment 20001906 PARAMETER Experiment Name: At_Drought_Reproduction_P Parameter: Plant Line Value: WS
  misc_feature: MA Experiment 20001906 PARAMETER Experiment Name: At_Drought_Reproduction_P Parameter: Timepoint (day) Value: 5
  misc_feature: MA Experiment 20001906 PARAMETER Experiment Name: At_Drought_Reproduction_P Parameter: Tissue Value: Siliques
  misc_feature: MA Experiment 20001906 PARAMETER Experiment Name: At_Drought_Reproduction_P Parameter: Treatment Value: Drought vs. No Drought
  misc_feature: MA Experiment ID: 20001908 Result: Down-regulated in Transcription
  misc_feature: MA Experiment 20001908 PARAMETER Experiment Name: At_Drought_Reproduction_P Parameter: Age (day) Value: 40
  misc_feature: MA Experiment 20001908 PARAMETER Experiment Name: At_Drought_Reproduction_P Parameter: Organism Value: A. thaliana
  misc_feature: MA Experiment 20001908 PARAMETER Experiment Name: At_Drought_Reproduction_P Parameter: Plant Line Value: WS
  misc_feature: MA Experiment 20001908 PARAMETER Experiment Name: At_Drought_Reproduction_P Parameter: Timepoint (day) Value: 10
  misc_feature: MA Experiment 20001908 PARAMETER Experiment Name: At_Drought_Reproduction_P Parameter: Tissue Value: Siliques
  misc_feature: MA Experiment 20001908 PARAMETER Experiment Name: At_Drought_Reproduction_P Parameter: Treatment Value: Drought vs. No Drought
  misc_feature: MA Experiment ID: 20001911 Result: Down-regulated in Transcription
  misc_feature: MA Experiment 20001911 PARAMETER Experiment Name: At_Drought_Reproduction_P Parameter: Age (day) Value: 40
  misc_feature: MA Experiment 20001911 PARAMETER Experiment Name: At_Drought_Reproduction_P Parameter: Organism Value: A. thaliana
  misc_feature: MA Experiment 20001911 PARAMETER Experiment Name: At_Drought_Reproduction_P Parameter: Plant Line Value: WS
  misc_feature: MA Experiment 20001911 PARAMETER Experiment Name: At_Drought_Reproduction_P Parameter: Timepoint (day) Value: 10
  misc_feature: MA Experiment 20001911 PARAMETER Experiment Name: At_Drought_Reproduction_P Parameter: Tissue Value: Flowers
  misc_feature: MA Experiment 20001911 PARAMETER Experiment Name: At_Drought_Reproduction_P Parameter: Treatment Value: Drought vs. No Drought
gtactctgttgcattatttctctcactcaaacgtatatacaaacataaattatgtcgacagaaatggaggtcgttagtgttcttaagtaccttgacaacaaatccatattggtcgttggaagctgctgggttcttagcaaatatctttgtggagaagatattaagggtggcaccaaacgtgaagaaactctatctccttctaagagcatcaaaaggaaaatctgctacccagaggtttaacgacgagattttgaagaaagatttgttcaaggtgctgaaggagaagtatggtcccaatctaaatcaacttacatcagagaaaatcactattgtcgacggagacatttgccttgaggatttaggtcttcaagacttcgacttggctcatgagatgatccaccaagttgatgccattgttaatttagctgcaactactaagtttgatgaaagatacgatgtagctcttgggatcaacacattgggtgctctcaatgtcttgaactttgccaagagatgtgcaaaggttaagatccttgttcatgtatcaacagcttacgtgtgcggagaaaaatctggcttgataatggaaacaccgtaccgtatgggtgagacgttgaatggaaccaccggtttagacatcaactacgagaaaaaattggttcaggagaaacttgaccagctccgagtaatcggagccgctcctgaaaccatcacggaaaccatgaaggatctcggactcagacgggcaaagatgtacggatggccaaacacatatgtgttcaccaaagcaatgggggagatgatggtagggacaaaaagagaaaatctgtcacttgtgttgcttcgtccttcaattattaccagcacattcaaagaaccatttcctggttggactgagggcatcaggactattgatagtttagctgttggatatggcaaaggcaaactcacgtgcttcctctgtgatcttgatgctgtttctgatgtgatgccggcagatatggtagtaaattcgattcttgtatcaatggccgctcaagccggtaaacaagaagagattatttaccatgtgggttcttcacttagaaatccgatgaaaaattcaaagtttcctgaattagcgtatcggtatttctcaatcaaaccgtggaccaacaaagaagggaaggtcgttaaggtcggggccattgagatcctgagttctatgcgtagtttccatagatacatgaccatacgctacttgattgcattgaagggacttgaattggtaaacataatactttgcaagttgtttgagaaggaatttcagtatttcaataagaaaataaattttatattccggcttgttgatctctatcagccttacctctttttctatggaatatttgatgattcaaacacagaaaaattgcgaaaaatggtatcgaagacgggagtcgaaaacgagatgttttatttcgatccaaaggttctcgattgggacgactattttttgaacacacatgttattgggctgcttaagtatgtcttctaataattttagttgtataatctttatcttattttactacaacgagtataaattatgtggacactatcgttctccttaatccgttttcatacggctatgtttcgaaatttggtt

SEQ ID NO: 89168 - protein, 510 aa, Arabidopsis thaliana
  peptide (1)..(510): Ceres Seq. ID no. 12715910
  misc_feature (308)..(510): Pfam Name: Male sterility protein Pfam Description: Male sterility protein
  misc_feature (41)..(510): Homolog of NCBI NO: 16323107 NR Description: AT4g33790/T16L1_280 [Arabidopsis thaliana]
  misc_feature (53)..(510): Homolog of NCBI NO: 25354587 NR Description: male sterility 2-like protein [imported] -
  misc_feature (48)..(510): Homolog of NCBI NO: 7487952 NR Description: male sterility protein 2 homolog T16L1.280 -
  misc_feature (131)..(510): Homolog of NCBI NO: 30689818 NR Description: male sterility 2-related protein [Arabidopsis
  misc_feature (41)..(509): Homolog of NCBI NO: 5020215 NR Description: acyl CoA reductase [Simmondsia chinensis]
  misc_feature (41)..(509): Homolog of NCBI NO: 15242260 NR Description: male sterility 2-like protein (emb|CAA68191.1); id: At5g22500.1, supported by cDNA: gi_14334737, supported by
  misc_feature (43)..(509): Homolog of NCBI NO: 11357157 NR Description: acyl CoA reductase-protein - Arabidopsis thaliana
  misc_feature (41)..(509): Homolog of NCBI NO: 35215152 NR Description: putative fatty acyl coA reductase [Oryza sativa
  misc_feature (41)..(390): Homolog of NCBI NO: 15229993 NR Description: acyl CoA reductase -like protein; protein id:
  misc_feature (434)..(509): Homolog of NCBI NO: 15229993 NR Description: acyl CoA reductase -like protein; protein id:
YSVALFLSLKRIYKHKLCRQKWRSLVFLSTLTTNPYWSLEAAGFLANIFVEKILRVAPNVKKLYLLLRASKGKSATQRFNDEILKKDLFKVLKEKYGPNLNQLTSEKITIVDGDICLEDLGLQDFDLAHEMIHQVDAIVNLAATTKFDERYDVALGINTLGALNVLNFAKRCAKVKILVHVSTAYVCGEKSGLIMETPYRMGETLNGTTGLDINYEKKLVQEKLDQLRVIGAAPETITETMKDLGLRRAKMYGWPNTYVFTKAMGEMMVGTKRENLSLVLLRPSIITSTFKEPFPGWTEGIRTIDSLAVGYGKGKLTCFLCDLDAVSDVMPADMVVNSILVSMAAQAGKQEEIIYHVGSSLRNPMKNSKFPELAYRYFSIKPWTNKEGKVVKVGAIEILSSMRSFHRYMTIRYLIALKGLELVNIILCKLFEKEFQYFNKKINFIFRLVDLYQPYLFFYGIFDDSNTEKLRKMVSKTGVENEMFYFDPKVLDWDDYFLNTHVIGLLKYVF

SEQ ID NO: 89169 - protein, 380 aa, Arabidopsis thaliana; identical to SEQ ID NO: 27534
  peptide (1)..(380): Ceres Seq. ID no. 12715911
  misc_feature (178)..(380): Pfam Name: Male sterility protein Pfam Description: Male sterility protein
  misc_feature (1)..(380): Homolog of NCBI NO: 16323107 NR Description: AT4g33790/T16L1_280 [Arabidopsis thaliana]
  misc_feature (1)..(380): Homolog of NCBI NO: 25354587 NR Description: male sterility 2-like protein [imported] -
  misc_feature (1)..(380): Homolog of NCBI NO: 7487952 NR Description: male sterility protein 2 homolog T16L1.280 -
  misc_feature (1)..(380): Homolog of NCBI NO: 30689818 NR Description: male sterility 2-related protein [Arabidopsis
  misc_feature (1)..(379): Homolog of NCBI NO: 5020215 NR Description: acyl CoA reductase [Simmondsia chinensis]
  misc_feature (1)..(379): Homolog of NCBI NO: 15242260 NR Description: male sterility 2-like protein (emb|CAA68191.1); id: At5g22500.1, supported by cDNA: gi_14334737, supported by
  misc_feature (1)..(379): Homolog of NCBI NO: 11357157 NR Description: acyl CoA reductase-protein - Arabidopsis thaliana
  misc_feature (1)..(379): Homolog of NCBI NO: 35215152 NR Description: putative fatty acyl coA reductase [Oryza sativa
  misc_feature (1)..(260): Homolog of NCBI NO: 15229993 NR Description: acyl CoA reductase -like protein; protein id:
  misc_feature (304)..(379): Homolog of NCBI NO: 15229993 NR Description: acyl CoA reductase -like protein; protein id:

SEQ ID NO: 89170 - protein, 316 aa, Arabidopsis thaliana
  peptide (1)..(316): Ceres Seq. ID no. 12715912
  misc_feature (114)..(316): Pfam Name: Male sterility protein Pfam Description: Male sterility protein
  misc_feature (1)..(316): Homolog of NCBI NO: 16323107 NR Description: AT4g33790/T16L1_280 [Arabidopsis thaliana]
  misc_feature (1)..(316): Homolog of NCBI NO: 25354587 NR Description: male sterility 2-like protein [imported] -
  misc_feature (1)..(316): Homolog of NCBI NO: 7487952 NR Description: male sterility protein 2 homolog T16L1.280 -
  misc_feature (1)..(316): Homolog of NCBI NO: 30689818 NR Description: male sterility 2-related protein [Arabidopsis
  misc_feature (1)..(315): Homolog of NCBI NO: 5020215 NR Description: acyl CoA reductase [Simmondsia chinensis]
  misc_feature (1)..(315): Homolog of NCBI NO: 15242260 NR Description: male sterility 2-like protein (emb|CAA68191.1); id: At5g22500.1, supported by cDNA: gi_14334737, supported by
  misc_feature (1)..(315): Homolog of NCBI NO: 11357157 NR Description: acyl CoA reductase-protein - Arabidopsis thaliana
  misc_feature (1)..(315): Homolog of NCBI NO: 35215152 NR Description: putative fatty acyl coA reductase [Oryza sativa
  misc_feature (1)..(196): Homolog of NCBI NO: 15229993 NR Description: acyl CoA reductase -like protein; protein id:
  misc_feature (240)..(315): Homolog of NCBI NO: 15229993 NR Description: acyl CoA reductase -like protein; protein id:
METPYRMGETLNGTTGLDINYEKKLVQEKLDQLRVIGAAPETITETMKDLGLRRAKMYGWPNTYVFTKAMGEMMVGTKRENLSLVLLRPSIITSTFKEPFPGWTEGIRTIDSLAVGYGKGKLTCFLCDLDAVSDVMPADMVVNSILVSMAAQAGKQEEIIYHVGSSLRNPMKNSKFPELAYRYFSIKPWTNKEGKVVKVGAIEILSSMRSFHRYMTIRYLIALKGLELVNIILCKLFEKEFQYFNKKINFIFRLVDLYQPYLFFYGIFDDSNTEKLRKMVSKTGVENEMFYFDPKVLDWDDYFLNTHVIGLLKYVF

SEQ ID NO: 89171 - DNA, 1055 bp, Arabidopsis thaliana
  misc_feature (1)..(1055): Ceres Seq. ID no. 12715924
  misc_feature: MA Experiment ID: 108434 Result: Down-regulated in Transcription
  misc_feature: MA Experiment 108434 PARAMETER Experiment Name: At_Root_Tips_cDNA_P Parameter: Tissue Value: Root Tips
  misc_feature: MA Experiment ID: 108488 Result: Down-regulated in Transcription
  misc_feature: MA Experiment ID: 108573 Result: Up-regulated in Transcription
  misc_feature: MA Experiment 108573 PARAMETER Experiment Name: At_Drought_cDNA_P Parameter: Timepoint (hr) Value: 6
  misc_feature: MA Experiment 108573 PARAMETER Experiment Name: At_Drought_cDNA_P Parameter: Tissue Value: Aerial
  misc_feature: MA Experiment 108573 PARAMETER Experiment Name: At_Drought_cDNA_P Parameter: Treatment Value: Drought vs. No Drought
  misc_feature: MA Experiment ID: 108668 Result: Up-regulated in Transcription
  misc_feature: MA Experiment 108668 PARAMETER Experiment Name: At_2mM_SA_cDNA_P Parameter: Plant Line Value: WS
  misc_feature: MA Experiment 108668 PARAMETER Experiment Name: At_2mM_SA_cDNA_P Parameter: Timepoint (hr) Value: 6
  misc_feature: MA Experiment 108668 PARAMETER Experiment Name: At_2mM_SA_cDNA_P Parameter: Treatment Value: 2mM SA vs. No Treatment
  misc_feature: MA Experiment ID: 20000069 Result: Up-regulated in Transcription
  misc_feature: MA Experiment 20000069 PARAMETER Experiment Name: At_100uM_ABA_Mutants_cDNA_P Parameter: Plant Line Value: CS23
  misc_feature: MA Experiment 20000069 PARAMETER Experiment Name: At_100uM_ABA_Mutants_cDNA_P Parameter: Timepoint (hr) Value: 6
  misc_feature: MA Experiment 20000069 PARAMETER Experiment Name: At_100uM_ABA_Mutants_cDNA_P Parameter: Tissue Value: Aerial
  misc_feature: MA Experiment 20000069 PARAMETER Experiment Name: At_100uM_ABA_Mutants_cDNA_P Parameter: Treatment Value: 100uM ABA vs. No Treatment
  misc_feature: MA Experiment ID: 20000070 Result: Up-regulated in Transcription
  misc_feature: MA Experiment 20000070 PARAMETER Experiment Name: At_100uM_ABA_Mutants_cDNA_P Parameter: Plant Line Value: CS24
  misc_feature: MA Experiment 20000070 PARAMETER Experiment Name: At_100uM_ABA_Mutants_cDNA_P Parameter: Timepoint (hr) Value: 6
  misc_feature: MA Experiment 20000070 PARAMETER Experiment Name: At_100uM_ABA_Mutants_cDNA_P Parameter: Tissue Value: Aerial
  misc_feature: MA Experiment 20000070 PARAMETER Experiment Name: At_100uM_ABA_Mutants_cDNA_P Parameter: Treatment Value: 100uM ABA vs. No Treatment
  misc_feature: MA Experiment ID: 20000072 Result: Up-regulated in Transcription
  misc_feature: MA Experiment 20000072 PARAMETER Experiment Name: At_100uM_ABA_Mutants_cDNA_P Parameter: Plant Line Value: CS8105
  misc_feature: MA Experiment 20000072 PARAMETER Experiment Name: At_100uM_ABA_Mutants_cDNA_P Parameter: Timepoint (hr) Value: 6
  misc_feature: MA Experiment 20000072 PARAMETER Experiment Name: At_100uM_ABA_Mutants_cDNA_P Parameter: Tissue Value: Aerial
  misc_feature: MA Experiment 20000072 PARAMETER Experiment Name: At_100uM_ABA_Mutants_cDNA_P Parameter: Treatment Value: 100uM ABA vs. No Treatment
  misc_feature: MA Experiment ID: 20000086 Result: Up-regulated in Transcription
  misc_feature: MA Experiment 20000086 PARAMETER Experiment Name: At_100uM_ABA_Mutants_cDNA_P Parameter: Plant Line Value: CS22
  misc_feature: MA Experiment 20000086 PARAMETER Experiment Name: At_100uM_ABA_Mutants_cDNA_P Parameter: Timepoint (hr) Value: 6
  misc_feature: MA Experiment 20000086 PARAMETER Experiment Name: At_100uM_ABA_Mutants_cDNA_P Parameter: Tissue Value: Aerial
  misc_feature: MA Experiment 20000086 PARAMETER Experiment Name: At_100uM_ABA_Mutants_cDNA_P Parameter: Treatment Value: 100uM ABA vs. No Treatment
  misc_feature: MA Experiment ID: 20000087 Result: Up-regulated in Transcription
  misc_feature: MA Experiment 20000087 PARAMETER Experiment Name: At_100uM_ABA_Mutants_cDNA_P Parameter: Plant Line Value: WS
  misc_feature: MA Experiment 20000087 PARAMETER Experiment Name: At_100uM_ABA_Mutants_cDNA_P Parameter: Timepoint (hr) Value: 6
  misc_feature: MA Experiment 20000087 PARAMETER Experiment Name: At_100uM_ABA_Mutants_cDNA_P Parameter: Tissue Value: Aerial
  misc_feature: MA Experiment 20000087 PARAMETER Experiment Name: At_100uM_ABA_Mutants_cDNA_P Parameter: Treatment Value: 100uM ABA vs. No Treatment
  misc_feature: MA Experiment ID: 20000090 Result: Up-regulated in Transcription
  misc_feature: MA Experiment ID: 20000117 Result: Up-regulated in Transcription
  misc_feature: MA Experiment 20000117 PARAMETER Experiment Name: At_100uM_ABA_Mutants_cDNA_P Parameter: Plant Line Value: Columbia
  misc_feature: MA Experiment 20000117 PARAMETER Experiment Name: At_100uM_ABA_Mutants_cDNA_P Parameter: Timepoint (hr) Value: 6
  misc_feature: MA Experiment 20000117 PARAMETER Experiment Name: At_100uM_ABA_Mutants_cDNA_P Parameter: Tissue Value: Aerial
  misc_feature: MA Experiment 20000117 PARAMETER Experiment Name: At_100uM_ABA_Mutants_cDNA_P Parameter: Treatment Value: 100uM ABA vs. No Treatment
  misc_feature: MA Experiment ID: 20000182 Result: Up-regulated in Transcription
  misc_feature: MA Experiment 20000182 PARAMETER Experiment Name: At_2mM_SA_P Parameter: Age (day) Value: 14
  misc_feature: MA Experiment 20000182 PARAMETER Experiment Name: At_2mM_SA_P Parameter: Organism Value: A. thaliana
  misc_feature: MA Experiment 20000182 PARAMETER Experiment Name: At_2mM_SA_P Parameter: Plant Line Value: WS
  misc_feature: MA Experiment 20000182 PARAMETER Experiment Name: At_2mM_SA_P Parameter: Timepoint (hr) Value: 6
  misc_feature: MA Experiment 20000182 PARAMETER Experiment Name: At_2mM_SA_P Parameter: Tissue Value: Aerial
  misc_feature: MA Experiment 20000182 PARAMETER Experiment Name: At_2mM_SA_P Parameter: Treatment Value: 2mM SA vs. No Treatment
  misc_feature: MA Experiment ID: 20000227 Result: Down-regulated in Transcription
  misc_feature: MA Experiment 20000227 PARAMETER Experiment Name: At_Root-Tips-vs-Tops_P Parameter: Tissue Value: Root Tips vs. Root Tops
  misc_feature: MA Experiment ID: 20000234 Result: Down-regulated in Transcription
  misc_feature: MA Experiment 20000234 PARAMETER Experiment Name: At_Siliques_P Parameter: Age (day) Value: 21
  misc_feature: MA Experiment 20000234 PARAMETER Experiment Name: At_Siliques_P Parameter: Organism Value: A. thaliana
  misc_feature: MA Experiment 20000234 PARAMETER Experiment Name: At_Siliques_P Parameter: Plant Line Value: WS
  misc_feature: MA Experiment 20000234 PARAMETER Experiment Name: At_Siliques_P Parameter: Tissue Value: Less Than 5mm Siliques vs. Whole Plant
  misc_feature: MA Experiment ID: 20000235 Result: Down-regulated in Transcription
  misc_feature: MA Experiment 20000235 PARAMETER Experiment Name: At_Siliques_P Parameter: Age (day) Value: 21
  misc_feature: MA Experiment 20000235 PARAMETER Experiment Name: At_Siliques_P Parameter: Organism Value: A. thaliana
  misc_feature: MA Experiment 20000235 PARAMETER Experiment Name: At_Siliques_P Parameter: Plant Line Value: WS
  misc_feature: MA Experiment 20000235 PARAMETER Experiment Name: At_Siliques_P Parameter: Tissue Value: 5-10mm Siliques vs. Whole Plant
  misc_feature: MA Experiment ID: 20000265 Result: Down-regulated in Transcription
  misc_feature: MA Experiment 20000265 PARAMETER Experiment Name: At_Open_Flower_P Parameter: Age (day) Value: 21
  misc_feature: MA Experiment 20000265 PARAMETER Experiment Name: At_Open_Flower_P Parameter: Plant Line Value: WS
  misc_feature: MA Experiment 20000265 PARAMETER Experiment Name: At_Open_Flower_P Parameter: Tissue Value: Closed Flower vs. Whole Plant
  misc_feature: MA Experiment ID: 20000438 Result: Down-regulated in Transcription
  misc_feature: MA Experiment 20000438 PARAMETER Experiment Name: At_Shoots__P Parameter: Age (day) Value: 14
  misc_feature: MA Experiment 20000438 PARAMETER Experiment Name: At_Shoots__P Parameter: Tissue Value: Shoots vs. Whole Plant
  misc_feature: MA Experiment ID: 20000794 Result: Up-regulated in Transcription
  misc_feature: MA Experiment 20000794 PARAMETER Experiment Name: At_Petals_P Parameter: Age (day) Value: 23-25 days
  misc_feature: MA Experiment 20000794 PARAMETER Experiment Name: At_Petals_P Parameter: Plant Line Value: WS
  misc_feature: MA Experiment 20000794 PARAMETER Experiment Name: At_Petals_P Parameter: Tissue Value: Petals vs. Whole plant
  misc_feature: MA Experiment ID: 20001911 Result: Up-regulated in Transcription
  misc_feature: MA Experiment 20001911 PARAMETER Experiment Name: At_Drought_Reproduction_P Parameter: Age (day) Value: 40
  misc_feature: MA Experiment 20001911 PARAMETER Experiment Name: At_Drought_Reproduction_P Parameter: Organism Value: A. thaliana
  misc_feature: MA Experiment 20001911 PARAMETER Experiment Name: At_Drought_Reproduction_P Parameter: Plant Line Value: WS
  misc_feature: MA Experiment 20001911 PARAMETER Experiment Name: At_Drought_Reproduction_P Parameter: Timepoint (day) Value: 10
  misc_feature: MA Experiment 20001911 PARAMETER Experiment Name: At_Drought_Reproduction_P Parameter: Tissue Value: Flowers
  misc_feature: MA Experiment 20001911 PARAMETER Experiment Name: At_Drought_Reproduction_P Parameter: Treatment Value: Drought vs. No Drought
aaacactagtataaaaaattgaacccgttaaccggcgacccgaaacaatgacccggtccgtcagtttccctctcttcctcttcgccgttgtactctccctctcttcttctctcctcgccgacgatcccaaaccaatccgccgtgaggtctacgaaggaggtaagatatacgacatcagccatcgttacacgccggagattccagcttgggaatcttcggaaggattgggaaagacgttcctgcgattagccgcgagtatgaagaatggatcattcgctaacgtatcggagatgaaactatctgttcactctggaactcacgtggatgctccaggtcacttttgggataattattacgatgctggttttgatactgattcgcttgatctccaagtcctaaatggtcctgctttgttggttgatgttccgagagataagaacattactgctgaggtaatggaatcacttcatatacaaagaggagttcgtcgtgtgctctttagaacatccaacaccgacaagcggcttatgtttaagaaagagtttgattcaagctttgctgggttcatgaccgatggggctaaatggttggttgagaatacagacatcaaacttattgggcttgattatctttcatttgctgcttttgaggaatcacctgcaacacacagggttatacttaaaggacgggatataatcccagtggaagcgctgaagctggatggtgtggaggtaggaacatactcgcttcattgcttaccgctgagattagttggagcggaaggagcaccgacaagatgcattctcatcaagtgattcagttcttcttcttcttcttctgtgtaagttgttcagtataccaaactgataatgaataatatgcttcttactttacaagatctcagaacccatgaagcagatgtgatgattcagttgtaaaaggaagcatacctttataaacgtgtgaatgtattatgtatgacagtatatttgtaattctgaaggacatgataataaacctagactgaaacaaacgaataatataaccacttgcag

SEQ ID NO: 89172 - protein, 255 aa, Arabidopsis thaliana; identical to SEQ ID NO: 28120
  peptide (1)..(255): Ceres Seq. ID no. 12715925
  misc_feature (40)..(241): Pfam Name: Putative cyclase Pfam Description: Putative cyclase
  misc_feature (1)..(255): Homolog of NCBI NO: 18418393 NR Description: putative protein; protein id: At4g34180.1, by cDNA: 8686., supported by cDNA: gi_14335097, supported by gi_16226602 [Arabidopsis thaliana] >gi|14335098|gb|AAK59828.1|
  misc_feature (1)..(214): Homolog of NCBI NO: 7486287 NR Description: hypothetical protein F28A23.60 - Arabidopsis >gi|2911044|emb|CAA17554.1| putative protein [Arabidopsis >gi|7270368|emb|CAB80135.1| putative protein [Arabidopsis
  misc_feature (26)..(255): Homolog of NCBI NO: 15219416 NR Description: hypothetical protein; protein id: At1g44542.1 thaliana] >gi|13876507|gb|AAK43483.1|AC084807_8 hypothetical
  misc_feature (25)..(254): Homolog of NCBI NO: 18418598 NR Description: putative protein; protein id: At4g35220.1, by cDNA: 1368., supported by cDNA: gi_13937203, supported by gi_18491126 [Arabidopsis thaliana]
  misc_feature (21)..(255): Homolog of NCBI NO: 35215089 NR Description: hypothetical protein [Oryza sativa (japonica
  misc_feature (25)..(133): Homolog of NCBI NO: 7486023 NR Description: hypothetical protein F23E12.220 - Arabidopsis >gi|3080428|emb|CAA18747.1| putative protein [Arabidopsis >gi|7270474|emb|CAB80239.1| putative protein [Arabidopsis
  misc_feature (41)..(255): Homolog of NCBI NO: 23016903 NR Description: hypothetical protein [Magnetospirillum
  misc_feature (40)..(253): Homolog of NCBI NO: 16330650 NR Description: hypothetical protein [Synechocystis sp. PCC 6803]
  misc_feature (40)..(253): Homolog of NCBI NO: 23056289 NR Description: hypothetical protein [Geobacter metallireducens]
  misc_feature (39)..(253): Homolog of NCBI NO: 39998438 NR Description: cyclase, putative [Geobacter sulfurreducens PCA]

SEQ ID NO: 89173 - protein, 185 aa, Arabidopsis thaliana; identical to SEQ ID NO: 28121
  peptide (1)..(185): Ceres Seq. ID no. 12715926
  misc_feature (1)..(171): Pfam Name: Putative cyclase Pfam Description: Putative cyclase
  misc_feature (1)..(185): Homolog of NCBI NO: 18418393 NR Description: putative protein; protein id: At4g34180.1, by cDNA: 8686., supported by cDNA: gi_14335097, supported by gi_16226602 [Arabidopsis thaliana] >gi|14335098|gb|AAK59828.1|
  misc_feature (1)..(144): Homolog of NCBI NO: 7486287 NR Description: hypothetical protein F28A23.60 - Arabidopsis >gi|2911044|emb|CAA17554.1| putative protein [Arabidopsis >gi|7270368|emb|CAB80135.1| putative protein [Arabidopsis
  misc_feature (1)..(185): Homolog of NCBI NO: 15219416 NR Description: hypothetical protein; protein id: At1g44542.1 thaliana] >gi|13876507|gb|AAK43483.1|AC084807_8 hypothetical
  misc_feature (1)..(184): Homolog of NCBI NO: 18418598 NR Description: putative protein; protein id: At4g35220.1, by cDNA: 1368., supported by cDNA: gi_13937203, supported by gi_18491126 [Arabidopsis thaliana]
  misc_feature (1)..(185): Homolog of NCBI NO: 35215089 NR Description: hypothetical protein [Oryza sativa (japonica
  misc_feature (1)..(63): Homolog of NCBI NO: 7486023 NR Description: hypothetical protein F23E12.220 - Arabidopsis >gi|3080428|emb|CAA18747.1| putative protein [Arabidopsis >gi|7270474|emb|CAB80239.1| putative protein [Arabidopsis
  misc_feature (1)..(185): Homolog of NCBI NO: 23016903 NR Description: hypothetical protein [Magnetospirillum
  misc_feature (1)..(183): Homolog of NCBI NO: 16330650 NR Description: hypothetical protein [Synechocystis sp. PCC 6803]
  misc_feature (1)..(183): Homolog of NCBI NO: 23056289 NR Description: hypothetical protein [Geobacter metallireducens]
  misc_feature (1)..(183): Homolog of NCBI NO: 39998438 NR Description: cyclase, putative [Geobacter sulfurreducens PCA]

SEQ ID NO: 89174 - protein, 174 aa, Arabidopsis thaliana; identical to SEQ ID NO: 28122
  peptide (1)..(174): Ceres Seq. ID no. 12715927
  misc_feature (1)..(160): Pfam Name: Putative cyclase Pfam Description: Putative cyclase
  misc_feature (1)..(174): Homolog of NCBI NO: 18418393 NR Description: putative protein; protein id: At4g34180.1, by cDNA: 8686., supported by cDNA: gi_14335097, supported by gi_16226602 [Arabidopsis thaliana] >gi|14335098|gb|AAK59828.1|
  misc_feature (1)..(133): Homolog of NCBI NO: 7486287 NR Description: hypothetical protein F28A23.60 - Arabidopsis >gi|2911044|emb|CAA17554.1| putative protein [Arabidopsis >gi|7270368|emb|CAB80135.1| putative protein [Arabidopsis
  misc_feature (1)..(174): Homolog of NCBI NO: 15219416 NR Description: hypothetical protein; protein id: At1g44542.1 thaliana] >gi|13876507|gb|AAK43483.1|AC084807_8 hypothetical
  misc_feature (1)..(173): Homolog of NCBI NO: 18418598 NR Description: putative protein; protein id: At4g35220.1, by cDNA: 1368., supported by cDNA: gi_13937203, supported by gi_18491126 [Arabidopsis thaliana]
  misc_feature (1)..(174): Homolog of NCBI NO: 35215089 NR Description: hypothetical protein [Oryza sativa (japonica
  misc_feature (1)..(52): Homolog of NCBI NO: 7486023 NR Description: hypothetical protein F23E12.220 - Arabidopsis >gi|3080428|emb|CAA18747.1| putative protein [Arabidopsis >gi|7270474|emb|CAB80239.1| putative protein [Arabidopsis
  misc_feature (1)..(174): Homolog of NCBI NO: 23016903 NR Description: hypothetical protein [Magnetospirillum
  misc_feature (1)..(172): Homolog of NCBI NO: 16330650 NR Description: hypothetical protein [Synechocystis sp. PCC 6803]
  misc_feature (1)..(172): Homolog of NCBI NO: 23056289 NR Description: hypothetical protein [Geobacter metallireducens]
  misc_feature (1)..(172): Homolog of NCBI NO: 39998438 NR Description: cyclase, putative [Geobacter sulfurreducens PCA]

SEQ ID NO: 89175 - DNA, 1075 bp, Arabidopsis thaliana
  misc_feature (1)..(1075): Ceres Seq. ID no. 12715936
  misc_feature: MA Experiment ID: 20000224 Result: Up-regulated in Transcription
aagtgacatcgtcggaggagaaaaggtagtgccaatattagccggcgattcagatggagacggtggtcgataaagatgttctgaagtcttccggggctgagcttcttcccgacggacgtcgaggtttacgcatccatgactgggagatcgaaaccctccgcggcacgattctcacttctctcgctgtcgaagagtgggaaaaaaagcttaagacatctcacttacctgaaatggtttttggcgagaatgcattagtccttaaacacttaggtagcaacactaagattcattttaatgcgtttgacgcactagctggttggaagcaggaagggcttccacctgttgaagttcctgctgcagcacaatggaaattcaggagcaagccgtctcagcaggtgatactagattatgattacacgtttacaacgccatactgtggaagtgaagtagttgagaaagacaaagaaacggttgaggcaaaagctaatccaaagggggaagctactcttcagtgggagaactgtgaagatcagattgatttggctgctctctcacttaaagaacctattctcttctatgatgaggtagttttgtatgaagatgaactggctgacaatggagtgtcacttctgactgtgaaagtgagagtcatgccaagctcatggttcctcctcttgcgattttggctgagagttgatggtgtgcttatgagattgagagagacgagaatgcattataggtttggcgaagatgaggcaccaactgttcttcgtgaaaactgttggagagaagcaacatttcagtctctatctgcgaaagggtatccagttgacttagcagtctggagcgacccgagctccatcagtcagaggcttccagtgattaagcatacgacacagaaactgaagatccctagtaaagtttaagctgtttataaagttgcaaattatatctaaaagagcgtaccgatgagctttctttacagccaaacaaactacttactattgaatttgttaatgtaaggagttactccactgacttattgtggtggtttcatatgaacattcaaaccctt

SEQ ID NO: 89176 - protein, 290 aa, Arabidopsis thaliana; identical to SEQ ID NO: 80566
  peptide (1)..(290): Ceres Seq. ID no. 12715937
  misc_feature (60)..(254): Pfam Name: TIP41-like family Pfam Description: TIP41-like family
  misc_feature (1)..(290): Homolog of NCBI NO: 22329154 NR Description: putative protein; protein id: At4g34270.1, by cDNA: gi_18377790, supported by cDNA: gi_20259224 [Arabidopsis >gi|18377791|gb|AAL67045.1| unknown protein [Arabidopsis
  misc_feature (60)..(290): Homolog of NCBI NO: 7485322 NR Description: hypothetical protein F10M10.40 - Arabidopsis >gi|4455172|emb|CAB36704.1| putative protein [Arabidopsis >gi|7270377|emb|CAB80144.1| putative protein [Arabidopsis
  misc_feature (10)..(288): Homolog of NCBI NO: 14488361 NR Description: unknown protein [Oryza sativa (japonica
  misc_feature (30)..(290): Homolog of NCBI NO: 23097250 NR Description: similar to CG9578 gene product; yeast YPR037W and
  misc_feature (30)..(290): Homolog of NCBI NO: 21704010 NR Description: similar to CG9578 gene product [Mus musculus] similar to CG9578 gene product [Mus musculus]
  misc_feature (30)..(290): Homolog of NCBI NO: 34880821 NR Description: similar to CG9578-like [Rattus norvegicus]
  misc_feature (30)..(287): Homolog of NCBI NO: 34784442 NR Description: Unknown (protein for MGC:66327) [Danio rerio]
  misc_feature (133)..(284): Homolog of NCBI NO: 40739133 NR Description: hypothetical protein AN5814.2 [Aspergillus
  misc_feature (15)..(117): Homolog of NCBI NO: 40739133 NR Description: hypothetical protein AN5814.2 [Aspergillus
  misc_feature (9)..(278): Homolog of NCBI NO: 6325297 NR Description: SDF1 the first obserwed null phenotype was DeFiciency; Tip41p [Saccharomyces cerevisiae]

SEQ ID NO: 89177 - protein, 231 aa, Arabidopsis thaliana; identical to SEQ ID NO: 80567
  peptide (1)..(231): Ceres Seq. ID no. 12715938
  misc_feature (1)..(195): Pfam Name: TIP41-like family Pfam Description: TIP41-like family
  misc_feature (1)..(231): Homolog of NCBI NO: 22329154 NR Description: putative protein; protein id: At4g34270.1, by cDNA: gi_18377790, supported by cDNA: gi_20259224 [Arabidopsis >gi|18377791|gb|AAL67045.1| unknown protein [Arabidopsis
  misc_feature (1)..(231): Homolog of NCBI NO: 7485322 NR Description: hypothetical protein F10M10.40 - Arabidopsis >gi|4455172|emb|CAB36704.1| putative protein [Arabidopsis >gi|7270377|emb|CAB80144.1| putative protein [Arabidopsis
  misc_feature (1)..(229): Homolog of NCBI NO: 14488361 NR Description: unknown protein [Oryza sativa (japonica
  misc_feature (1)..(231): Homolog of NCBI NO: 23097250 NR Description: similar to CG9578 gene product; yeast YPR037W and
  misc_feature (1)..(231): Homolog of NCBI NO: 21704010 NR Description: similar to CG9578 gene product [Mus musculus] similar to CG9578 gene product [Mus musculus]
  misc_feature (1)..(231): Homolog of NCBI NO: 34880821 NR Description: similar to CG9578-like [Rattus norvegicus]
  misc_feature (1)..(228): Homolog of NCBI NO: 34784442 NR Description: Unknown (protein for MGC:66327) [Danio rerio]
  misc_feature (74)..(225): Homolog of NCBI NO: 40739133 NR Description: hypothetical protein AN5814.2 [Aspergillus
  misc_feature (1)..(58): Homolog of NCBI NO: 40739133 NR Description: hypothetical protein AN5814.2 [Aspergillus
  misc_feature (1)..(219): Homolog of NCBI NO: 6325297 NR Description: SDF1 the first obserwed null phenotype was DeFiciency; Tip41p [Saccharomyces cerevisiae]

SEQ ID NO: 89178 - DNA, 708 bp, Arabidopsis thaliana
  misc_feature (1)..(708): Ceres Seq. ID no. 12715939
  misc_feature: MA Experiment ID: 20000171 Result: Up-regulated in Transcription
  misc_feature: MA Experiment 20000171 PARAMETER Experiment Name: At_42deg_Heat_P Parameter: Age (day) Value: 14
  misc_feature: MA Experiment 20000171 PARAMETER Experiment Name: At_42deg_Heat_P Parameter: Organism Value: A. thaliana
  misc_feature: MA Experiment 20000171 PARAMETER Experiment Name: At_42deg_Heat_P Parameter: Plant Line Value: WS
  misc_feature: MA Experiment 20000171 PARAMETER Experiment Name: At_42deg_Heat_P Parameter: Temperature (deg C) Value: 42 vs. 22
  misc_feature: MA Experiment 20000171 PARAMETER Experiment Name: At_42deg_Heat_P Parameter: Timepoint (hr) Value: 1
  misc_feature: MA Experiment 20000171 PARAMETER Experiment Name: At_42deg_Heat_P Parameter: Tissue Value: Aerial
  misc_feature: MA Experiment ID: 20000173 Result: Up-regulated in Transcription
  misc_feature: MA Experiment 20000173 PARAMETER Experiment Name: At_42deg_Heat_P Parameter: Age (day) Value: 14
  misc_feature: MA Experiment 20000173 PARAMETER Experiment Name: At_42deg_Heat_P Parameter: Organism Value: A. thaliana
  misc_feature: MA Experiment 20000173 PARAMETER Experiment Name: At_42deg_Heat_P Parameter: Plant Line Value: WS
  misc_feature: MA Experiment 20000173 PARAMETER Experiment Name: At_42deg_Heat_P Parameter: Temperature (deg C) Value: 42 vs. 22
  misc_feature: MA Experiment 20000173 PARAMETER Experiment Name: At_42deg_Heat_P Parameter: Timepoint (hr) Value: 6
  misc_feature: MA Experiment 20000173 PARAMETER Experiment Name: At_42deg_Heat_P Parameter: Tissue Value: Aerial
  misc_feature: MA Experiment ID: 20000235 Result: Down-regulated in Transcription
  misc_feature: MA Experiment 20000235 PARAMETER Experiment Name: At_Siliques_P Parameter: Age (day) Value: 21
  misc_feature: MA Experiment 20000235 PARAMETER Experiment Name: At_Siliques_P Parameter: Organism Value: A. thaliana
  misc_feature: MA Experiment 20000235 PARAMETER Experiment Name: At_Siliques_P Parameter: Plant Line Value: WS
  misc_feature: MA Experiment 20000235 PARAMETER Experiment Name: At_Siliques_P Parameter: Tissue Value: 5-10mm Siliques vs. Whole Plant
  misc_feature: MA Experiment ID: 20000438 Result: Down-regulated in Transcription
  misc_feature: MA Experiment 20000438 PARAMETER Experiment Name: At_Shoots__P Parameter: Age (day) Value: 14
  misc_feature: MA Experiment 20000438 PARAMETER Experiment Name: At_Shoots__P Parameter: Tissue Value: Shoots vs. Whole Plant
  misc_feature: MA Experiment ID: 20000439 Result: Down-regulated in Transcription
  misc_feature: MA Experiment 20000439 PARAMETER Experiment Name: At_Roots__P Parameter: Age (day) Value: 14 vs. 21
  misc_feature: MA Experiment 20000439 PARAMETER Experiment Name: At_Roots__P Parameter: Organism Value: A. thaliana
  misc_feature: MA Experiment 20000439 PARAMETER Experiment Name: At_Roots__P Parameter: Tissue Value: Roots vs. Whole Plant
  misc_feature: MA Experiment ID: 20000794 Result: Down-regulated in Transcription
  misc_feature: MA Experiment 20000794 PARAMETER Experiment Name: At_Petals_P Parameter: Age (day) Value: 23-25 days
  misc_feature: MA Experiment 20000794 PARAMETER Experiment Name: At_Petals_P Parameter: Plant Line Value: WS
  misc_feature: MA Experiment 20000794 PARAMETER Experiment Name: At_Petals_P Parameter: Tissue Value: Petals vs. Whole plant
ctgacttcgccgaatgtgtgtcgatctccggcgaagtaataagtcgtaataaccctaaaaatcttgccctctttttcgccgccggctaaagctatgaaggtttttaatcttgaccgtggaaacactctctctgtttccctcttctccggtgtcaccaactccaaggagctcttgaattcaatgcttgacggaagtctgaagctggaggtctcatttctcaatgcatcacttattccagacatttttcctctattggctgctgctcagaaagcacttatctccaaatcacgcgattccttatcaaccagaactcttcattctgagcttgtctacaattactcaggatctaagcacaatcattgaaacgatgtgggatttctgagaacactacttacattctagctgcccggttcaatgcttctcccgttgagatggaggaggtggcgaaattgatcaacgggaaggagattgatttggaggaattgaagacacatgcaaatcaagccaatatactaaagcattacaagataactagccaagagctcggaatttcctctctgggagatgccattgtttgtcgaatagctgcacgcgatgctttgtaggagtagacatcttttctttatgtcttttgtcaccaattatagttttctcctttataaacaacgttgacacttacgtttataattcagaccaatgttgggtttc

SEQ ID NO: 89179 - protein, 89 aa, Arabidopsis thaliana
  peptide (1)..(89): Ceres Seq. ID no. 12715940
  misc_feature (1)..(87): Homolog of NCBI NO: 38454120 NR Description: At4g34412 [Arabidopsis thaliana]
  misc_feature (1)..(87): Homolog of NCBI NO: 34895710 NR Description: P0019D06.12 [Oryza sativa (japonica
  misc_feature (1)..(87): Homolog of NCBI NO: 22329156 NR Description: hypothetical protein; protein id: At4g34412.1
  misc_feature (12)..(83): Homolog of NCBI NO: 28849893 NR Description: CGI-121 protein [Mus musculus] RIKEN cDNA 1810034M08 [Mus musculus] >gi|20071790|gb|AAH27162.1|
  misc_feature (12)..(83): Homolog of NCBI NO: 27712192 NR Description: similar to RIKEN cDNA 1810034M08 [Mus musculus]
  misc_feature (12)..(83): Homolog of NCBI NO: 7705590 NR Description: CGI-121 protein [Homo sapiens]
  misc_feature (12)..(83): Homolog of NCBI NO: 12001980 NR Description: My019 protein [Homo sapiens]
  misc_feature (16)..(83): Homolog of NCBI NO: 39794363 NR Description: Unknown (protein for MGC:75657) [Silurana
  misc_feature (12)..(83): Homolog of NCBI NO: 28175286 NR Description: Unknown (protein for MGC:53277) [Xenopus laevis]
MKVFNLDRGNTLSVSLFSGVTNSKELLNSMLDGSLKLEVSFLNASLIPDIFPLLAAAQKALISKSRDSLSTRTLHSELVYNYSGSKHNH

SEQ ID NO: 89180 - protein, 60 aa, Arabidopsis thaliana
  peptide (1)..(60): Ceres Seq. ID no. 12715941
  misc_feature (1)..(58): Homolog of NCBI NO: 38454120 NR Description: At4g34412 [Arabidopsis thaliana]
  misc_feature (1)..(58): Homolog of NCBI NO: 34895710 NR Description: P0019D06.12 [Oryza sativa (japonica
  misc_feature (1)..(58): Homolog of NCBI NO: 22329156 NR Description: hypothetical protein; protein id: At4g34412.1
  misc_feature (1)..(54): Homolog of NCBI NO: 28849893 NR Description: CGI-121 protein [Mus musculus] RIKEN cDNA 1810034M08 [Mus musculus] >gi|20071790|gb|AAH27162.1|
  misc_feature (1)..(54): Homolog of NCBI NO: 27712192 NR Description: similar to RIKEN cDNA 1810034M08 [Mus musculus]
  misc_feature (1)..(54): Homolog of NCBI NO: 7705590 NR Description: CGI-121 protein [Homo sapiens]
  misc_feature (1)..(54): Homolog of NCBI NO: 12001980 NR Description: My019 protein [Homo sapiens]
  misc_feature (1)..(54): Homolog of NCBI NO: 39794363 NR Description: Unknown (protein for MGC:75657) [Silurana
  misc_feature (1)..(54): Homolog of NCBI NO: 28175286 NR Description: Unknown (protein for MGC:53277) [Xenopus laevis]
MLDGSLKLEVSFLNASLIPDIFPLLAAAQKALISKSRDSLSTRTLHSELVYNYSGSKHNH

SEQ ID NO: 89181 - protein, 57 aa, Arabidopsis thaliana
  peptide (1)..(57): Ceres Seq. ID no. 12715942
  misc_feature (1)..(57): Homolog of NCBI NO: 38454120 NR Description: At4g34412 [Arabidopsis thaliana]
  misc_feature (1)..(57): Homolog of NCBI NO: 34895710 NR Description: P0019D06.12 [Oryza sativa (japonica
  misc_feature (25)..(57): Homolog of NCBI NO: 22329156 NR Description: hypothetical protein; protein id: At4g34412.1
  misc_feature (1)..(57): Homolog of NCBI NO: 28849893 NR Description: CGI-121 protein [Mus musculus] RIKEN cDNA 1810034M08 [Mus musculus] >gi|20071790|gb|AAH27162.1|
  misc_feature (1)..(57): Homolog of NCBI NO: 27712192 NR Description: similar to RIKEN cDNA 1810034M08 [Mus musculus]
  misc_feature (1)..(57): Homolog of NCBI NO: 7705590 NR Description: CGI-121 protein [Homo sapiens]
  misc_feature (1)..(57): Homolog of NCBI NO: 12001980 NR Description: My019 protein [Homo sapiens]
  misc_feature (1)..(57): Homolog of NCBI NO: 39794363 NR Description: Unknown (protein for MGC:75657) [Silurana
  misc_feature (1)..(57): Homolog of NCBI NO: 28175286 NR Description: Unknown (protein for MGC:53277) [Xenopus laevis]
  misc_feature (23)..(57): Homolog of NCBI NO: 33327290 NR Description: hypothetical protein [Phaseolus vulgaris]
MEEVAKLINGKEIDLEELKTHANQANILKHYKITSQELGISSLGDAIVCRIAARDAL

SEQ ID NO: 89182 - DNA, 1204 bp, Arabidopsis thaliana
  misc_feature (1)..(1204): Ceres Seq. ID no. 12715964
  misc_feature: MA Experiment ID: 108462 Result: Up-regulated in Transcription
  misc_feature: MA Experiment 108462 PARAMETER Experiment Name: At_Germinating_Seeds_cDNA_P Parameter: Age (day) Value: 2 vs. 0
  misc_feature: MA Experiment 108462 PARAMETER Experiment Name: At_Germinating_Seeds_cDNA_P Parameter: Tissue Value: Germinating Seeds
  misc_feature: MA Experiment ID: 108463 Result: Up-regulated in Transcription
  misc_feature: MA Experiment 108463 PARAMETER Experiment Name: At_Germinating_Seeds_cDNA_P Parameter: Age (day) Value: 3 vs. 0
  misc_feature: MA Experiment 108463 PARAMETER Experiment Name: At_Germinating_Seeds_cDNA_P Parameter: Tissue Value: Germinating Seeds
  misc_feature: MA Experiment ID: 108464 Result: Up-regulated in Transcription
  misc_feature: MA Experiment 108464 PARAMETER Experiment Name: At_Germinating_Seeds_cDNA_P Parameter: Age (day) Value: 4 vs. 0
  misc_feature: MA Experiment 108464 PARAMETER Experiment Name: At_Germinating_Seeds_cDNA_P Parameter: Tissue Value: Germinating Seeds
  misc_feature: MA Experiment ID: 108579 Result: Up-regulated in Transcription
  misc_feature: MA Experiment 108579 PARAMETER Experiment Name: At_4deg_Cold_cDNA_P Parameter: Temperature (deg C) Value: 4 vs. 22
  misc_feature: MA Experiment 108579 PARAMETER Experiment Name: At_4deg_Cold_cDNA_P Parameter: Timepoint (hr) Value: 6
  misc_feature: MA Experiment 108579 PARAMETER Experiment Name: At_4deg_Cold_cDNA_P Parameter: Tissue Value: Aerial
  misc_feature: MA Experiment ID: 20000069 Result: Down-regulated in Transcription
  misc_feature: MA Experiment 20000069 PARAMETER Experiment Name: At_100uM_ABA_Mutants_cDNA_P Parameter: Plant Line Value: CS23
  misc_feature: MA Experiment 20000069 PARAMETER Experiment Name: At_100uM_ABA_Mutants_cDNA_P Parameter: Timepoint (hr) Value: 6
  misc_feature: MA Experiment 20000069 PARAMETER Experiment Name: At_100uM_ABA_Mutants_cDNA_P Parameter: Tissue Value: Aerial
  misc_feature: MA Experiment 20000069 PARAMETER Experiment Name: At_100uM_ABA_Mutants_cDNA_P Parameter: Treatment Value: 100uM ABA vs. No Treatment
  misc_feature: MA Experiment ID: 20000072 Result: Down-regulated in Transcription
  misc_feature: MA Experiment 20000072 PARAMETER Experiment Name: At_100uM_ABA_Mutants_cDNA_P Parameter: Plant Line Value: CS8105
  misc_feature: MA Experiment 20000072 PARAMETER Experiment Name: At_100uM_ABA_Mutants_cDNA_P Parameter: Timepoint (hr) Value: 6
  misc_feature: MA Experiment 20000072 PARAMETER Experiment Name: At_100uM_ABA_Mutants_cDNA_P Parameter: Tissue Value: Aerial
  misc_feature: MA Experiment 20000072 PARAMETER Experiment Name: At_100uM_ABA_Mutants_cDNA_P Parameter: Treatment Value: 100uM ABA vs. No Treatment
  misc_feature: MA Experiment ID: 20000087 Result: Down-regulated in Transcription
  misc_feature: MA Experiment 20000087 PARAMETER Experiment Name: At_100uM_ABA_Mutants_cDNA_P Parameter: Plant Line Value: WS
  misc_feature: MA Experiment 20000087 PARAMETER Experiment Name: At_100uM_ABA_Mutants_cDNA_P Parameter: Timepoint (hr) Value: 6
  misc_feature: MA Experiment 20000087 PARAMETER Experiment Name: At_100uM_ABA_Mutants_cDNA_P Parameter: Tissue Value: Aerial
  misc_feature: MA Experiment 20000087 PARAMETER Experiment Name: At_100uM_ABA_Mutants_cDNA_P Parameter: Treatment Value: 100uM ABA vs. No Treatment
  misc_feature: MA Experiment ID: 20000184 Result: Up-regulated in Transcription
  misc_feature: MA Experiment 20000184 PARAMETER Experiment Name: At_Shoots__P Parameter: Age (day) Value: 7
  misc_feature: MA Experiment 20000184 PARAMETER Experiment Name: At_Shoots__P Parameter: Tissue Value: Shoots vs. Whole Plant
  misc_feature: MA Experiment ID: 20000235 Result: Up-regulated in Transcription
  misc_feature: MA Experiment 20000235 PARAMETER Experiment Name: At_Siliques_P Parameter: Age (day) Value: 21
  misc_feature: MA Experiment 20000235 PARAMETER Experiment Name: At_Siliques_P Parameter: Organism Value: A. thaliana
  misc_feature: MA Experiment 20000235 PARAMETER Experiment Name: At_Siliques_P Parameter: Plant Line Value: WS
  misc_feature: MA Experiment 20000235 PARAMETER Experiment Name: At_Siliques_P Parameter: Tissue Value: 5-10mm Siliques vs. Whole Plant
  misc_feature: MA Experiment ID: 20000264 Result: Up-regulated in Transcription
  misc_feature: MA Experiment 20000264 PARAMETER Experiment Name: At_Open_Flower_P Parameter: Age (day) Value: 21
  misc_feature: MA Experiment 20000264 PARAMETER Experiment Name: At_Open_Flower_P Parameter: Plant Line Value: WS
  misc_feature: MA Experiment 20000264 PARAMETER Experiment Name: At_Open_Flower_P Parameter: Tissue Value: Open Flower vs. Whole Plant
  misc_feature: MA Experiment ID: 20000267 Result: Up-regulated in Transcription
  misc_feature: MA Experiment 20000267 PARAMETER Experiment Name: At_Drought_P Parameter: Age (day) Value: 7
  misc_feature: MA Experiment 20000267 PARAMETER Experiment Name: At_Drought_P Parameter: Organism Value: A. thaliana
  misc_feature: MA Experiment 20000267 PARAMETER Experiment Name: At_Drought_P Parameter: Plant Line Value: WS
  misc_feature: MA Experiment 20000267 PARAMETER Experiment Name: At_Drought_P Parameter: Timepoint (hr) Value: 6
  misc_feature: MA Experiment 20000267 PARAMETER Experiment Name: At_Drought_P Parameter: Tissue Value: Whole Plant
  misc_feature: MA Experiment 20000267 PARAMETER Experiment Name: At_Drought_P Parameter: Treatment Value: Drought vs. No Drought
  misc_feature: MA Experiment ID: 20000268 Result: Up-regulated in Transcription
  misc_feature: MA Experiment 20000268 PARAMETER Experiment Name: At_100mM_NaCl__P Parameter: Age (day) Value: 14
  misc_feature: MA Experiment 20000268 PARAMETER Experiment Name: At_100mM_NaCl__P Parameter: Organism Value: A. thaliana
  misc_feature: MA Experiment 20000268 PARAMETER Experiment Name: At_100mM_NaCl__P Parameter: Plant Line Value: WS
  misc_feature: MA Experiment 20000268 PARAMETER Experiment Name: At_100mM_NaCl__P Parameter: Timepoint (hr) Value: 6
  misc_feature: MA Experiment 20000268 PARAMETER Experiment Name: At_100mM_NaCl__P Parameter: Tissue Value: Whole Plant
  misc_feature: MA Experiment 20000268 PARAMETER Experiment Name: At_100mM_NaCl__P Parameter: Treatment Value: 100mM NaCl vs. No Treatment
  misc_feature: MA Experiment ID: 20000436 Result: Up-regulated in Transcription
  misc_feature: MA Experiment 20000436 PARAMETER Experiment Name: At_Drought_P Parameter: Age (day) Value: 7
  misc_feature: MA Experiment 20000436 PARAMETER Experiment Name: At_Drought_P Parameter: Organism Value: A. thaliana
  misc_feature: MA Experiment 20000436 PARAMETER Experiment Name: At_Drought_P Parameter: Plant Line Value: WS
  misc_feature: MA Experiment 20000436 PARAMETER Experiment Name: At_Drought_P Parameter: Timepoint (hr) Value: 12
  misc_feature: MA Experiment 20000436 PARAMETER Experiment Name: At_Drought_P Parameter: Tissue Value: Whole Plant
  misc_feature: MA Experiment 20000436 PARAMETER Experiment Name: At_Drought_P Parameter: Treatment Value: Drought vs. No Drought
  misc_feature: MA Experiment ID: 20000437 Result: Up-regulated in Transcription
  misc_feature: MA Experiment 20000437 PARAMETER Experiment Name: At_Drought_P Parameter: Age (day) Value: 8
  misc_feature: MA Experiment 20000437 PARAMETER Experiment Name: At_Drought_P Parameter: Organism Value: A. thaliana
  misc_feature: MA Experiment 20000437 PARAMETER Experiment Name: At_Drought_P Parameter: Plant Line Value: WS
  misc_feature: MA Experiment 20000437 PARAMETER Experiment Name: At_Drought_P Parameter: Timepoint (hr) Value: 24
  misc_feature: MA Experiment 20000437 PARAMETER Experiment Name: At_Drought_P Parameter: Tissue Value: Whole Plant
  misc_feature: MA Experiment 20000437 PARAMETER Experiment Name: At_Drought_P Parameter: Treatment Value: Drought vs. No Drought
  misc_feature: MA Experiment ID: 20000438 Result: Up-regulated in Transcription
  misc_feature: MA Experiment 20000438 PARAMETER Experiment Name: At_Shoots__P Parameter: Age (day) Value: 14
  misc_feature: MA Experiment 20000438 PARAMETER Experiment Name: At_Shoots__P Parameter: Tissue Value: Shoots vs. Whole Plant
  misc_feature: MA Experiment ID: 20000794 Result: Up-regulated in Transcription
  misc_feature: MA Experiment 20000794 PARAMETER Experiment Name: At_Petals_P Parameter: Age (day) Value: 23-25 days
  misc_feature: MA Experiment 20000794 PARAMETER Experiment Name: At_Petals_P Parameter: Plant Line Value: WS
  misc_feature: MA Experiment 20000794 PARAMETER Experiment Name: At_Petals_P Parameter: Tissue Value: Petals vs. Whole plant
  misc_feature: MA Experiment ID: 20001248 Result: Down-regulated in Transcription
  misc_feature: MA Experiment 20001248 PARAMETER Experiment Name: At_Far-red-induction_P Parameter: Age (day) Value: 7
  misc_feature: MA Experiment 20001248 PARAMETER Experiment Name: At_Far-red-induction_P Parameter: Light Value: Far-red vs. White
  misc_feature: MA Experiment 20001248 PARAMETER Experiment Name: At_Far-red-induction_P Parameter: Organism Value: A. thaliana
  misc_feature: MA Experiment 20001248 PARAMETER Experiment Name: At_Far-red-induction_P Parameter: Plant Line Value: Columbia
  misc_feature: MA Experiment 20001248 PARAMETER Experiment Name: At_Far-red-induction_P Parameter: Timepoint (hr) Value: 4
  misc_feature: MA Experiment 20001248 PARAMETER Experiment Name: At_Far-red-induction_P Parameter: Tissue Value: Whole Plant
acacttagctttctgttattcaattcttcacaaagtttctaaaagcttttctcttgttattcaacaacttggcaccgagcttcgtaacgccgtgtgtgtgttctacttgattctccgagctcttgatactgttgaggatgacacaagcgtaccagtggagatcaaagttccaattctgatagctttccaccgtcatatatacgatggtgactggcatttttcatgtggtacaaaagagtataaacttctaatggaccaatttcaccatgtttctgcagcttttctgaaacttgaaaaagggtatcaagaggctattgaagatataactaaaagaatgggtgcaggaatggccaagttcatttgcaaggaggtagaaacaattgatgactatgatgaatactgccattatgctgcaggacttgttggtttaggtttgtcaaaaatcttcattgcttcggaattagaaatactgactccagattggaagcagatttcaaattctacaggtttatttctgcagaaaacaaacattatcaaagattatcttgaagacattaatgagagaccaaagtcgcgcatgttttggcctcgtgagatttggggaaaatatgttgacaaacttgaggacttcaaaaatgaggagaaagctacaaaagcagtgcagtgtttgaatgaaatggtcactaatgcattgaatcatgttgaagattgtttgaaatccttggcttcactgcgtgatcctgcaatatttcagtcttgcgccatccctcagatcgtggcgattggaacacttgcgttatgctataacaatgtacaagtgtttagaggtgtcgtgagattgagacgaggtctaatagctaaagtcattgatcgcacaaagacaatggatgatgtctacggtgcgttctatgatttttcttgcatgctacaaacaaaggttgacaataacgatccaaatgctatgaaaacattaaaccgactcgaaaccatcaagaaattttgcaaagaaaatggaggacttcacaaaagaaaatcttatgttaacgatgaaacacaatccaaggctatctttgttgtaatgtttgtgcttctactggccatagtcgttgtatatctcaaagcaaaccaatgtaagtgactctgattttgtgaagtcatcatgaacataatttctagcttttttgaaatgtttgatcaaatcttg

SEQ ID NO: 89183 - protein, 378 aa, Arabidopsis thaliana
  peptide (1)..(378): Ceres Seq. ID no. 12715965
  misc_feature (9)..(298): Pfam Name: Squalene/phytoene synthase Pfam Description: Squalene/phytoene synthase
  misc_feature (1)..(378): Homolog of NCBI NO: 25287164 NR Description: probable squalene synthase [imported] - thaliana >gi|5678626|emb|CAA18844.2| putative squalene synthase thaliana] >gi|7270415|emb|CAB80182.1| putative squalene synthase
  misc_feature (1)..(378): Homolog of NCBI NO: 11258828 NR Description: farnesyl-diphosphate farnesyltransferase (EC
  misc_feature (1)..(378): Homolog of NCBI NO: 7434083 NR Description: farnesyl-diphosphate farnesyltransferase (EC
  misc_feature (1)..(343): Homolog of NCBI NO: 15236169 NR Description: farnesyl-diphosphate farnesyltransferase
  misc_feature (1)..(375): Homolog of NCBI NO: 15236168 NR Description: farnesyl-diphosphate farnesyltransferase synthase 1) (SQS1); protein id: At4g34640.1, supported by cDNA: supported by cDNA: gi_4098518, supported by cDNA: gi_806324
HLAFCYSILHKVSKSFSLVIQQLGTELRNAVCVFYLILRALDTVEDDTSVPVEIKVPILIAFHRHIYDGDWHFSCGTKEYKLLMDQFHHVSAAFLKLEKGYQEAIEDITKRMGAGMAKFICKEVETIDDYDEYCHYAAGLVGLGLSKIFIASELEILTPDWKQISNSTGLFLQKTNIIKDYLEDINERPKSRMFWPREIWGKYVDKLEDFKNEEKATKAVQCLNEMVTNALNHVEDCLKSLASLRDPAIFQSCAIPQIVAIGTLALCYNNVQVFRGVVRLRRGLIAKVIDRTKTMDDVYGAFYDFSCMLQTKVDNNDPNAMKTLNRLETIKKFCKENGGLHKRKSYVNDETQSKAIFVVMFVLLLAIVVVYLKANQCK

SEQ ID NO: 89184 - protein, 295 aa, Arabidopsis thaliana; identical to SEQ ID NO: 89097
  peptide (1)..(295): Ceres Seq. ID no. 12715966
  misc_feature (1)..(215): Pfam Name: Squalene/phytoene synthase Pfam Description: Squalene/phytoene synthase
  misc_feature (1)..(295): Homolog of NCBI NO: 25287164 NR Description: probable squalene synthase [imported] - thaliana >gi|5678626|emb|CAA18844.2| putative squalene synthase thaliana] >gi|7270415|emb|CAB80182.1| putative squalene synthase
  misc_feature (1)..(295): Homolog of NCBI NO: 11258828 NR Description: farnesyl-diphosphate farnesyltransferase (EC
  misc_feature (1)..(295): Homolog of NCBI NO: 7434083 NR Description: farnesyl-diphosphate farnesyltransferase (EC
  misc_feature (1)..(260): Homolog of NCBI NO: 15236169 NR Description: farnesyl-diphosphate farnesyltransferase
  misc_feature (1)..(292): Homolog of NCBI NO: 15236168 NR Description: farnesyl-diphosphate farnesyltransferase synthase 1) (SQS1); protein id: At4g34640.1, supported by cDNA: supported by cDNA: gi_4098518, supported by cDNA: gi_806324

SEQ ID NO: 89185 - protein, 267 aa, Arabidopsis thaliana; identical to SEQ ID NO: 89098
  peptide (1)..(267): Ceres Seq. ID no. 12715967
  misc_feature (1)..(187): Pfam Name: Squalene/phytoene synthase Pfam Description: Squalene/phytoene synthase
  misc_feature (1)..(267): Homolog of NCBI NO: 25287164 NR Description: probable squalene synthase [imported] - thaliana >gi|5678626|emb|CAA18844.2| putative squalene synthase thaliana] >gi|7270415|emb|CAB80182.1| putative squalene synthase
  misc_feature (1)..(267): Homolog of NCBI NO: 11258828 NR Description: farnesyl-diphosphate farnesyltransferase (EC
  misc_feature (1)..(267): Homolog of NCBI NO: 7434083 NR Description: farnesyl-diphosphate farnesyltransferase (EC
  misc_feature (1)..(232): Homolog of NCBI NO: 15236169 NR Description: farnesyl-diphosphate farnesyltransferase
  misc_feature (1)..(264): Homolog of NCBI NO: 15236168 NR Description: farnesyl-diphosphate farnesyltransferase synthase 1) (SQS1); protein id: At4g34640.1, supported by cDNA: supported by cDNA: gi_4098518, supported by cDNA: gi_806324

SEQ ID NO: 89186 - DNA, 603 bp, Arabidopsis thaliana
  misc_feature (1)..(603): Ceres Seq. ID no. 12715999
  misc_feature: MA Experiment ID: 20000179 Result: Up-regulated in Transcription
  misc_feature: MA Experiment 20000179 PARAMETER Experiment Name: At_Germinating_Seeds_P Parameter: Age (hr) Value: 6 vs. 0
  misc_feature: MA Experiment 20000179 PARAMETER Experiment Name: At_Germinating_Seeds_P Parameter: Tissue Value: Germinating Seeds
  misc_feature: MA Experiment ID: 20000180 Result: Up-regulated in Transcription
  misc_feature: MA Experiment 20000180 PARAMETER Experiment Name: At_Germinating_Seeds_P Parameter: Age (hr) Value: 24 vs. 0
  misc_feature: MA Experiment 20000180 PARAMETER Experiment Name: At_Germinating_Seeds_P Parameter: Tissue Value: Germinating Seeds
  misc_feature: MA Experiment ID: 20001451 Result: Down-regulated in Transcription
  misc_feature: MA Experiment 20001451 PARAMETER Experiment Name: At_Far-red-induction_P Parameter: Age (day) Value: 7
  misc_feature: MA Experiment 20001451 PARAMETER Experiment Name: At_Far-red-induction_P Parameter: Light Value: Far-red vs. White
  misc_feature: MA Experiment 20001451 PARAMETER Experiment Name: At_Far-red-induction_P Parameter: Organism Value: A. thaliana
  misc_feature: MA Experiment 20001451 PARAMETER Experiment Name: At_Far-red-induction_P Parameter: Plant Line Value: Columbia
  misc_feature: MA Experiment 20001451 PARAMETER Experiment Name: At_Far-red-induction_P Parameter: Timepoint (hr) Value: 24
  misc_feature: MA Experiment 20001451 PARAMETER Experiment Name: At_Far-red-induction_P Parameter: Tissue Value: Whole Plant
atgtataaagacttgaacatcaatatagtgtgtcctggaaaagattcaactcttggggttgagagtgttggcacagttcctgcatcactcgtgacttatgcttccattctagcaattcaaccagacttaatcattaatgcgggaaccgctggtggctttaaggccaaaggagcatgtattagcgatgtttatgttgtctctactgttgctttccatgacagaagaatacctgttcctgtccttgatatatatggtgttggtatgcggaacaccttccccacacccaaccttataaaggagctgaacctaaaggtgggaagattatccactggcgattctatggatatgtctccacatgacgaagaatccatcacagcaaatgatgctacagttaaagatatggagggagcagcagtggcctatgtggctgatatctttaaagtgcctacgattctaataaaaggtgtgactgatattgtggatggcaatagaccaacttctgaagaatttttggagaacttagctgcagtcactgccaaacttgatgagtcacttaccaaagtgattgacttcatcagtgggaaatgtctctcagacctctaa

SEQ ID NO: 89187 - protein, 200 aa, Arabidopsis thaliana
  peptide (1)..(200): Ceres Seq. ID no. 12716000
  misc_feature (2)..(184): Pfam Name: Phosphorylase family Pfam Description: Phosphorylase family
  misc_feature (1)..(200): Homolog of NCBI NO: 30690140 NR Description: expressed protein [Arabidopsis thaliana]
  misc_feature (1)..(200): Homolog of NCBI NO: 7486865 NR Description: hypothetical protein T11I11.80 - Arabidopsis >gi|5123701|emb|CAB45445.1| putative protein [Arabidopsis >gi|7270435|emb|CAB80201.1| putative protein [Arabidopsis
  misc_feature (2)..(200): Homolog of NCBI NO: 18087497 NR Description: methylthioadenosine/S-adenosyl homocysteine
  misc_feature (2)..(200): Homolog of NCBI NO: 34897892 NR Description: ESTs C28489(C61317),AU031689(R0560) correspond to region of the predicted gene.~Similar to Arabidopsis thaliana DNA
  misc_feature (1)..(200): Homolog of NCBI NO: 7406708 NR Description: putative ripening-related protein [Vitis vinifera]
  misc_feature (1)..(200): Homolog of NCBI NO: 15234791 NR Description: putative protein; protein id: At4g38800.1, by cDNA: gi_13878068 [Arabidopsis thaliana]
  misc_feature (13)..(181): Homolog of NCBI NO: 23037085 NR Description: hypothetical protein [Oenococcus oeni MCW]
  misc_feature (14)..(185): Homolog of NCBI NO: 27468203 NR Description: 5'-methylthioadenosine nucleosidase;
  misc_feature (14)..(176): Homolog of NCBI NO: 23467396 NR Description: hypothetical protein [Haemophilus somnus 129PT]
  misc_feature (13)..(165): Homolog of NCBI NO: 24372900 NR Description: 5-methylthioadenosine
MYKDLNINIVCPGKDSTLGVESVGTVPASLVTYASILAIQPDLIINAGTAGGFKAKGACISDVYVVSTVAFHDRRIPVPVLDIYGVGMRNTFPTPNLIKELNLKVGRLSTGDSMDMSPHDEESITANDATVKDMEGAAVAYVADIFKVPTILIKGVTDIVDGNRPTSEEFLENLAAVTAKLDESLTKVIDFISGKCLSDL

SEQ ID NO: 89188 - protein, 113 aa, Arabidopsis thaliana
  peptide (1)..(113): Ceres Seq. ID no. 12716001
  misc_feature (1)..(97): Pfam Name: Phosphorylase family Pfam Description: Phosphorylase family
  misc_feature (1)..(113): Homolog of NCBI NO: 30690140 NR Description: expressed protein [Arabidopsis thaliana]
  misc_feature (1)..(113): Homolog of NCBI NO: 7486865 NR Description: hypothetical protein T11I11.80 - Arabidopsis >gi|5123701|emb|CAB45445.1| putative protein [Arabidopsis >gi|7270435|emb|CAB80201.1| putative protein [Arabidopsis
  misc_feature (1)..(113): Homolog of NCBI NO: 18087497 NR Description: methylthioadenosine/S-adenosyl homocysteine
  misc_feature (1)..(113): Homolog of NCBI NO: 34897892 NR Description: ESTs C28489(C61317),AU031689(R0560) correspond to region of the predicted gene.~Similar to Arabidopsis thaliana DNA
  misc_feature (1)..(113): Homolog of NCBI NO: 7406708 NR Description: putative ripening-related protein [Vitis vinifera]
  misc_feature (1)..(113): Homolog of NCBI NO: 15234791 NR Description: putative protein; protein id: At4g38800.1, by cDNA: gi_13878068 [Arabidopsis thaliana]
  misc_feature (1)..(94): Homolog of NCBI NO: 23037085 NR Description: hypothetical protein [Oenococcus oeni MCW]
  misc_feature (1)..(98): Homolog of NCBI NO: 27468203 NR Description: 5'-methylthioadenosine nucleosidase;
  misc_feature (1)..(89): Homolog of NCBI NO: 23467396 NR Description: hypothetical protein [Haemophilus somnus 129PT]
  misc_feature (1)..(78): Homolog of NCBI NO: 24372900 NR Description: 5-methylthioadenosine
MRNTFPTPNLIKELNLKVGRLSTGDSMDMSPHDEESITANDATVKDMEGAAVAYVADIFKVPTILIKGVTDIVDGNRPTSEEFLENLAAVTAKLDESLTKVIDFISGKCLSDL

SEQ ID NO: 89189 - DNA, 2784 bp, Arabidopsis thaliana
  misc_feature (1)..(2784): Ceres Seq. ID no. 12716041
  misc_feature: MA Experiment ID: 20000180 Result: Down-regulated in Transcription
  misc_feature: MA Experiment 20000180 PARAMETER Experiment Name: At_Germinating_Seeds_P Parameter: Age (hr) Value: 24 vs. 0
  misc_feature: MA Experiment 20000180 PARAMETER Experiment Name: At_Germinating_Seeds_P Parameter: Tissue Value: Germinating Seeds
atggctgcgactctgctgtctcaatgctaccgtatctacaattccgatgcgtgcaagtgtgtttcttctgagaatcaccagacgacggggaagcgaaatgggaatcgaaatctcgaattcgactcgggaatttcgaaaccagcacggctagtacttcgagaccgatacaaggtaactaagcaggtcaatgatcctgcgctgactagggctttacgtggtttcgctgattcccgtcttatggaggatgcactccaactgttcgatgaaatgaacaaagctgatgcttttctgtggaatgtgatgattaaaggtttcactagctgtgggttgtacattgaagcagttcaattttatagcagaatggtgtttgcaggggtcaaagctgatacctttacttatcctttcgtgattaaatcggttgcgggaatttcctcattggaagaagggaagaagattcatgcgatggtgattaagcttgggtttgtttcagatgtttacgtctgtaattctcttatatctttatacatgaagcttgggtgtgcttgggatgcagagaaagtgttcgaagaaatgcctgagagagacattgtttcgtggaattccatgatttctggatatcttgcgcttggagatggctttagctcgttgatgctgtttaaagaaatgctgaaatgtgggtttaaaccggacaggttcagtaccatgagtgctcttggtgcttgttctcatgtgtatagtccaaaaatgggaaaagagatacattgccacgctgttcgaagtaggattgaaactggtgatgttatggtaatgacatcaattcttgacatgtacagtaaatatggtgaagtgagttatgcggagaggatatttaacggtatgatccagaggaacatcgtagcttggaacgttatgatagggtgttatgctagaaatggccgagtcactgatgctttcctctgctttcagaaaatgtcagagcaaaatgggttgcagccagatgttatcacatcgattaatctgcttcctgcttctgcgatcttagagggtagaacgattcacgggtatgctatgaggagaggctttcttccccatatggtattggaaactgctctgattgatatgtatggagaatgtgggcagttaaaatcagctgaggttatatttgatcgaatggctgaaaagaatgtgatctcatggaactcgattattgctgcctatgtgcagaacgggaagaactattcagccttggagctatttcaagagctctgggattcatcgcttgtacctgattccacaacaattgctagtattctaccagcttatgcagaatctctatccttgagtgaaggtagagaaatccatgcttatattgttaagtctagatactggtcaaacaccatcatcttgaattcacttgttcacatgtatgccatgtgtggtgaccttgaggatgcaagaaaatgtttcaaccacatcttgttaaaggatgttgtttcatggaacagcatcatcatggcatatgcagtacatggttttgggagaatttcggtttggttattctctgagatgattgcttctagagtaaatccaaacaagagcacctttgcttcactattagcagcatgtagcatttctggtatggttgatgaaggatgggaatatttcgagtcgatgaaaagagaatacgggatagatcctggaatagagcattatgggtgcatgctggatctcattggccgtacaggaaacttcagcgcagccaagagattccttgaagaaatgccatttgtgccaacagctaggatttggggatcgttgttaaacgcaagcagaaaccacaaggacataaccatagctgaatttgcggcagaacagatatttaagatggaacacgataacacgggatgttatgtcttgcttttgaacatgtatgcagaagctggaagatgggaagatgtaaataggattaagcttctcatggagagcaaaggcatatccagaacatcaagtcgcagtactgttgaggcgaagggcaaaagtcatgtgttcacaaatggagacagatcccacgtggcgacgaacaagatctatgaagtcttagatgtcgtctcgaggatggttggagaagaagacatttatgttcactgtgtctcgaggttgagaccagagactctagttaagagcagaagcaattcaccaagaagacattcgaaaatgtcacgagttcttggaaaaagcttcgagattgacgagaagagagatcgttgtgggagattccaagatttttcatcacttctccaatggtcgctgctcgtgtggaaattactggtgaaaacacagattgtggctaaagtagcttcaccggcaattttctcatccagaaaagggtataggcttctttggcctgaaggaggcaaccttggagagaacctgcaaatatttctcgtctcgatcaaagctttgcgacagatcacagatgtgctttcgatctctcgtgacaacatcttctatcaatcgagttcaagttatgtctcccttatttcacacgatccaagatcttgccaccgaaacgctttcaccggaggattcttcgacggcgatcacggagaaggatgcgaggaagacgatggcgaagagactgatggtgaaattgacgatcagttagcagattcgttgtttgatggttttagagtacgagtcgcctccggaggaagaagacgaatttgtgtttcatcgatcatcatcaccacaaccctaggtttgtgttttcctaattttttttaa

SEQ ID NO: 89190 - protein, 927 aa, Arabidopsis thaliana
  peptide (1)..(927): Ceres Seq. ID no. 12716042
  misc_feature (299)..(333): Pfam Name: PPR repeat Pfam Description: PPR repeat
  misc_feature (80)..(709): Homolog of NCBI NO: 15234006 NR Description: putative protein; protein id: At4g18750.1
  misc_feature (83)..(710): Homolog of NCBI NO: 34903762 NR Description: unnamed protein product [Oryza sativa (japonica group)] >gi|7340873|dbj|BAA92963.1| unnamed protein product
  misc_feature (287)..(706): Homolog of NCBI NO: 15237421 NR Description: putative protein; protein id: At5g16860.1
  misc_feature (80)..(336): Homolog of NCBI NO: 15237421 NR Description: putative protein; protein id: At5g16860.1
  misc_feature (66)..(730): Homolog of NCBI NO: 34915012 NR Description: P0458A05.10 [Oryza sativa (japonica
  misc_feature (82)..(701): Homolog of NCBI NO: 15218216 NR Description: hypothetical protein; protein id: At1g15510.1
  misc_feature (67)..(766): Homolog of NCBI NO: 38606535 NR Description: OSJNBa0016O02.23 [Oryza sativa (japonica
  misc_feature (52)..(708): Homolog of NCBI NO: 18418348 NR Description: putative protein; protein id: At4g33990.1
  misc_feature (80)..(701): Homolog of NCBI NO: 15220337 NR Description: hypothetical protein; protein id: At1g11290.1
  misc_feature (83)..(720): Homolog of NCBI NO: 15236324 NR Description: putative protein; protein id: At4g13650.1
MAATLLSQCYRIYNSDACKCVSSENHQTTGKRNGNRNLEFDSGISKPARLVLRDRYKVTKQVNDPALTRALRGFADSRLMEDALQLFDEMNKADAFLWNVMIKGFTSCGLYIEAVQFYSRMVFAGVKADTFTYPFVIKSVAGISSLEEGKKIHAMVIKLGFVSDVYVCNSLISLYMKLGCAWDAEKVFEEMPERDIVSWNSMISGYLALGDGFSSLMLFKEMLKCGFKPDRFSTMSALGACSHVYSPKMGKEIHCHAVRSRIETGDVMVMTSILDMYSKYGEVSYAERIFNGMIQRNIVAWNVMIGCYARNGRVTDAFLCFQKMSEQNGLQPDVITSINLLPASAILEGRTIHGYAMRRGFLPHMVLETALIDMYGECGQLKSAEVIFDRMAEKNVISWNSIIAAYVQNGKNYSALELFQELWDSSLVPDSTTIASILPAYAESLSLSEGREIHAYIVKSRYWSNTIILNSLVHMYAMCGDLEDARKCFNHILLKDVVSWNSIIMAYAVHGFGRISVWLFSEMIASRVNPNKSTFASLLAACSISGMVDEGWEYFESMKREYGIDPGIEHYGCMLDLIGRTGNFSAAKRFLEEMPFVPTARIWGSLLNASRNHKDITIAEFAAEQIFKMEHDNTGCYVLLLNMYAEAGRWEDVNRIKLLMESKGISRTSSRSTVEAKGKSHVFTNGDRSHVATNKIYEVLDVVSRMVGEEDIYVHCVSRLRPETLVKSRSNSPRRHSKMSRVLGKSFEIDEKRDRCGRFQDFSSLLQWSLLVWKLLVKTQIVAKVASPAIFSSRKGYRLLWPEGGNLGENLQIFLVSIKALRQITDVLSISRDNIFYQSSSSYVSLISHDPRSCHRNAFTGGFFDGDHGEGCEEDDGEETDGEIDDQLADSLFDGFRVRVASGGRRRICVSSIIITTTLGLCFPNFF

SEQ ID NO: 89191 - protein, 848 aa, Arabidopsis thaliana
  peptide (1)..(848): Ceres Seq. ID no. 12716043
  misc_feature (220)..(254): Pfam Name: PPR repeat Pfam Description: PPR repeat
  misc_feature (1)..(630): Homolog of NCBI NO: 15234006 NR Description: putative protein; protein id: At4g18750.1
  misc_feature (4)..(631): Homolog of NCBI NO: 34903762 NR Description: unnamed protein product [Oryza sativa (japonica group)] >gi|7340873|dbj|BAA92963.1| unnamed protein product
  misc_feature (208)..(627): Homolog of NCBI NO: 15237421 NR Description: putative protein; protein id: At5g16860.1
  misc_feature (1)..(257): Homolog of NCBI NO: 15237421 NR Description: putative protein; protein id: At5g16860.1
  misc_feature (1)..(651): Homolog of NCBI NO: 34915012 NR Description: P0458A05.10 [Oryza sativa (japonica
  misc_feature (3)..(622): Homolog of NCBI NO: 15218216 NR Description: hypothetical protein; protein id: At1g15510.1
  misc_feature (1)..(687): Homolog of NCBI NO: 38606535 NR Description: OSJNBa0016O02.23 [Oryza sativa (japonica
  misc_feature (1)..(629): Homolog of NCBI NO: 18418348 NR Description: putative protein; protein id: At4g33990.1
  misc_feature (1)..(622): Homolog of NCBI NO: 15220337 NR Description: hypothetical protein; protein id: At1g11290.1
  misc_feature (4)..(641): Homolog of NCBI NO: 15236324 NR Description: putative protein; protein id: At4g13650.1
MEDALQLFDEMNKADAFLWNVMIKGFTSCGLYIEAVQFYSRMVFAGVKADTFTYPFVIKSVAGISSLEEGKKIHAMVIKLGFVSDVYVCNSLISLYMKLGCAWDAEKVFEEMPERDIVSWNSMISGYLALGDGFSSLMLFKEMLKCGFKPDRFSTMSALGACSHVYSPKMGKEIHCHAVRSRIETGDVMVMTSILDMYSKYGEVSYAERIFNGMIQRNIVAWNVMIGCYARNGRVTDAFLCFQKMSEQNGLQPDVITSINLLPASAILEGRTIHGYAMRRGFLPHMVLETALIDMYGECGQLKSAEVIFDRMAEKNVISWNSIIAAYVQNGKNYSALELFQELWDSSLVPDSTTIASILPAYAESLSLSEGREIHAYIVKSRYWSNTIILNSLVHMYAMCGDLEDARKCFNHILLKDVVSWNSIIMAYAVHGFGRISVWLFSEMIASRVNPNKSTFASLLAACSISGMVDEGWEYFESMKREYGIDPGIEHYGCMLDLIGRTGNFSAAKRFLEEMPFVPTARIWGSLLNASRNHKDITIAEFAAEQIFKMEHDNTGCYVLLLNMYAEAGRWEDVNRIKLLMESKGISRTSSRSTVEAKGKSHVFTNGDRSHVATNKIYEVLDVVSRMVGEEDIYVHCVSRLRPETLVKSRSNSPRRHSKMSRVLGKSFEIDEKRDRCGRFQDFSSLLQWSLLVWKLLVKTQIVAKVASPAIFSSRKGYRLLWPEGGNLGENLQIFLVSIKALRQITDVLSISRDNIFYQSSSSYVSLISHDPRSCHRNAFTGGFFDGDHGEGCEEDDGEETDGEIDDQLADSLFDGFRVRVASGGRRRICVSSIIITTTLGLCFPNFF

SEQ ID NO: 89192 - protein, 838 aa, Arabidopsis thaliana
  peptide (1)..(838): Ceres Seq. ID no. 12716044
  misc_feature (210)..(244): Pfam Name: PPR repeat Pfam Description: PPR repeat
  misc_feature (1)..(620): Homolog of NCBI NO: 15234006 NR Description: putative protein; protein id: At4g18750.1
  misc_feature (1)..(621): Homolog of NCBI NO: 34903762 NR Description: unnamed protein product [Oryza sativa (japonica group)] >gi|7340873|dbj|BAA92963.1| unnamed protein product
  misc_feature (198)..(617): Homolog of NCBI NO: 15237421 NR Description: putative protein; protein id: At5g16860.1
  misc_feature (1)..(247): Homolog of NCBI NO: 15237421 NR Description: putative protein; protein id: At5g16860.1
  misc_feature (1)..(641): Homolog of NCBI NO: 34915012 NR Description: P0458A05.10 [Oryza sativa (japonica
  misc_feature (1)..(612): Homolog of NCBI NO: 15218216 NR Description: hypothetical protein; protein id: At1g15510.1
  misc_feature (1)..(677): Homolog of NCBI NO: 38606535 NR Description: OSJNBa0016O02.23 [Oryza sativa (japonica
  misc_feature (1)..(619): Homolog of NCBI NO: 18418348 NR Description: putative protein; protein id: At4g33990.1
  misc_feature (1)..(612): Homolog of NCBI NO: 15220337 NR Description: hypothetical protein; protein id: At1g11290.1
  misc_feature (1)..(631): Homolog of NCBI NO: 15236324 NR Description: putative protein; protein id: At4g13650.1
MNKADAFLWNVMIKGFTSCGLYIEAVQFYSRMVFAGVKADTFTYPFVIKSVAGISSLEEGKKIHAMVIKLGFVSDVYVCNSLISLYMKLGCAWDAEKVFEEMPERDIVSWNSMISGYLALGDGFSSLMLFKEMLKCGFKPDRFSTMSALGACSHVYSPKMGKEIHCHAVRSRIETGDVMVMTSILDMYSKYGEVSYAERIFNGMIQRNIVAWNVMIGCYARNGRVTDAFLCFQKMSEQNGLQPDVITSINLLPASAILEGRTIHGYAMRRGFLPHMVLETALIDMYGECGQLKSAEVIFDRMAEKNVISWNSIIAAYVQNGKNYSALELFQELWDSSLVPDSTTIASILPAYAESLSLSEGREIHAYIVKSRYWSNTIILNSLVHMYAMCGDLEDARKCFNHILLKDVVSWNSIIMAYAVHGFGRISVWLFSEMIASRVNPNKSTFASLLAACSISGMVDEGWEYFESMKREYGIDPGIEHYGCMLDLIGRTGNFSAAKRFLEEMPFVPTARIWGSLLNASRNHKDITIAEFAAEQIFKMEHDNTGCYVLLLNMYAEAGRWEDVNRIKLLMESKGISRTSSRSTVEAKGKSHVFTNGDRSHVATNKIYEVLDVVSRMVGEEDIYVHCVSRLRPETLVKSRSNSPRRHSKMSRVLGKSFEIDEKRDRCGRFQDFSSLLQWSLLVWKLLVKTQIVAKVASPAIFSSRKGYRLLWPEGGNLGENLQIFLVSIKALRQITDVLSISRDNIFYQSSSSYVSLISHDPRSCHRNAFTGGFFDGDHGEGCEEDDGEETDGEIDDQLADSLFDGFRVRVASGGRRRICVSSIIITTTLGLCFPNFF

SEQ ID NO: 89193 - DNA, 1089 bp, Arabidopsis thaliana
  misc_feature (1)..(1089): Ceres Seq. ID no. 12716049
  misc_feature: MA Experiment ID: 20000184 Result: Up-regulated in Transcription
  misc_feature: MA Experiment 20000184 PARAMETER Experiment Name: At_Shoots__P Parameter: Age (day) Value: 7
  misc_feature: MA Experiment 20000184 PARAMETER Experiment Name: At_Shoots__P Parameter: Tissue Value: Shoots vs. Whole Plant
atggaagaaagtaaaaggaatttattagatgaagaagcgaaagcttctttagacatatggagatatgtttttgggtttgcagatattgcagctgcaaagtgtgccattgatctcaaaataccagaagccattgaaaaccatccttcgtcacagcccgtgacactatccgaactctcctctgccgtctctgcttctccttcacatctccgccgtataatgcggtttcttgtgcaccaaggactcttcaaagaagtccccacaaaagatggtttagccactggctacactaacacgccactctctcgccgtatgatgatcacaaaacctcctttgcttctcttggaaacaagtcccgagatgcttgctccatggttgaagctgagctcagtcgtttcttcgccggtcaatgtttcaactccaccgccgtttgatgcagtgcatggtaaggacttgtgggcgttcgcacaggataatctgtgccacagccagctgatcaacgaggccatggcttgtgatgcaaggcgcgtggtgccacgtgtagctggagcttgtcaaggcttgtttgacggcgtggctacggtggttgacgtaggaggaggtaccggagagacgatgggaatacttgtaaaggagtttccttggatcaaaggatttaactttgaccttcctcatgttattgaagttgctcaagtcttggacggtgttgagaatgttgagggcgatatgtttgattctattccggcaagcgacgctgttatcatcaagtgggtgttacacgattggggagacaaagattgcataaagatattgaagaattgcaaagaagctgttctaccaaatatcggcaaagtgttgatagtggagtgtgttatcggagagaagaaaaacacgatgatagcggaagaaagagatgacaagttagagcacgtgagattgcagcttgacatggtgatgatggttcacacaagcacaggcaaagaacgaactttgaaagaatgggactttgttcttacagaagctggctttgctcgatatgaggttagagactttgatgatgttcagtctcttatcatcgcatatcgatcttaa

SEQ ID NO: 89194 - protein, 362 aa, Arabidopsis thaliana
  peptide (1)..(362): Ceres Seq. ID no. 12716050
  misc_feature (46)..(108): Pfam Name: O-methyltransferase Pfam Description: O-methyltransferase
  misc_feature (146)..(362): Homolog of NCBI NO: 15236280 NR Description: O-methyltransferase, family 2 family; protein id:
  misc_feature (1)..(108): Homolog of NCBI NO: 15236280 NR Description: O-methyltransferase, family 2 family; protein id:
  misc_feature (1)..(362): Homolog of NCBI NO: 15236282 NR Description: O-methyltransferase, family 2 family; protein id:
  misc_feature (204)..(361): Homolog of NCBI NO: 33285922 NR Description: O-methyltransferase-like protein [Brassica rapa
  misc_feature (9)..(360): Homolog of NCBI NO: 32440935 NR Description: caffeic acid O-methyltransferase [Rosa chinensis
  misc_feature (10)..(360): Homolog of NCBI NO: 7447883 NR Description: catechol O-methyltransferase homolog - Monterey
  misc_feature (10)..(360): Homolog of NCBI NO: 4574324 NR Description: caffeic acid ortho-methyltransferase [Pinus
  misc_feature (10)..(360): Homolog of NCBI NO: 1777386 NR Description: caffeic acid O-methyltransferase
  misc_feature (10)..(347): Homolog of NCBI NO: 33286372 NR Description: (R,S)-reticuline 7-O-methyltransferase [Papaver
  misc_feature (9)..(360): Homolog of NCBI NO: 33413896 NR Description: S-adenosyl-L-methionine:norcoclaurine
MEESKRNLLDEEAKASLDIWRYVFGFADIAAAKCAIDLKIPEAIENHPSSQPVTLSELSSAVSASPSHLRRIMRFLVHQGLFKEVPTKDGLATGYTNTPLSRRMMITKPPLLLLETSPEMLAPWLKLSSVVSSPVNVSTPPPFDAVHGKDLWAFAQDNLCHSQLINEAMACDARRVVPRVAGACQGLFDGVATVVDVGGGTGETMGILVKEFPWIKGFNFDLPHVIEVAQVLDGVENVEGDMFDSIPASDAVIIKWVLHDWGDKDCIKILKNCKEAVLPNIGKVLIVECVIGEKKNTMIAEERDDKLEHVRLQLDMVMMVHTSTGKERTLKEWDFVLTEAGFARYEVRDFDDVQSLIIAYRS

SEQ ID NO: 89195 - protein, 290 aa, Arabidopsis thaliana
  peptide (1)..(290): Ceres Seq. ID no. 12716051
  misc_feature (74)..(266): Pfam Name: O-methyltransferase Pfam Description: O-methyltransferase
  misc_feature (74)..(290): Homolog of NCBI NO: 15236280 NR Description: O-methyltransferase, family 2 family; protein id:
  misc_feature (1)..(36): Homolog of NCBI NO: 15236280 NR Description: O-methyltransferase, family 2 family; protein id:
  misc_feature (1)..(290): Homolog of NCBI NO: 15236282 NR Description: O-methyltransferase, family 2 family; protein id:
  misc_feature (132)..(289): Homolog of NCBI NO: 33285922 NR Description: O-methyltransferase-like protein [Brassica rapa
  misc_feature (1)..(288): Homolog of NCBI NO: 32440935 NR Description: caffeic acid O-methyltransferase [Rosa chinensis
  misc_feature (1)..(288): Homolog of NCBI NO: 7447883 NR Description: catechol O-methyltransferase homolog - Monterey
  misc_feature (1)..(288): Homolog of NCBI NO: 4574324 NR Description: caffeic acid ortho-methyltransferase [Pinus
  misc_feature (1)..(288): Homolog of NCBI NO: 1777386 NR Description: caffeic acid O-methyltransferase
  misc_feature (1)..(275): Homolog of NCBI NO: 33286372 NR Description: (R,S)-reticuline 7-O-methyltransferase [Papaver
  misc_feature (1)..(288): Homolog of NCBI NO: 33413896 NR Description: S-adenosyl-L-methionine:norcoclaurine
MRFLVHQGLFKEVPTKDGLATGYTNTPLSRRMMITKPPLLLLETSPEMLAPWLKLSSVVSSPVNVSTPPPFDAVHGKDLWAFAQDNLCHSQLINEAMACDARRVVPRVAGACQGLFDGVATVVDVGGGTGETMGILVKEFPWIKGFNFDLPHVIEVAQVLDGVENVEGDMFDSIPASDAVIIKWVLHDWGDKDCIKILKNCKEAVLPNIGKVLIVECVIGEKKNTMIAEERDDKLEHVRLQLDMVMMVHTSTGKERTLKEWDFVLTEAGFARYEVRDFDDVQSLIIAYRS

SEQ ID NO: 89196 - protein, 259 aa, Arabidopsis thaliana
  peptide (1)..(259): Ceres Seq. ID no. 12716052
  misc_feature (43)..(235): Pfam Name: O-methyltransferase Pfam Description: O-methyltransferase
  misc_feature (43)..(259): Homolog of NCBI NO: 15236280 NR Description: O-methyltransferase, family 2 family; protein id:
  misc_feature (1)..(259): Homolog of NCBI NO: 15236282 NR Description: O-methyltransferase, family 2 family; protein id:
  misc_feature (101)..(258): Homolog of NCBI NO: 33285922 NR Description: O-methyltransferase-like protein [Brassica rapa
  misc_feature (1)..(257): Homolog of NCBI NO: 32440935 NR Description: caffeic acid O-methyltransferase [Rosa chinensis
  misc_feature (1)..(257): Homolog of NCBI NO: 7447883 NR Description: catechol O-methyltransferase homolog - Monterey
  misc_feature (1)..(257): Homolog of NCBI NO: 4574324 NR Description: caffeic acid ortho-methyltransferase [Pinus
  misc_feature (1)..(257): Homolog of NCBI NO: 1777386 NR Description: caffeic acid O-methyltransferase
  misc_feature (1)..(244): Homolog of NCBI NO: 33286372 NR Description: (R,S)-reticuline 7-O-methyltransferase [Papaver
  misc_feature (1)..(257): Homolog of NCBI NO: 33413896 NR Description: S-adenosyl-L-methionine:norcoclaurine
  misc_feature (1)..(257): Homolog of NCBI NO: 2282586 NR Description: methyltransferase [Prunus armeniaca]
MMITKPPLLLLETSPEMLAPWLKLSSVVSSPVNVSTPPPFDAVHGKDLWAFAQDNLCHSQLINEAMACDARRVVPRVAGACQGLFDGVATVVDVGGGTGETMGILVKEFPWIKGFNFDLPHVIEVAQVLDGVENVEGDMFDSIPASDAVIIKWVLHDWGDKDCIKILKNCKEAVLPNIGKVLIVECVIGEKKNTMIAEERDDKLEHVRLQLDMVMMVHTSTGKERTLKEWDFVLTEAGFARYEVRDFDDVQSLIIAYRS

SEQ ID NO: 89197 - DNA, 1353 bp, Arabidopsis thaliana
  misc_feature (1)..(1353): Ceres Seq. ID no. 12716053
  misc_feature: MA Experiment ID: 20000306 Result: Down-regulated in Transcription
  misc_feature: MA Experiment 20000306 PARAMETER Experiment Name: At_Germinating_Seeds_Sub_P Parameter: Age (hr) Value: 6 vs. 0
  misc_feature: MA Experiment 20000306 PARAMETER Experiment Name: At_Germinating_Seeds_Sub_P Parameter: Organism Value: A. thaliana
  misc_feature: MA Experiment 20000306 PARAMETER Experiment Name: At_Germinating_Seeds_Sub_P Parameter: Plant Line Value: WS
  misc_feature: MA Experiment 20000306 PARAMETER Experiment Name: At_Germinating_Seeds_Sub_P Parameter: Tissue Value: Germinating Seeds
  misc_feature: MA Experiment ID: 20000307 Result: Down-regulated in Transcription
  misc_feature: MA Experiment 20000307 PARAMETER Experiment Name: At_Germinating_Seeds_Sub_P Parameter: Age (hr) Value: 24 vs. 0
  misc_feature: MA Experiment 20000307 PARAMETER Experiment Name: At_Germinating_Seeds_Sub_P Parameter: Organism Value: A. thaliana
  misc_feature: MA Experiment 20000307 PARAMETER Experiment Name: At_Germinating_Seeds_Sub_P Parameter: Plant Line Value: WS
  misc_feature: MA Experiment 20000307 PARAMETER Experiment Name: At_Germinating_Seeds_Sub_P Parameter: Tissue Value: Germinating Seeds
atggaagaagacactggtatcgacgaagctaagacatacacggtggagaagagcgagaaagtggagccggagaaggacggactgagtcaattcagagacgaggaaaaatcacttggtgcggatatggaagatttacatgatgagactgtgcgagaaaccctaggcaaggatcaggttcaaggtgttcgagaaaattcctctgtggaaccaaatgttgaagatgtattagaagtgaatgagactgatagcgtcaaggaaactgttgtaagtgcgattgtgccggttgatgaagtggaagagaatcgtcaggtagaaacatctccttctctggctgcatcgtcagactcattgacagtgacgccatgtctatctttggatcctgcaactgcttcaaccgcacaagatttaccactggtttcagttccaactaaacaagagcaaagatcagattcgccggtggttaacagattgtcggttactcctgttcctaggacaccggctcgtgatggttataattggagaaaatatggacagaagcaggttaagagtcccaagggctcacggagttactacaggtgtacatacactgaatgttgtgctaaaaaaattgaatgctccaatgattcaggcaatgtggtagagattgttaacaaaggtttacatactcatgaacctccccggaagactagcttctccccgagagagattagagttacaacagctatccggcctgtttcagaggatgatacagtagtagaagagctatcaattgttcctagcggttcagatccgtctgcttctactaaagaatacatctgtgagtcgcaaacactcgttgaccggaaaagacactgtgagaacgaagctgtggaggaaccagagccaaaacgaaggcaaagttcagattctgtctccaaacctggaaagaaaaacaaattcgtagtacacgcagctggtgatgttggtatctgtggtgatggatacaggtggcgtaaatacgggcagaaaatggtgaaaggaaatcctcatccaaggaactactaccgatgcacttcagcgggatgtccagttcgtaaacacattgagacagcagtcgagaacacaaaagcagtaataatcacatacaaaggagtacacaaccacgacatgccggtgcctaagaaacgccatggtcctccaagctcaatgctcgtagctgcagccgctccaacatcaatgagaaccaggacagacgatcaggtgaacattccgacttcaagccagtgctcggtggggcgagaaagtgagaagcagagtaaagaagcattggacgttggtggagagaaagtgatggaatcactaggactttgttga

SEQ ID NO: 89198 - protein, 450 aa, Arabidopsis thaliana
  peptide (1)..(450): Ceres Seq. ID no. 12716054
  misc_feature (1)..(446): Homolog of NCBI NO: 22329039 NR Description: WRKY family transcription factor; protein id:
  misc_feature (1)..(447): Homolog of NCBI NO: 25407696 NR Description: hypothetical protein AT4g30930 [imported] - thaliana >gi|2980773|emb|CAA18200.1| putative protein thaliana] >gi|7269995|emb|CAB79811.1| putative protein
  misc_feature (1)..(446): Homolog of NCBI NO: 29839502 NR Description: Probable WRKY transcription factor 32 (WRKY protein 32) >gi|28393378|gb|AAO42113.1| putative WRKY family factor [Arabidopsis thaliana] >gi|28827598|gb|AAO50643.1|
  misc_feature (96)..(411): Homolog of NCBI NO: 3420906 NR Description: zinc finger protein; WRKY1 [Pimpinella
  misc_feature (167)..(420): Homolog of NCBI NO: 14530685 NR Description: WRKY DNA-binding protein [Nicotiana tabacum]
  misc_feature (167)..(387): Homolog of NCBI NO: 4760692 NR Description: transcription factor NtWRKY2 [Nicotiana tabacum]
  misc_feature (161)..(446): Homolog of NCBI NO: 18158619 NR Description: WRKY-like drought-induced protein [Retama raetam]
  misc_feature (98)..(387): Homolog of NCBI NO: 15227612 NR Description: WRKY family transcription factor; protein id: supported by cDNA: gi_13506736 [Arabidopsis thaliana]
  misc_feature (169)..(411): Homolog of NCBI NO: 5917653 NR Description: zinc-finger type transcription factor WRKY1
  misc_feature (291)..(397): Homolog of NCBI NO: 13506733 NR Description: WRKY DNA-binding protein 26 [Arabidopsis thaliana]
MEEDTGIDEAKTYTVEKSEKVEPEKDGLSQFRDEEKSLGADMEDLHDETVRETLGKDQVQGVRENSSVEPNVEDVLEVNETDSVKETVVSAIVPVDEVEENRQVETSPSLAASSDSLTVTPCLSLDPATASTAQDLPLVSVPTKQEQRSDSPVVNRLSVTPVPRTPARDGYNWRKYGQKQVKSPKGSRSYYRCTYTECCAKKIECSNDSGNVVEIVNKGLHTHEPPRKTSFSPREIRVTTAIRPVSEDDTVVEELSIVPSGSDPSASTKEYICESQTLVDRKRHCENEAVEEPEPKRRQSSDSVSKPGKKNKFVVHAAGDVGICGDGYRWRKYGQKMVKGNPHPRNYYRCTSAGCPVRKHIETAVENTKAVIITYKGVHNHDMPVPKKRHGPPSSMLVAAAAPTSMRTRTDDQVNIPTSSQCSVGRESEKQSKEALDVGGEKVMESLGLC

SEQ ID NO: 89199 - protein, 409 aa, Arabidopsis thaliana
  peptide (1)..(409): Ceres Seq. ID no. 12716055
  misc_feature (1)..(405): Homolog of NCBI NO: 22329039 NR Description: WRKY family transcription factor; protein id:
  misc_feature (1)..(406): Homolog of NCBI NO: 25407696 NR Description: hypothetical protein AT4g30930 [imported] - thaliana >gi|2980773|emb|CAA18200.1| putative protein thaliana] >gi|7269995|emb|CAB79811.1| putative protein
  misc_feature (1)..(405): Homolog of NCBI NO: 29839502 NR Description: Probable WRKY transcription factor 32 (WRKY protein 32) >gi|28393378|gb|AAO42113.1| putative WRKY family factor [Arabidopsis thaliana] >gi|28827598|gb|AAO50643.1|
  misc_feature (55)..(370): Homolog of NCBI NO: 3420906 NR Description: zinc finger protein; WRKY1 [Pimpinella
  misc_feature (126)..(379): Homolog of NCBI NO: 14530685 NR Description: WRKY DNA-binding protein [Nicotiana tabacum]
  misc_feature (126)..(346): Homolog of NCBI NO: 4760692 NR Description: transcription factor NtWRKY2 [Nicotiana tabacum]
  misc_feature (120)..(405): Homolog of NCBI NO: 18158619 NR Description: WRKY-like drought-induced protein [Retama raetam]
  misc_feature (57)..(346): Homolog of NCBI NO: 15227612 NR Description: WRKY family transcription factor; protein id: supported by cDNA: gi_13506736 [Arabidopsis thaliana]
  misc_feature (128)..(370): Homolog of NCBI NO: 5917653 NR Description: zinc-finger type transcription factor WRKY1
  misc_feature (250)..(356): Homolog of NCBI NO: 13506733 NR Description: WRKY DNA-binding protein 26 [Arabidopsis thaliana]
MEDLHDETVRETLGKDQVQGVRENSSVEPNVEDVLEVNETDSVKETVVSAIVPVDEVEENRQVETSPSLAASSDSLTVTPCLSLDPATASTAQDLPLVSVPTKQEQRSDSPVVNRLSVTPVPRTPARDGYNWRKYGQKQVKSPKGSRSYYRCTYTECCAKKIECSNDSGNVVEIVNKGLHTHEPPRKTSFSPREIRVTTAIRPVSEDDTVVEELSIVPSGSDPSASTKEYICESQTLVDRKRHCENEAVEEPEPKRRQSSDSVSKPGKKNKFVVHAAGDVGICGDGYRWRKYGQKMVKGNPHPRNYYRCTSAGCPVRKHIETAVENTKAVIITYKGVHNHDMPVPKKRHGPPSSMLVAAAAPTSMRTRTDDQVNIPTSSQCSVGRESEKQSKEALDVGGEKVMESLGLC

SEQ ID NO: 89200 - DNA, 1708 bp, Arabidopsis thaliana
  misc_feature (1)..(1708): Ceres Seq. ID no. 12716089
  misc_feature: MA Experiment ID: 108488 Result: Down-regulated in Transcription
  misc_feature: MA Experiment ID: 108489 Result: Up-regulated in Transcription
  misc_feature: MA Experiment ID: 108561 Result: Up-regulated in Transcription
  misc_feature: MA Experiment 108561 PARAMETER Experiment Name: At_100uM_ABA_cDNA_P Parameter: Timepoint (hr) Value: 6
  misc_feature: MA Experiment 108561 PARAMETER Experiment Name: At_100uM_ABA_cDNA_P Parameter: Tissue Value: Aerial
  misc_feature: MA Experiment 108561 PARAMETER Experiment Name: At_100uM_ABA_cDNA_P Parameter: Treatment Value: 100uM ABA vs. No Treatment
  misc_feature: MA Experiment ID: 108595 Result: Up-regulated in Transcription
  misc_feature: MA Experiment 108595 PARAMETER Experiment Name: At_Ler-pi_Ovule_cDNA_P Parameter: Plant Line Value: null
  misc_feature: MA Experiment ID: 20000070 Result: Up-regulated in Transcription
  misc_feature: MA Experiment 20000070 PARAMETER Experiment Name: At_100uM_ABA_Mutants_cDNA_P Parameter: Plant Line Value: CS24
  misc_feature: MA Experiment 20000070 PARAMETER Experiment Name: At_100uM_ABA_Mutants_cDNA_P Parameter: Timepoint (hr) Value: 6
  misc_feature: MA Experiment 20000070 PARAMETER Experiment Name: At_100uM_ABA_Mutants_cDNA_P Parameter: Tissue Value: Aerial
  misc_feature: MA Experiment 20000070 PARAMETER Experiment Name: At_100uM_ABA_Mutants_cDNA_P Parameter: Treatment Value: 100uM ABA vs. No Treatment
  misc_feature: MA Experiment ID: 20000071 Result: Up-regulated in Transcription
  misc_feature: MA Experiment 20000071 PARAMETER Experiment Name: At_100uM_ABA_Mutants_cDNA_P Parameter: Plant Line Value: CS8104
  misc_feature: MA Experiment 20000071 PARAMETER Experiment Name: At_100uM_ABA_Mutants_cDNA_P Parameter: Timepoint (hr) Value: 6
  misc_feature: MA Experiment 20000071 PARAMETER Experiment Name: At_100uM_ABA_Mutants_cDNA_P Parameter: Tissue Value: Aerial
  misc_feature: MA Experiment 20000071 PARAMETER Experiment Name: At_100uM_ABA_Mutants_cDNA_P Parameter: Treatment Value: 100uM ABA vs. No Treatment
  misc_feature: MA Experiment ID: 20000072 Result: Up-regulated in Transcription
  misc_feature: MA Experiment 20000072 PARAMETER Experiment Name: At_100uM_ABA_Mutants_cDNA_P Parameter: Plant Line Value: CS8105
  misc_feature: MA Experiment 20000072 PARAMETER Experiment Name: At_100uM_ABA_Mutants_cDNA_P Parameter: Timepoint (hr) Value: 6
  misc_feature: MA Experiment 20000072 PARAMETER Experiment Name: At_100uM_ABA_Mutants_cDNA_P Parameter: Tissue Value: Aerial
  misc_feature: MA Experiment 20000072 PARAMETER Experiment Name: At_100uM_ABA_Mutants_cDNA_P Parameter: Treatment Value: 100uM ABA vs. No Treatment
  misc_feature: MA Experiment ID: 20000086 Result: Up-regulated in Transcription
  misc_feature: MA Experiment 20000086 PARAMETER Experiment Name: At_100uM_ABA_Mutants_cDNA_P Parameter: Plant Line Value: CS22
  misc_feature: MA Experiment 20000086 PARAMETER Experiment Name: At_100uM_ABA_Mutants_cDNA_P Parameter: Timepoint (hr) Value: 6
  misc_feature: MA Experiment 20000086 PARAMETER Experiment Name: At_100uM_ABA_Mutants_cDNA_P Parameter: Tissue Value: Aerial
  misc_feature: MA Experiment 20000086 PARAMETER Experiment Name: At_100uM_ABA_Mutants_cDNA_P Parameter: Treatment Value: 100uM ABA vs. No Treatment
  misc_feature: MA Experiment ID: 20000179 Result: Up-regulated in Transcription
  misc_feature: MA Experiment 20000179 PARAMETER Experiment Name: At_Germinating_Seeds_P Parameter: Age (hr) Value: 6 vs. 0
  misc_feature: MA Experiment 20000179 PARAMETER Experiment Name: At_Germinating_Seeds_P Parameter: Tissue Value: Germinating Seeds
  misc_feature: MA Experiment ID: 20000184 Result: Down-regulated in Transcription
  misc_feature: MA Experiment 20000184 PARAMETER Experiment Name: At_Shoots__P Parameter: Age (day) Value: 7
  misc_feature: MA Experiment 20000184 PARAMETER Experiment Name: At_Shoots__P Parameter: Tissue Value: Shoots vs. Whole Plant
  misc_feature: MA Experiment ID: 20000227 Result: Down-regulated in Transcription
  misc_feature: MA Experiment 20000227 PARAMETER Experiment Name: At_Root-Tips-vs-Tops_P Parameter: Tissue Value: Root Tips vs. Root Tops
  misc_feature: MA Experiment ID: 20000234 Result: Down-regulated in Transcription
  misc_feature: MA Experiment 20000234 PARAMETER Experiment Name: At_Siliques_P Parameter: Age (day) Value: 21
  misc_feature: MA Experiment 20000234 PARAMETER Experiment Name: At_Siliques_P Parameter: Organism Value: A. thaliana
  misc_feature: MA Experiment 20000234 PARAMETER Experiment Name: At_Siliques_P Parameter: Plant Line Value: WS
  misc_feature: MA Experiment 20000234 PARAMETER Experiment Name: At_Siliques_P Parameter: Tissue Value: Less Than 5mm Siliques vs. Whole Plant
  misc_feature: MA Experiment ID: 20000235 Result: Down-regulated in Transcription
  misc_feature: MA Experiment 20000235 PARAMETER Experiment Name: At_Siliques_P Parameter: Age (day) Value: 21
  misc_feature: MA Experiment 20000235 PARAMETER Experiment Name: At_Siliques_P Parameter: Organism Value: A. thaliana
  misc_feature: MA Experiment 20000235 PARAMETER Experiment Name: At_Siliques_P Parameter: Plant Line Value: WS
  misc_feature: MA Experiment 20000235 PARAMETER Experiment Name: At_Siliques_P Parameter: Tissue Value: 5-10mm Siliques vs. Whole Plant
  misc_feature: MA Experiment ID: 20000265 Result: Down-regulated in Transcription
  misc_feature: MA Experiment 20000265 PARAMETER Experiment Name: At_Open_Flower_P Parameter: Age (day) Value: 21
  misc_feature: MA Experiment 20000265 PARAMETER Experiment Name: At_Open_Flower_P Parameter: Plant Line Value: WS
  misc_feature: MA Experiment 20000265 PARAMETER Experiment Name: At_Open_Flower_P Parameter: Tissue Value: Closed Flower vs. Whole Plant
  misc_feature: MA Experiment ID: 20000437 Result: Up-regulated in Transcription
  misc_feature: MA Experiment 20000437 PARAMETER Experiment Name: At_Drought_P Parameter: Age (day) Value: 8
  misc_feature: MA Experiment 20000437 PARAMETER Experiment Name: At_Drought_P Parameter: Organism Value: A. thaliana
  misc_feature: MA Experiment 20000437 PARAMETER Experiment Name: At_Drought_P Parameter: Plant Line Value: WS
  misc_feature: MA Experiment 20000437 PARAMETER Experiment Name: At_Drought_P Parameter: Timepoint (hr) Value: 24
  misc_feature: MA Experiment 20000437 PARAMETER Experiment Name: At_Drought_P Parameter: Tissue Value: Whole Plant
  misc_feature: MA Experiment 20000437 PARAMETER Experiment Name: At_Drought_P Parameter: Treatment Value: Drought vs. No Drought
  misc_feature: MA Experiment ID: 20000438 Result: Down-regulated in Transcription
  misc_feature: MA Experiment 20000438 PARAMETER Experiment Name: At_Shoots__P Parameter: Age (day) Value: 14
  misc_feature: MA Experiment 20000438 PARAMETER Experiment Name: At_Shoots__P Parameter: Tissue Value: Shoots vs. Whole Plant
  misc_feature: MA Experiment ID: 20000495 Result: Up-regulated in Transcription
  misc_feature: MA Experiment 20000495 PARAMETER Experiment Name: At_Guard_Cells_P Parameter: Harvest Date Value: 8/2/2002
  misc_feature: MA Experiment 20000495 PARAMETER Experiment Name: At_Guard_Cells_P Parameter: Organism Value: A. thaliana
  misc_feature: MA Experiment 20000495 PARAMETER Experiment Name: At_Guard_Cells_P Parameter: Tissue Value: Guard Cells vs. Leaves
  misc_feature: MA Experiment ID: 20000527 Result: Down-regulated in Transcription
  misc_feature: MA Experiment 20000527 PARAMETER Experiment Name: At_10percent_PEG_P Parameter: Age (day) Value: 20
  misc_feature: MA Experiment 20000527 PARAMETER Experiment Name: At_10percent_PEG_P Parameter: Organism Value: A. thaliana
  misc_feature: MA Experiment 20000527 PARAMETER Experiment Name: At_10percent_PEG_P Parameter: Plant Line Value: WS
  misc_feature: MA Experiment 20000527 PARAMETER Experiment Name: At_10percent_PEG_P Parameter: Timepoint (day) Value: 20
  misc_feature: MA Experiment 20000527 PARAMETER Experiment Name: At_10percent_PEG_P Parameter: Tissue Value: Whole Plant
  misc_feature: MA Experiment 20000527 PARAMETER Experiment Name: At_10percent_PEG_P Parameter: Treatment Value: 10percent PEG vs. No Treatment
  misc_feature: MA Experiment ID: 20000794 Result: Up-regulated in Transcription
  misc_feature: MA Experiment 20000794 PARAMETER Experiment Name: At_Petals_P Parameter: Age (day) Value: 23-25 days
  misc_feature: MA Experiment 20000794 PARAMETER Experiment Name: At_Petals_P Parameter: Plant Line Value: WS
  misc_feature: MA Experiment 20000794 PARAMETER Experiment Name: At_Petals_P Parameter: Tissue Value: Petals vs. Whole plant
  misc_feature: MA Experiment ID: 20001555 Result: Up-regulated in Transcription
  misc_feature: MA Experiment 20001555 PARAMETER Experiment Name: At_Drought_Soil_Dry_P Parameter: Age (day) Value: 24
  misc_feature: MA Experiment 20001555 PARAMETER Experiment Name: At_Drought_Soil_Dry_P Parameter: Organism Value: A. thaliana
  misc_feature: MA Experiment 20001555 PARAMETER Experiment Name: At_Drought_Soil_Dry_P Parameter: Plant Line Value: WS
  misc_feature: MA Experiment 20001555 PARAMETER Experiment Name: At_Drought_Soil_Dry_P Parameter: Post Timepoint (hr) Value: None
  misc_feature: MA Experiment 20001555 PARAMETER Experiment Name: At_Drought_Soil_Dry_P Parameter: Post-Treatment Value: None
  misc_feature: MA Experiment 20001555 PARAMETER Experiment Name: At_Drought_Soil_Dry_P Parameter: Timepoint (day) Value: 10
  misc_feature: MA Experiment 20001555 PARAMETER Experiment Name: At_Drought_Soil_Dry_P Parameter: Treatment Value: Drought vs. No Drought
  misc_feature: MA Experiment ID: 20001556 Result: Up-regulated in Transcription
  misc_feature: MA Experiment 20001556 PARAMETER Experiment Name: At_Drought_Soil_Dry_P Parameter: Age (day) Value: 26
  misc_feature: MA Experiment 20001556 PARAMETER Experiment Name: At_Drought_Soil_Dry_P Parameter: Organism Value: A. thaliana
  misc_feature: MA Experiment 20001556 PARAMETER Experiment Name: At_Drought_Soil_Dry_P Parameter: Plant Line Value: WS
  misc_feature: MA Experiment 20001556 PARAMETER Experiment Name: At_Drought_Soil_Dry_P Parameter: Post Timepoint (hr) Value: None
  misc_feature: MA Experiment 20001556 PARAMETER Experiment Name: At_Drought_Soil_Dry_P Parameter: Post-Treatment Value: None
  misc_feature: MA Experiment 20001556 PARAMETER Experiment Name: At_Drought_Soil_Dry_P Parameter: Timepoint (day) Value: 12
  misc_feature: MA Experiment 20001556 PARAMETER Experiment Name: At_Drought_Soil_Dry_P Parameter: Treatment Value: Drought vs. No Drought
  misc_feature: MA Experiment ID: 20001557 Result: Up-regulated in Transcription
  misc_feature: MA Experiment 20001557 PARAMETER Experiment Name: At_Drought_Soil_Dry_P Parameter: Age (day) Value: 27
  misc_feature: MA Experiment 20001557 PARAMETER Experiment Name: At_Drought_Soil_Dry_P Parameter: Organism Value: A. thaliana
  misc_feature: MA Experiment 20001557 PARAMETER Experiment Name: At_Drought_Soil_Dry_P Parameter: Plant Line Value: WS
  misc_feature: MA Experiment 20001557 PARAMETER Experiment Name: At_Drought_Soil_Dry_P Parameter: Post Timepoint (hr) Value: 3
  misc_feature: MA Experiment 20001557 PARAMETER Experiment Name: At_Drought_Soil_Dry_P Parameter: Post-Treatment Value: Re-Water vs. No Drought
  misc_feature: MA Experiment 20001557 PARAMETER Experiment Name: At_Drought_Soil_Dry_P Parameter: Timepoint (day) Value: 13
  misc_feature: MA Experiment 20001557 PARAMETER Experiment Name: At_Drought_Soil_Dry_P Parameter: Treatment Value: Drought vs. No Drought
  misc_feature: MA Experiment ID: 20001559 Result: Up-regulated in Transcription
  misc_feature: MA Experiment 20001559 PARAMETER Experiment Name: At_Drought_Soil_Dry_P Parameter: Age (day) Value: 28
  misc_feature: MA Experiment 20001559 PARAMETER Experiment Name: At_Drought_Soil_Dry_P Parameter: Organism Value: A. thaliana
  misc_feature: MA Experiment 20001559 PARAMETER Experiment Name: At_Drought_Soil_Dry_P Parameter: Plant Line Value: WS
  misc_feature: MA Experiment 20001559 PARAMETER Experiment Name: At_Drought_Soil_Dry_P Parameter: Post Timepoint (hr) Value: 29
  misc_feature: MA Experiment 20001559 PARAMETER Experiment Name: At_Drought_Soil_Dry_P Parameter: Post-Treatment Value: Re-Water vs. No Drought
  misc_feature: MA Experiment 20001559 PARAMETER Experiment Name: At_Drought_Soil_Dry_P Parameter: Timepoint (day) Value: 14
  misc_feature: MA Experiment 20001559 PARAMETER Experiment Name: At_Drought_Soil_Dry_P Parameter: Treatment Value: Drought vs. No Drought
  misc_feature: MA Experiment ID: 20001904 Result: Up-regulated in Transcription
  misc_feature: MA Experiment 20001904 PARAMETER Experiment Name: At_Drought_Reproduction_P Parameter: Age (day) Value: 37
  misc_feature: MA Experiment 20001904 PARAMETER Experiment Name: At_Drought_Reproduction_P Parameter: Organism Value: A. thaliana
  misc_feature: MA Experiment 20001904 PARAMETER Experiment Name: At_Drought_Reproduction_P Parameter: Plant Line Value: WS
  misc_feature: MA Experiment 20001904 PARAMETER Experiment Name: At_Drought_Reproduction_P Parameter: Timepoint (day) Value: 7
  misc_feature: MA Experiment 20001904 PARAMETER Experiment Name: At_Drought_Reproduction_P Parameter: Tissue Value: Rosettes
  misc_feature: MA Experiment 20001904 PARAMETER Experiment Name: At_Drought_Reproduction_P Parameter: Treatment Value: Drought vs. No Drought
  misc_feature: MA Experiment ID: 20001905 Result: Up-regulated in Transcription
  misc_feature: MA Experiment 20001905 PARAMETER Experiment Name: At_Drought_Reproduction_P Parameter: Age (day) Value: 40
  misc_feature: MA Experiment 20001905 PARAMETER Experiment Name: At_Drought_Reproduction_P Parameter: Organism Value: A. thaliana
  misc_feature: MA Experiment 20001905 PARAMETER Experiment Name: At_Drought_Reproduction_P Parameter: Plant Line Value: WS
  misc_feature: MA Experiment 20001905 PARAMETER Experiment Name: At_Drought_Reproduction_P Parameter: Timepoint (day) Value: 10
  misc_feature: MA Experiment 20001905 PARAMETER Experiment Name: At_Drought_Reproduction_P Parameter: Tissue Value: Rosettes
  misc_feature: MA Experiment 20001905 PARAMETER Experiment Name: At_Drought_Reproduction_P Parameter: Treatment Value: Drought vs. No Drought
  misc_feature: MA Experiment ID: 20001906 Result: Up-regulated in Transcription
  misc_feature: MA Experiment 20001906 PARAMETER Experiment Name: At_Drought_Reproduction_P Parameter: Age (day) Value: 35
  misc_feature: MA Experiment 20001906 PARAMETER Experiment Name: At_Drought_Reproduction_P Parameter: Organism Value: A. thaliana
  misc_feature: MA Experiment 20001906 PARAMETER Experiment Name: At_Drought_Reproduction_P Parameter: Plant Line Value: WS
  misc_feature: MA Experiment 20001906 PARAMETER Experiment Name: At_Drought_Reproduction_P Parameter: Timepoint (day) Value: 5
  misc_feature: MA Experiment 20001906 PARAMETER Experiment Name: At_Drought_Reproduction_P Parameter: Tissue Value: Siliques
  misc_feature: MA Experiment 20001906 PARAMETER Experiment Name: At_Drought_Reproduction_P Parameter: Treatment Value: Drought vs. No Drought
  misc_feature: MA Experiment ID: 20001908 Result: Up-regulated in Transcription
  misc_feature: MA Experiment 20001908 PARAMETER Experiment Name: At_Drought_Reproduction_P Parameter: Age (day) Value: 40
  misc_feature: MA Experiment 20001908 PARAMETER Experiment Name: At_Drought_Reproduction_P Parameter: Organism Value: A. thaliana
  misc_feature: MA Experiment 20001908 PARAMETER Experiment Name: At_Drought_Reproduction_P Parameter: Plant Line Value: WS
  misc_feature: MA Experiment 20001908 PARAMETER Experiment Name: At_Drought_Reproduction_P Parameter: Timepoint (day) Value: 10
  misc_feature: MA Experiment 20001908 PARAMETER Experiment Name: At_Drought_Reproduction_P Parameter: Tissue Value: Siliques
  misc_feature: MA Experiment 20001908 PARAMETER Experiment Name: At_Drought_Reproduction_P Parameter: Treatment Value: Drought vs. No Drought
  misc_feature: MA Experiment ID: 20001911 Result: Up-regulated in Transcription
  misc_feature: MA Experiment 20001911 PARAMETER Experiment Name: At_Drought_Reproduction_P Parameter: Age (day) Value: 40
  misc_feature: MA Experiment 20001911 PARAMETER Experiment Name: At_Drought_Reproduction_P Parameter: Organism Value: A. thaliana
  misc_feature: MA Experiment 20001911 PARAMETER Experiment Name: At_Drought_Reproduction_P Parameter: Plant Line Value: WS
  misc_feature: MA Experiment 20001911 PARAMETER Experiment Name: At_Drought_Reproduction_P Parameter: Timepoint (day) Value: 10
  misc_feature: MA Experiment 20001911 PARAMETER Experiment Name: At_Drought_Reproduction_P Parameter: Tissue Value: Flowers
  misc_feature: MA Experiment 20001911 PARAMETER Experiment Name: At_Drought_Reproduction_P Parameter: Treatment Value: Drought vs. No Drought
aaccttgtagatggtatattctttgaggatattttgatttacttttacttgttcttttgagagagacttcaataaagtttaagtttatatcttttttttttctatttatatttccttgtccccatgtgatttcatttatccccttttcttggaatttacaagcttaatcaaccgagaggcatatcatcaataaggattaaacctgtgtggaaattttgttacaatctactctgtattgaaacttgtttcggtatagtttcctcgtatcaaaggttataccaccatctctctggtatcaggtttctgatcagaagcagcttaaagagcatagtggtgttgcagtttagatggcagtatcagctgattaccaagttaagtttcctgaaagtggtgatctctactctatactagcagctgaagggattgagtttcttttgtcgcatagtggagaggtgccgttggaatatattcatggtaagacgatttgtctcttcttctctgcaatctggtgcaggccctgcaaggacttcactccagagctgataaaactctacgaaaatcttcagaaccgaggagaagaactcgagatcatctttgtctcatttgatcatgatatgacttcattctatgaacatttctggtgcatgccatggcttgcagttcccttcaatttaagcctactcaacaaattaagggacaagtacggaatttctcgtatcccgtcactggttcctctatattcagatgaaatctcagtcgctgaagatgtaattggtctaattgaagactatggttctgaagcctttcctttcactaaaaagcgaaaagaagaactcaaagccatcgatgactccaaacgccttggaggacagttggagaaactccttactcacgagtcccgaaattacgttgttgccagaaatggaagcaaggtgctagtttctaaacttgtgggaaagaccatagggttgtactttggtgcacactggtgtccgcctttccgatctttcacttctcaactcgtagatgtgtacaatgagctggcgactacagataaaggctcctttgaagtcatcttaatttcaacagacagagactcaagagagtttaacatcaacatgaccaacatgccatggcttgcaataccttatgaggacagaacaagacaagatctttgtagaatcttcaacgtcaaactcatacctgcattggtcatcataggacccgaagagaaaacagtgaccacaaacgcgagagagatggtatcattgtatggatcaaggagttttccgttcacggaatcaaggattgttgagttaaaagcttgtttgaagaaggaaggtgattcacttccaaggaaagtgaaagataacaagcatgaacacgagctaaaactggatatggcgaaagcttatgtgtgtgatttctgtaagaagcaaggcaggttttgggcgttttcttgcaatgcttgtgattatgatcttcatcctacatgtgtggaagaagaagaagcattattggtttagcaaaagagacggtcgtcgtgatttgtctgaaagattttgtaatattagtagacaaagaatcgtgatatgtaatgttgtcatgtaaaactcaaagttgaggaattaggatcaacattgtaattatatcttctgtttgtacaattaacatgcttatttcattaataaaattatattctgttttt

SEQ ID NO: 89201 - protein, 392 aa, Arabidopsis thaliana; identical to SEQ ID NO: 22646
  peptide (1)..(392): Ceres Seq. ID no. 12716090
  misc_feature (46)..(83): Pfam Name: Thioredoxin Pfam Description: Thioredoxin
  misc_feature (1)..(392): Homolog of NCBI NO: 18417767 NR Description: similar to putative receptor kinase; protein id: supported by cDNA: 34120., supported by cDNA: gi_17380977, by cDNA: gi_20465608 [Arabidopsis thaliana]
  misc_feature (189)..(392): Homolog of NCBI NO: 7486675 NR Description: hypothetical protein F8F16.60 - Arabidopsis >gi|2827519|emb|CAA16527.1| predicted protein [Arabidopsis >gi|7270026|emb|CAB79842.1| predicted protein [Arabidopsis
  misc_feature (1)..(196): Homolog of NCBI NO: 7488267 NR Description: protein kinase homolog F8F16.70 - Arabidopsis
  misc_feature (13)..(357): Homolog of NCBI NO: 38567893 NR Description: OSJNBa0060N03.13 [Oryza sativa (japonica
  misc_feature (1)..(388): Homolog of NCBI NO: 18406743 NR Description: expressed protein; protein id: At1g60420.1, by cDNA: 34936., supported by cDNA: gi_17529293 [Arabidopsis
  misc_feature (17)..(387): Homolog of NCBI NO: 21592996 NR Description: PDI-like protein [Arabidopsis thaliana]
  misc_feature (17)..(388): Homolog of NCBI NO: 31415911 NR Description: putative trypanothione-dependent peroxidase
  misc_feature (13)..(390): Homolog of NCBI NO: 4056568 NR Description: PDI-like protein [Zea mays]
  misc_feature (19)..(388): Homolog of NCBI NO: 31415915 NR Description: putative trypanothione-dependent peroxidase
  misc_feature (17)..(333): Homolog of NCBI NO: 23304737 NR Description: PDI-like protein [Quercus suber]

SEQ ID NO: 89202 - protein, 303 aa, Arabidopsis thaliana; identical to SEQ ID NO: 22647
  peptide (1)..(303): Ceres Seq. ID no. 12716091
  misc_feature (117)..(154): Pfam Name: Thioredoxin Pfam Description: Thioredoxin
  misc_feature (1)..(303): Homolog of NCBI NO: 18417767 NR Description: similar to putative receptor kinase; protein id: supported by cDNA: 34120., supported by cDNA: gi_17380977, by cDNA: gi_20465608 [Arabidopsis thaliana]
  misc_feature (100)..(303): Homolog of NCBI NO: 7486675 NR Description: hypothetical protein F8F16.60 - Arabidopsis >gi|2827519|emb|CAA16527.1| predicted protein [Arabidopsis >gi|7270026|emb|CAB79842.1| predicted protein [Arabidopsis
  misc_feature (1)..(107): Homolog of NCBI NO: 7488267 NR Description: protein kinase homolog F8F16.70 - Arabidopsis
  misc_feature (1)..(268): Homolog of NCBI NO: 38567893 NR Description: OSJNBa0060N03.13 [Oryza sativa (japonica
  misc_feature (1)..(299): Homolog of NCBI NO: 18406743 NR Description: expressed protein; protein id: At1g60420.1, by cDNA: 34936., supported by cDNA: gi_17529293 [Arabidopsis
  misc_feature (1)..(298): Homolog of NCBI NO: 21592996 NR Description: PDI-like protein [Arabidopsis thaliana]
  misc_feature (1)..(299): Homolog of NCBI NO: 31415911 NR Description: putative trypanothione-dependent peroxidase
  misc_feature (1)..(301): Homolog of NCBI NO: 4056568 NR Description: PDI-like protein [Zea mays]
  misc_feature (1)..(299): Homolog of NCBI NO: 31415915 NR Description: putative trypanothione-dependent peroxidase
  misc_feature (1)..(244): Homolog of NCBI NO: 23304737 NR Description: PDI-like protein [Quercus suber]

SEQ ID NO: 89203 - protein, 293 aa, Arabidopsis thaliana; identical to SEQ ID NO: 22648
  peptide (1)..(293): Ceres Seq. ID no. 12716092
  misc_feature (107)..(144): Pfam Name: Thioredoxin Pfam Description: Thioredoxin
  misc_feature (1)..(293): Homolog of NCBI NO: 18417767 NR Description: similar to putative receptor kinase; protein id: supported by cDNA: 34120., supported by cDNA: gi_17380977, by cDNA: gi_20465608 [Arabidopsis thaliana]
  misc_feature (90)..(293): Homolog of NCBI NO: 7486675 NR Description: hypothetical protein F8F16.60 - Arabidopsis >gi|2827519|emb|CAA16527.1| predicted protein [Arabidopsis >gi|7270026|emb|CAB79842.1| predicted protein [Arabidopsis
  misc_feature (1)..(97): Homolog of NCBI NO: 7488267 NR Description: protein kinase homolog F8F16.70 - Arabidopsis
  misc_feature (1)..(258): Homolog of NCBI NO: 38567893 NR Description: OSJNBa0060N03.13 [Oryza sativa (japonica
  misc_feature (1)..(289): Homolog of NCBI NO: 18406743 NR Description: expressed protein; protein id: At1g60420.1, by cDNA: 34936., supported by cDNA: gi_17529293 [Arabidopsis
  misc_feature (1)..(288): Homolog of NCBI NO: 21592996 NR Description: PDI-like protein [Arabidopsis thaliana]
  misc_feature (1)..(289): Homolog of NCBI NO: 31415911 NR Description: putative trypanothione-dependent peroxidase
  misc_feature (1)..(291): Homolog of NCBI NO: 4056568 NR Description: PDI-like protein [Zea mays]
  misc_feature (1)..(289): Homolog of NCBI NO: 31415915 NR Description: putative trypanothione-dependent peroxidase
  misc_feature (1)..(234): Homolog of NCBI NO: 23304737 NR Description: PDI-like protein [Quercus suber]

SEQ ID NO: 89204 - DNA, 1139 bp, Arabidopsis thaliana
  misc_feature (1)..(1139): Ceres Seq. ID no. 12716093
  misc_feature: MA Experiment ID: 108434 Result: Up-regulated in Transcription
  misc_feature: MA Experiment 108434 PARAMETER Experiment Name: At_Root_Tips_cDNA_P Parameter: Tissue Value: Root Tips
  misc_feature: MA Experiment ID: 108473 Result: Up-regulated in Transcription
  misc_feature: MA Experiment 108473 PARAMETER Experiment Name: At_Drought_Flowers_cDNA_P Parameter: Timepoint (hr) Value: 7 d
  misc_feature: MA Experiment 108473 PARAMETER Experiment Name: At_Drought_Flowers_cDNA_P Parameter: Tissue Value: Flower
  misc_feature: MA Experiment 108473 PARAMETER Experiment Name: At_Drought_Flowers_cDNA_P Parameter: Treatment Value: Drought vs. No Drought
  misc_feature: MA Experiment ID: 108572 Result: Up-regulated in Transcription
  misc_feature: MA Experiment 108572 PARAMETER Experiment Name: At_Drought_cDNA_P Parameter: Timepoint (hr) Value: 1
  misc_feature: MA Experiment 108572 PARAMETER Experiment Name: At_Drought_cDNA_P Parameter: Tissue Value: Aerial
  misc_feature: MA Experiment 108572 PARAMETER Experiment Name: At_Drought_cDNA_P Parameter: Treatment Value: Drought vs. No Drought
  misc_feature: MA Experiment ID: 108573 Result: Up-regulated in Transcription
  misc_feature: MA Experiment 108573 PARAMETER Experiment Name: At_Drought_cDNA_P Parameter: Timepoint (hr) Value: 6
  misc_feature: MA Experiment 108573 PARAMETER Experiment Name: At_Drought_cDNA_P Parameter: Tissue Value: Aerial
  misc_feature: MA Experiment 108573 PARAMETER Experiment Name: At_Drought_cDNA_P Parameter: Treatment Value: Drought vs. No Drought
  misc_feature: MA Experiment ID: 20000069 Result: Up-regulated in Transcription
  misc_feature: MA Experiment 20000069 PARAMETER Experiment Name: At_100uM_ABA_Mutants_cDNA_P Parameter: Plant Line Value: CS23
  misc_feature: MA Experiment 20000069 PARAMETER Experiment Name: At_100uM_ABA_Mutants_cDNA_P Parameter: Timepoint (hr) Value: 6
  misc_feature: MA Experiment 20000069 PARAMETER Experiment Name: At_100uM_ABA_Mutants_cDNA_P Parameter: Tissue Value: Aerial
  misc_feature: MA Experiment 20000069 PARAMETER Experiment Name: At_100uM_ABA_Mutants_cDNA_P Parameter: Treatment Value: 100uM ABA vs. No Treatment
  misc_feature: MA Experiment ID: 20000088 Result: Up-regulated in Transcription
  misc_feature: MA Experiment 20000088 PARAMETER Experiment Name: At_100uM_ABA_Mutants_cDNA_P Parameter: Plant Line Value: Landsberg
  misc_feature: MA Experiment 20000088 PARAMETER Experiment Name: At_100uM_ABA_Mutants_cDNA_P Parameter: Timepoint (hr) Value: 6
  misc_feature: MA Experiment 20000088 PARAMETER Experiment Name: At_100uM_ABA_Mutants_cDNA_P Parameter: Tissue Value: Aerial
  misc_feature: MA Experiment 20000088 PARAMETER Experiment Name: At_100uM_ABA_Mutants_cDNA_P Parameter: Treatment Value: 100uM ABA vs. No Treatment
  misc_feature: MA Experiment ID: 20000089 Result: Up-regulated in Transcription
  misc_feature: MA Experiment ID: 20000224 Result: Down-regulated in Transcription
  misc_feature: MA Experiment ID: 20000437 Result: Up-regulated in Transcription
  misc_feature: MA Experiment 20000437 PARAMETER Experiment Name: At_Drought_P Parameter: Age (day) Value: 8
  misc_feature: MA Experiment 20000437 PARAMETER Experiment Name: At_Drought_P Parameter: Organism Value: A. thaliana
  misc_feature: MA Experiment 20000437 PARAMETER Experiment Name: At_Drought_P Parameter: Plant Line Value: WS
  misc_feature: MA Experiment 20000437 PARAMETER Experiment Name: At_Drought_P Parameter: Timepoint (hr) Value: 24
  misc_feature: MA Experiment 20000437 PARAMETER Experiment Name: At_Drought_P Parameter: Tissue Value: Whole Plant
  misc_feature: MA Experiment 20000437 PARAMETER Experiment Name: At_Drought_P Parameter: Treatment Value: Drought vs. No Drought
  misc_feature: MA Experiment ID: 20001248 Result: Up-regulated in Transcription
  misc_feature: MA Experiment 20001248 PARAMETER Experiment Name: At_Far-red-induction_P Parameter: Age (day) Value: 7
  misc_feature: MA Experiment 20001248 PARAMETER Experiment Name: At_Far-red-induction_P Parameter: Light Value: Far-red vs. White
  misc_feature: MA Experiment 20001248 PARAMETER Experiment Name: At_Far-red-induction_P Parameter: Organism Value: A. thaliana
  misc_feature: MA Experiment 20001248 PARAMETER Experiment Name: At_Far-red-induction_P Parameter: Plant Line Value: Columbia
  misc_feature: MA Experiment 20001248 PARAMETER Experiment Name: At_Far-red-induction_P Parameter: Timepoint (hr) Value: 4
  misc_feature: MA Experiment 20001248 PARAMETER Experiment Name: At_Far-red-induction_P Parameter: Tissue Value: Whole Plant
  misc_feature: MA Experiment ID: 20001450 Result: Up-regulated in Transcription
  misc_feature: MA Experiment 20001450 PARAMETER Experiment Name: At_Far-red-induction_P Parameter: Age (day) Value: 7
  misc_feature: MA Experiment 20001450 PARAMETER Experiment Name: At_Far-red-induction_P Parameter: Light Value: Far-red vs. White
  misc_feature: MA Experiment 20001450 PARAMETER Experiment Name: At_Far-red-induction_P Parameter: Organism Value: A. thaliana
  misc_feature: MA Experiment 20001450 PARAMETER Experiment Name: At_Far-red-induction_P Parameter: Plant Line Value: Columbia
  misc_feature: MA Experiment 20001450 PARAMETER Experiment Name: At_Far-red-induction_P Parameter: Timepoint (hr) Value: 8
  misc_feature: MA Experiment 20001450 PARAMETER Experiment Name: At_Far-red-induction_P Parameter: Tissue Value: Whole Plant
  misc_feature: MA Experiment ID: 20001451 Result: Up-regulated in Transcription
  misc_feature: MA Experiment 20001451 PARAMETER Experiment Name: At_Far-red-induction_P Parameter: Age (day) Value: 7
  misc_feature: MA Experiment 20001451 PARAMETER Experiment Name: At_Far-red-induction_P Parameter: Light Value: Far-red vs. White
  misc_feature: MA Experiment 20001451 PARAMETER Experiment Name: At_Far-red-induction_P Parameter: Organism Value: A. thaliana
  misc_feature: MA Experiment 20001451 PARAMETER Experiment Name: At_Far-red-induction_P Parameter: Plant Line Value: Columbia
  misc_feature: MA Experiment 20001451 PARAMETER Experiment Name: At_Far-red-induction_P Parameter: Timepoint (hr) Value: 24
  misc_feature: MA Experiment 20001451 PARAMETER Experiment Name: At_Far-red-induction_P Parameter: Tissue Value: Whole Plant
  misc_feature: MA Experiment ID: 20001556 Result: Up-regulated in Transcription
  misc_feature: MA Experiment 20001556 PARAMETER Experiment Name: At_Drought_Soil_Dry_P Parameter: Age (day) Value: 26
  misc_feature: MA Experiment 20001556 PARAMETER Experiment Name: At_Drought_Soil_Dry_P Parameter: Organism Value: A. thaliana
  misc_feature: MA Experiment 20001556 PARAMETER Experiment Name: At_Drought_Soil_Dry_P Parameter: Plant Line Value: WS
  misc_feature: MA Experiment 20001556 PARAMETER Experiment Name: At_Drought_Soil_Dry_P Parameter: Post Timepoint (hr) Value: None
  misc_feature: MA Experiment 20001556 PARAMETER Experiment Name: At_Drought_Soil_Dry_P Parameter: Post-Treatment Value: None
  misc_feature: MA Experiment 20001556 PARAMETER Experiment Name: At_Drought_Soil_Dry_P Parameter: Timepoint (day) Value: 12
  misc_feature: MA Experiment 20001556 PARAMETER Experiment Name: At_Drought_Soil_Dry_P Parameter: Treatment Value: Drought vs. No Drought
ctcattaagatacatctcgagaagcagagcagagagaaagagattccgagagagagagagaaggagggagagaaggagcttagtggtctcattaccattaccagctccatacgaaccgaaacgacgccgttcgctcaacccttttctctgcaatctctcttcctcccacgagtttctcagcttttctcggatcatctaattaagagaggagatcttgtctcacggtgggattgatttttctcttcacgaagatcgtgttccaggcaattaactgcagaaaatggtgatgtgggtctttggctatggctctcttgtgtggaacccaggatttcactacgatgagaaagtgttaggtttcatcaagggatataaacgtgtctttgatcttgcttgcattgatcatagaggtacaccagaacaccctgcaagaacttgcaccctcgagaaagctgaagaagccatatgctggggtactgcattctgtgtccgtggaggaccagaaaaagaacgtctggctatggagtacttggaacgtagagagtgtgaatatgatctcaagacaagtgtagacttttacaaggaagatgatcctctaaagccagctgtaactggagtgatagtattcacttctactcctgacaaggtctccaacaagtattatctcggacctgcgccattagaagacatggcaagacaaatcgcgacagccaatggaccatgtggtaacaacagagattatctcttcctgctcgagaaggcaatgcacgacattgggcatgaggaggactatgttatagagctggcaaacgaggtgaggaaggttctggccgagtcctcgactaagaaggtgacaccggtgaaggaatcaagagcaagccgtgtagctaacaagtcgaagaacaatgtccccacggctcatcagatactacctcatcatccagaagctgttgccactacaatataactcttgtagttttcttcttaattggctttagagatgagtgaaatcaggtcttttttttaataataataacaaagtaagtttgttttctgagtagagaagtgtaatctttgtgtgtttcgaactttgttgtcttgtgtgttgtcctaacgagtgcctacttgtgcaccttttgaag

SEQ ID NO: 89205 - protein, 227 aa, Arabidopsis thaliana
  peptide (1)..(227): Ceres Seq. ID no. 12716094
  misc_feature (3)..(181): Pfam Name: ChaC-like protein Pfam Description: ChaC-like protein
  misc_feature (1)..(227): Homolog of NCBI NO: 18417778 NR Description: unknown protein; protein id: At4g31290.1,
  misc_feature (1)..(227): Homolog of NCBI NO: 21593515 NR Description: unknown [Arabidopsis thaliana]
  misc_feature (1)..(215): Homolog of NCBI NO: 15239626 NR Description: putative protein; protein id: At5g26220.1 thaliana] >gi|26450775|dbj|BAC42496.1| unknown protein thaliana] >gi|28950749|gb|AAO63298.1| At5g26220 [Arabidopsis
  misc_feature (1)..(224): Homolog of NCBI NO: 27525010 NR Description: putative cation transporter [Beta procumbens]
  misc_feature (1)..(81): Homolog of NCBI NO: 7486662 NR Description: hypothetical protein F8F16.110 - Arabidopsis >gi|2827524|emb|CAA16532.1| predicted protein [Arabidopsis >gi|7270031|emb|CAB79847.1| predicted protein [Arabidopsis
  misc_feature (148)..(227): Homolog of NCBI NO: 7486662 NR Description: hypothetical protein F8F16.110 - Arabidopsis >gi|2827524|emb|CAA16532.1| predicted protein [Arabidopsis >gi|7270031|emb|CAB79847.1| predicted protein [Arabidopsis
  misc_feature (100)..(165): Homolog of NCBI NO: 7486662 NR Description: hypothetical protein F8F16.110 - Arabidopsis >gi|2827524|emb|CAA16532.1| predicted protein [Arabidopsis >gi|7270031|emb|CAB79847.1| predicted protein [Arabidopsis
  misc_feature (100)..(215): Homolog of NCBI NO: 7486723 NR Description: hypothetical protein F9D12.14 - Arabidopsis >gi|3319340|gb|AAC26229.1| contains similarity to E. coli cation
  misc_feature (1)..(81): Homolog of NCBI NO: 7486723 NR Description: hypothetical protein F9D12.14 - Arabidopsis >gi|3319340|gb|AAC26229.1| contains similarity to E. coli cation
  misc_feature (1)..(185): Homolog of NCBI NO: 18401334 NR Description: expressed protein; protein id: At1g44790.1,
MVMWVFGYGSLVWNPGFHYDEKVLGFIKGYKRVFDLACIDHRGTPEHPARTCTLEKAEEAICWGTAFCVRGGPEKERLAMEYLERRECEYDLKTSVDFYKEDDPLKPAVTGVIVFTSTPDKVSNKYYLGPAPLEDMARQIATANGPCGNNRDYLFLLEKAMHDIGHEEDYVIELANEVRKVLAESSTKKVTPVKESRASRVANKSKNNVPTAHQILPHHPEAVATTI

SEQ ID NO: 89206 - protein, 225 aa, Arabidopsis thaliana
  peptide (1)..(225): Ceres Seq. ID no. 12716095
  misc_feature (1)..(179): Pfam Name: ChaC-like protein Pfam Description: ChaC-like protein
  misc_feature (1)..(225): Homolog of NCBI NO: 18417778 NR Description: unknown protein; protein id: At4g31290.1,
  misc_feature (1)..(225): Homolog of NCBI NO: 21593515 NR Description: unknown [Arabidopsis thaliana]
  misc_feature (1)..(213): Homolog of NCBI NO: 15239626 NR Description: putative protein; protein id: At5g26220.1 thaliana] >gi|26450775|dbj|BAC42496.1| unknown protein thaliana] >gi|28950749|gb|AAO63298.1| At5g26220 [Arabidopsis
  misc_feature (1)..(222): Homolog of NCBI NO: 27525010 NR Description: putative cation transporter [Beta procumbens]
  misc_feature (1)..(79): Homolog of NCBI NO: 7486662 NR Description: hypothetical protein F8F16.110 - Arabidopsis >gi|2827524|emb|CAA16532.1| predicted protein [Arabidopsis >gi|7270031|emb|CAB79847.1| predicted protein [Arabidopsis
  misc_feature (146)..(225): Homolog of NCBI NO: 7486662 NR Description: hypothetical protein F8F16.110 - Arabidopsis >gi|2827524|emb|CAA16532.1| predicted protein [Arabidopsis >gi|7270031|emb|CAB79847.1| predicted protein [Arabidopsis
  misc_feature (98)..(163): Homolog of NCBI NO: 7486662 NR Description: hypothetical protein F8F16.110 - Arabidopsis >gi|2827524|emb|CAA16532.1| predicted protein [Arabidopsis >gi|7270031|emb|CAB79847.1| predicted protein [Arabidopsis
  misc_feature (98)..(213): Homolog of NCBI NO: 7486723 NR Description: hypothetical protein F9D12.14 - Arabidopsis >gi|3319340|gb|AAC26229.1| contains similarity to E. coli cation
  misc_feature (1)..(79): Homolog of NCBI NO: 7486723 NR Description: hypothetical protein F9D12.14 - Arabidopsis >gi|3319340|gb|AAC26229.1| contains similarity to E. coli cation
  misc_feature (1)..(183): Homolog of NCBI NO: 18401334 NR Description: expressed protein; protein id: At1g44790.1,
MWVFGYGSLVWNPGFHYDEKVLGFIKGYKRVFDLACIDHRGTPEHPARTCTLEKAEEAICWGTAFCVRGGPEKERLAMEYLERRECEYDLKTSVDFYKEDDPLKPAVTGVIVFTSTPDKVSNKYYLGPAPLEDMARQIATANGPCGNNRDYLFLLEKAMHDIGHEEDYVIELANEVRKVLAESSTKKVTPVKESRASRVANKSKNNVPTAHQILPHHPEAVATTI

SEQ ID NO: 89207 - protein, 148 aa, Arabidopsis thaliana
  peptide (1)..(148): Ceres Seq. ID no. 12716096
  misc_feature (1)..(102): Pfam Name: ChaC-like protein Pfam Description: ChaC-like protein
  misc_feature (1)..(148): Homolog of NCBI NO: 18417778 NR Description: unknown protein; protein id: At4g31290.1,
  misc_feature (1)..(148): Homolog of NCBI NO: 21593515 NR Description: unknown [Arabidopsis thaliana]
  misc_feature (1)..(136): Homolog of NCBI NO: 15239626 NR Description: putative protein; protein id: At5g26220.1 thaliana] >gi|26450775|dbj|BAC42496.1| unknown protein thaliana] >gi|28950749|gb|AAO63298.1| At5g26220 [Arabidopsis
  misc_feature (1)..(145): Homolog of NCBI NO: 27525010 NR Description: putative cation transporter [Beta procumbens]
  misc_feature (69)..(148): Homolog of NCBI NO: 7486662 NR Description: hypothetical protein F8F16.110 - Arabidopsis >gi|2827524|emb|CAA16532.1| predicted protein [Arabidopsis >gi|7270031|emb|CAB79847.1| predicted protein [Arabidopsis
  misc_feature (21)..(86): Homolog of NCBI NO: 7486662 NR Description: hypothetical protein F8F16.110 - Arabidopsis >gi|2827524|emb|CAA16532.1| predicted protein [Arabidopsis >gi|7270031|emb|CAB79847.1| predicted protein [Arabidopsis
  misc_feature (21)..(136): Homolog of NCBI NO: 7486723 NR Description: hypothetical protein F9D12.14 - Arabidopsis >gi|3319340|gb|AAC26229.1| contains similarity to E. coli cation
  misc_feature (1)..(106): Homolog of NCBI NO: 18401334 NR Description: expressed protein; protein id: At1g44790.1,
  misc_feature (1)..(106): Homolog of NCBI NO: 12083292 NR Description: unknown protein [Arabidopsis thaliana]
  misc_feature (1)..(101): Homolog of NCBI NO: 38344831 NR Description: OSJNBa0064H22.12 [Oryza sativa (japonica
MEYLERRECEYDLKTSVDFYKEDDPLKPAVTGVIVFTSTPDKVSNKYYLGPAPLEDMARQIATANGPCGNNRDYLFLLEKAMHDIGHEEDYVIELANEVRKVLAESSTKKVTPVKESRASRVANKSKNNVPTAHQILPHHPEAVATTI

SEQ ID NO: 89208 - DNA, 1042 bp, Arabidopsis thaliana
  misc_feature (1)..(1042): Ceres Seq. ID no. 12716097
  misc_feature: MA Experiment ID: 108434 Result: Up-regulated in Transcription
  misc_feature: MA Experiment 108434 PARAMETER Experiment Name: At_Root_Tips_cDNA_P Parameter: Tissue Value: Root Tips
  misc_feature: MA Experiment ID: 108461 Result: Down-regulated in Transcription
  misc_feature: MA Experiment 108461 PARAMETER Experiment Name: At_Germinating_Seeds_cDNA_P Parameter: Age (day) Value: 1 vs. 0
  misc_feature: MA Experiment 108461 PARAMETER Experiment Name: At_Germinating_Seeds_cDNA_P Parameter: Tissue Value: Germinating Seeds
  misc_feature: MA Experiment ID: 108462 Result: Down-regulated in Transcription
  misc_feature: MA Experiment 108462 PARAMETER Experiment Name: At_Germinating_Seeds_cDNA_P Parameter: Age (day) Value: 2 vs. 0
  misc_feature: MA Experiment 108462 PARAMETER Experiment Name: At_Germinating_Seeds_cDNA_P Parameter: Tissue Value: Germinating Seeds
  misc_feature: MA Experiment ID: 108463 Result: Down-regulated in Transcription
  misc_feature: MA Experiment 108463 PARAMETER Experiment Name: At_Germinating_Seeds_cDNA_P Parameter: Age (day) Value: 3 vs. 0
  misc_feature: MA Experiment 108463 PARAMETER Experiment Name: At_Germinating_Seeds_cDNA_P Parameter: Tissue Value: Germinating Seeds
  misc_feature: MA Experiment ID: 108464 Result: Down-regulated in Transcription
  misc_feature: MA Experiment 108464 PARAMETER Experiment Name: At_Germinating_Seeds_cDNA_P Parameter: Age (day) Value: 4 vs. 0
  misc_feature: MA Experiment 108464 PARAMETER Experiment Name: At_Germinating_Seeds_cDNA_P Parameter: Tissue Value: Germinating Seeds
  misc_feature: MA Experiment ID: 108573 Result: Up-regulated in Transcription
  misc_feature: MA Experiment 108573 PARAMETER Experiment Name: At_Drought_cDNA_P Parameter: Timepoint (hr) Value: 6
  misc_feature: MA Experiment 108573 PARAMETER Experiment Name: At_Drought_cDNA_P Parameter: Tissue Value: Aerial
  misc_feature: MA Experiment 108573 PARAMETER Experiment Name: At_Drought_cDNA_P Parameter: Treatment Value: Drought vs. No Drought
  misc_feature: MA Experiment ID: 108585 Result: Up-regulated in Transcription
  misc_feature: MA Experiment 108585 PARAMETER Experiment Name: At_5mM_NaNP_cDNA_P Parameter: Timepoint (hr) Value: 6
  misc_feature: MA Experiment 108585 PARAMETER Experiment Name: At_5mM_NaNP_cDNA_P Parameter: Tissue Value: Aerial
  misc_feature: MA Experiment 108585 PARAMETER Experiment Name: At_5mM_NaNP_cDNA_P Parameter: Treatment Value: null
aaaaccaaaaaaaagaaaggagagaggccgacttggggtataagccagagttcttcttctttttcaagcttcttcttctcatcagtcatcaccggaatctaatttatactcgcaaaactcagcgattcgtttcgtttctgacaagtttccaattctacagcaatggatctcaatctcgatgcacctcactccatgggaacgaccatcatcggcgtcacttacaatggaggtgtcgtcctcggagccgactcacgtaccagcaccggtatgtacgtagcgaatcgagcttctgataagattacacaactgacagataatgtctacgtctgccgctctggatcggctgctgattctcaagttgtatctgactatgtccgctacttccttcaccagcatacaattcagcatggacaacccgcaactgttaaggtttctgccaaccttatcaggatgctcgcatataataacaagaacatgctccaaactggtctcatcgttggaggatgggataaatatgagggtgggaagatctacgggatcccactcggtggaactgtagtcgagcaaccgtttgccattggaggctctggttcgagctatctctacgggttcttcgaccaggcttggaaagataacatgaccaaagaagaagcagagcaacttgttgtgaaggcggtttcactagccatcgcccgtgatggagccagtggtggtgtcgtacggactgtcataatcaactcagagggagtgacgagaaacttttaccctggagataagttgcagctttggcacgaagaattggagccccaaaactcactcttagacattctgaacgctgctggtcctgaaccaatggccatgtgatctgcaaacaacgatcattatcttactctgttgggcaaacattttagatatttcattacagtttccagtgtctttaagactttaaactctgtttgaggttctgttgtaatgaatgacccgatctttctgttttaaacggatatcgtgtttcttatggctatggttttaattcctctgt

SEQ ID NO: 89209 - protein, 233 aa, Arabidopsis thaliana; identical to SEQ ID NO: 25662
  peptide (1)..(233): Ceres Seq. ID no. 12716098
  misc_feature (9)..(191): Pfam Name: Proteasome A-type and B-type Pfam Description: Proteasome A-type and B-type
  misc_feature (1)..(233): Homolog of NCBI NO: 15235889 NR Description: 20S proteasome beta subunit A (PBA1); protein id: supported by cDNA: 229., supported by cDNA: gi_15450504, by cDNA: gi_16323317, supported by cDNA: gi_3421098 [Arabidopsis
  misc_feature (11)..(233): Homolog of NCBI NO: 21592365 NR Description: multicatalytic endopeptidase complex, proteasome
  misc_feature (4)..(231): Homolog of NCBI NO: 3024440 NR Description: Proteasome subunit beta type 6 precursor
  misc_feature (1)..(231): Homolog of NCBI NO: 8671502 NR Description: beta 1 subunit of 20S proteasome [Oryza sativa
  misc_feature (5)..(209): Homolog of NCBI NO: 7435894 NR Description: proteasome subunit 1 - slime mold (Dictyostelium >gi|3116216|dbj|BAA25923.1| proteasome subunit [Dictyostelium
  misc_feature (11)..(204): Homolog of NCBI NO: 19113087 NR Description: proteasome component precursor pombe] >gi|17380244|sp|O43063|PSB6_SCHPO Probable proteasome
  misc_feature (1)..(209): Homolog of NCBI NO: 5823090 NR Description: proteasome delta [Oncorhynchus mykiss]
  misc_feature (10)..(206): Homolog of NCBI NO: 17380261 NR Description: Proteasome subunit beta type 6 precursor delta chain) (Macropain delta chain) (Multicatalytic
  misc_feature (10)..(206): Homolog of NCBI NO: 26347247 NR Description: unnamed protein product [Mus musculus]
  misc_feature (10)..(206): Homolog of NCBI NO: 464446 NR Description: Proteasome subunit beta type 6 precursor delta chain) (Macropain delta chain) (Multicatalytic

SEQ ID NO: 89210 - protein, 223 aa, Arabidopsis thaliana; identical to SEQ ID NO: 25663
  peptide (1)..(223): Ceres Seq. ID no. 12716099
  misc_feature (1)..(181): Pfam Name: Proteasome A-type and B-type Pfam Description: Proteasome A-type and B-type
  misc_feature (1)..(223): Homolog of NCBI NO: 15235889 NR Description: 20S proteasome beta subunit A (PBA1); protein id: supported by cDNA: 229., supported by cDNA: gi_15450504, by cDNA: gi_16323317, supported by cDNA: gi_3421098 [Arabidopsis
  misc_feature (1)..(223): Homolog of NCBI NO: 21592365 NR Description: multicatalytic endopeptidase complex, proteasome
  misc_feature (1)..(221): Homolog of NCBI NO: 3024440 NR Description: Proteasome subunit beta type 6 precursor
  misc_feature (1)..(221): Homolog of NCBI NO: 8671502 NR Description: beta 1 subunit of 20S proteasome [Oryza sativa
  misc_feature (1)..(199): Homolog of NCBI NO: 7435894 NR Description: proteasome subunit 1 - slime mold (Dictyostelium >gi|3116216|dbj|BAA25923.1| proteasome subunit [Dictyostelium
  misc_feature (1)..(194): Homolog of NCBI NO: 19113087 NR Description: proteasome component precursor pombe] >gi|17380244|sp|O43063|PSB6_SCHPO Probable proteasome
  misc_feature (1)..(199): Homolog of NCBI NO: 5823090 NR Description: proteasome delta [Oncorhynchus mykiss]
  misc_feature (1)..(196): Homolog of NCBI NO: 17380261 NR Description: Proteasome subunit beta type 6 precursor delta chain) (Macropain delta chain) (Multicatalytic
  misc_feature (1)..(196): Homolog of NCBI NO: 26347247 NR Description: unnamed protein product [Mus musculus]
  misc_feature (1)..(196): Homolog of NCBI NO: 464446 NR Description: Proteasome subunit beta type 6 precursor delta chain) (Macropain delta chain) (Multicatalytic

SEQ ID NO: 89211 - protein, 198 aa, Arabidopsis thaliana; identical to SEQ ID NO: 25664
  peptide (1)..(198): Ceres Seq. ID no. 12716100
  misc_feature (1)..(156): Pfam Name: Proteasome A-type and B-type Pfam Description: Proteasome A-type and B-type
  misc_feature (1)..(198): Homolog of NCBI NO: 15235889 NR Description: 20S proteasome beta subunit A (PBA1); protein id: supported by cDNA: 229., supported by cDNA: gi_15450504, by cDNA: gi_16323317, supported by cDNA: gi_3421098 [Arabidopsis
  misc_feature (1)..(198): Homolog of NCBI NO: 21592365 NR Description: multicatalytic endopeptidase complex, proteasome
  misc_feature (1)..(196): Homolog of NCBI NO: 3024440 NR Description: Proteasome subunit beta type 6 precursor
  misc_feature (1)..(196): Homolog of NCBI NO: 8671502 NR Description: beta 1 subunit of 20S proteasome [Oryza sativa
  misc_feature (1)..(174): Homolog of NCBI NO: 7435894 NR Description: proteasome subunit 1 - slime mold (Dictyostelium >gi|3116216|dbj|BAA25923.1| proteasome subunit [Dictyostelium
  misc_feature (1)..(169): Homolog of NCBI NO: 19113087 NR Description: proteasome component precursor pombe] >gi|17380244|sp|O43063|PSB6_SCHPO Probable proteasome
  misc_feature (1)..(174): Homolog of NCBI NO: 5823090 NR Description: proteasome delta [Oncorhynchus mykiss]
  misc_feature (1)..(171): Homolog of NCBI NO: 17380261 NR Description: Proteasome subunit beta type 6 precursor delta chain) (Macropain delta chain) (Multicatalytic
  misc_feature (1)..(171): Homolog of NCBI NO: 26347247 NR Description: unnamed protein product [Mus musculus]
  misc_feature (1)..(171): Homolog of NCBI NO: 464446 NR Description: Proteasome subunit beta type 6 precursor delta chain) (Macropain delta chain) (Multicatalytic

SEQ ID NO: 89212 - DNA, 1177 bp, Arabidopsis thaliana
  misc_feature (1)..(1177): Ceres Seq. ID no. 12716125
  misc_feature: MA Experiment ID: 108434 Result: Down-regulated in Transcription
  misc_feature: MA Experiment 108434 PARAMETER Experiment Name: At_Root_Tips_cDNA_P Parameter: Tissue Value: Root Tips
  misc_feature: MA Experiment ID: 108573 Result: Up-regulated in Transcription
  misc_feature: MA Experiment 108573 PARAMETER Experiment Name: At_Drought_cDNA_P Parameter: Timepoint (hr) Value: 6
  misc_feature: MA Experiment 108573 PARAMETER Experiment Name: At_Drought_cDNA_P Parameter: Tissue Value: Aerial
  misc_feature: MA Experiment 108573 PARAMETER Experiment Name: At_Drought_cDNA_P Parameter: Treatment Value: Drought vs. No Drought
  misc_feature: MA Experiment ID: 108574 Result: Up-regulated in Transcription
  misc_feature: MA Experiment 108574 PARAMETER Experiment Name: At_Wounding__cDNA_P Parameter: Timepoint (hr) Value: 1
  misc_feature: MA Experiment 108574 PARAMETER Experiment Name: At_Wounding__cDNA_P Parameter: Tissue Value: Aerial
  misc_feature: MA Experiment 108574 PARAMETER Experiment Name: At_Wounding__cDNA_P Parameter: Treatment Value: Wounding vs. No Wounding
  misc_feature: MA Experiment ID: 108579 Result: Up-regulated in Transcription
  misc_feature: MA Experiment 108579 PARAMETER Experiment Name: At_4deg_Cold_cDNA_P Parameter: Temperature (deg C) Value: 4 vs. 22
  misc_feature: MA Experiment 108579 PARAMETER Experiment Name: At_4deg_Cold_cDNA_P Parameter: Timepoint (hr) Value: 6
  misc_feature: MA Experiment 108579 PARAMETER Experiment Name: At_4deg_Cold_cDNA_P Parameter: Tissue Value: Aerial
  misc_feature: MA Experiment ID: 108594 Result: Down-regulated in Transcription
  misc_feature: MA Experiment 108594 PARAMETER Experiment Name: At_Ler-rhl_Root_cDNA_P Parameter: Plant Line Value: null
  misc_feature: MA Experiment ID: 108605 Result: Up-regulated in Transcription
  misc_feature: MA Experiment 108605 PARAMETER Experiment Name: At_100uM_ABA_cDNA_P Parameter: Timepoint (hr) Value: 6
  misc_feature: MA Experiment 108605 PARAMETER Experiment Name: At_100uM_ABA_cDNA_P Parameter: Tissue Value: Aerial
  misc_feature: MA Experiment 108605 PARAMETER Experiment Name: At_100uM_ABA_cDNA_P Parameter: Treatment Value: 100uM ABA vs. No Treatment
  misc_feature: MA Experiment ID: 108607 Result: Up-regulated in Transcription
  misc_feature: MA Experiment 108607 PARAMETER Experiment Name: At_100uM_ABA_cDNA_P Parameter: Timepoint (hr) Value: 4
  misc_feature: MA Experiment 108607 PARAMETER Experiment Name: At_100uM_ABA_cDNA_P Parameter: Tissue Value: Aerial
  misc_feature: MA Experiment 108607 PARAMETER Experiment Name: At_100uM_ABA_cDNA_P Parameter: Treatment Value: 100uM ABA vs. No Treatment
  misc_feature: MA Experiment ID: 20000069 Result: Up-regulated in Transcription
  misc_feature: MA Experiment 20000069 PARAMETER Experiment Name: At_100uM_ABA_Mutants_cDNA_P Parameter: Plant Line Value: CS23
  misc_feature: MA Experiment 20000069 PARAMETER Experiment Name: At_100uM_ABA_Mutants_cDNA_P Parameter: Timepoint (hr) Value: 6
  misc_feature: MA Experiment 20000069 PARAMETER Experiment Name: At_100uM_ABA_Mutants_cDNA_P Parameter: Tissue Value: Aerial
  misc_feature: MA Experiment 20000069 PARAMETER Experiment Name: At_100uM_ABA_Mutants_cDNA_P Parameter: Treatment Value: 100uM ABA vs. No Treatment
  misc_feature: MA Experiment ID: 20000070 Result: Up-regulated in Transcription
  misc_feature: MA Experiment 20000070 PARAMETER Experiment Name: At_100uM_ABA_Mutants_cDNA_P Parameter: Plant Line Value: CS24
  misc_feature: MA Experiment 20000070 PARAMETER Experiment Name: At_100uM_ABA_Mutants_cDNA_P Parameter: Timepoint (hr) Value: 6
  misc_feature: MA Experiment 20000070 PARAMETER Experiment Name: At_100uM_ABA_Mutants_cDNA_P Parameter: Tissue Value: Aerial
  misc_feature: MA Experiment 20000070 PARAMETER Experiment Name: At_100uM_ABA_Mutants_cDNA_P Parameter: Treatment Value: 100uM ABA vs. No Treatment
  misc_feature: MA Experiment ID: 20000071 Result: Up-regulated in Transcription
  misc_feature: MA Experiment 20000071 PARAMETER Experiment Name: At_100uM_ABA_Mutants_cDNA_P Parameter: Plant Line Value: CS8104
  misc_feature: MA Experiment 20000071 PARAMETER Experiment Name: At_100uM_ABA_Mutants_cDNA_P Parameter: Timepoint (hr) Value: 6
  misc_feature: MA Experiment 20000071 PARAMETER Experiment Name: At_100uM_ABA_Mutants_cDNA_P Parameter: Tissue Value: Aerial
  misc_feature: MA Experiment 20000071 PARAMETER Experiment Name: At_100uM_ABA_Mutants_cDNA_P Parameter: Treatment Value: 100uM ABA vs. No Treatment
  misc_feature: MA Experiment ID: 20000072 Result: Up-regulated in Transcription
  misc_feature: MA Experiment 20000072 PARAMETER Experiment Name: At_100uM_ABA_Mutants_cDNA_P Parameter: Plant Line Value: CS8105
  misc_feature: MA Experiment 20000072 PARAMETER Experiment Name: At_100uM_ABA_Mutants_cDNA_P Parameter: Timepoint (hr) Value: 6
  misc_feature: MA Experiment 20000072 PARAMETER Experiment Name: At_100uM_ABA_Mutants_cDNA_P Parameter: Tissue Value: Aerial
  misc_feature: MA Experiment 20000072 PARAMETER Experiment Name: At_100uM_ABA_Mutants_cDNA_P Parameter: Treatment Value: 100uM ABA vs. No Treatment
  misc_feature: MA Experiment ID: 20000086 Result: Up-regulated in Transcription
  misc_feature: MA Experiment 20000086 PARAMETER Experiment Name: At_100uM_ABA_Mutants_cDNA_P Parameter: Plant Line Value: CS22
  misc_feature: MA Experiment 20000086 PARAMETER Experiment Name: At_100uM_ABA_Mutants_cDNA_P Parameter: Timepoint (hr) Value: 6
  misc_feature: MA Experiment 20000086 PARAMETER Experiment Name: At_100uM_ABA_Mutants_cDNA_P Parameter: Tissue Value: Aerial
  misc_feature: MA Experiment 20000086 PARAMETER Experiment Name: At_100uM_ABA_Mutants_cDNA_P Parameter: Treatment Value: 100uM ABA vs. No Treatment
  misc_feature: MA Experiment ID: 20000087 Result: Up-regulated in Transcription
  misc_feature: MA Experiment 20000087 PARAMETER Experiment Name: At_100uM_ABA_Mutants_cDNA_P Parameter: Plant Line Value: WS
  misc_feature: MA Experiment 20000087 PARAMETER Experiment Name: At_100uM_ABA_Mutants_cDNA_P Parameter: Timepoint (hr) Value: 6
  misc_feature: MA Experiment 20000087 PARAMETER Experiment Name: At_100uM_ABA_Mutants_cDNA_P Parameter: Tissue Value: Aerial
  misc_feature: MA Experiment 20000087 PARAMETER Experiment Name: At_100uM_ABA_Mutants_cDNA_P Parameter: Treatment Value: 100uM ABA vs. No Treatment
  misc_feature: MA Experiment ID: 20000088 Result: Up-regulated in Transcription
  misc_feature: MA Experiment 20000088 PARAMETER Experiment Name: At_100uM_ABA_Mutants_cDNA_P Parameter: Plant Line Value: Landsberg
  misc_feature: MA Experiment 20000088 PARAMETER Experiment Name: At_100uM_ABA_Mutants_cDNA_P Parameter: Timepoint (hr) Value: 6
  misc_feature: MA Experiment 20000088 PARAMETER Experiment Name: At_100uM_ABA_Mutants_cDNA_P Parameter: Tissue Value: Aerial
  misc_feature: MA Experiment 20000088 PARAMETER Experiment Name: At_100uM_ABA_Mutants_cDNA_P Parameter: Treatment Value: 100uM ABA vs. No Treatment
  misc_feature: MA Experiment ID: 20000111 Result: Down-regulated in Transcription
  misc_feature: MA Experiment 20000111 PARAMETER Experiment Name: At_42deg_Heat_cDNA_P Parameter: Temperature (deg C) Value: 42 vs. 22
  misc_feature: MA Experiment 20000111 PARAMETER Experiment Name: At_42deg_Heat_cDNA_P Parameter: Timepoint (hr) Value: 6
  misc_feature: MA Experiment 20000111 PARAMETER Experiment Name: At_42deg_Heat_cDNA_P Parameter: Tissue Value: Aerial
  misc_feature: MA Experiment ID: 20000113 Result: Down-regulated in Transcription
  misc_feature: MA Experiment 20000113 PARAMETER Experiment Name: At_42deg_Heat_cDNA_P Parameter: Temperature (deg C) Value: 42 vs. 22
  misc_feature: MA Experiment 20000113 PARAMETER Experiment Name: At_42deg_Heat_cDNA_P Parameter: Timepoint (hr) Value: 8
  misc_feature: MA Experiment 20000113 PARAMETER Experiment Name: At_42deg_Heat_cDNA_P Parameter: Tissue Value: Aerial
  misc_feature: MA Experiment ID: 20000117 Result: Up-regulated in Transcription
  misc_feature: MA Experiment 20000117 PARAMETER Experiment Name: At_100uM_ABA_Mutants_cDNA_P Parameter: Plant Line Value: Columbia
  misc_feature: MA Experiment 20000117 PARAMETER Experiment Name: At_100uM_ABA_Mutants_cDNA_P Parameter: Timepoint (hr) Value: 6
  misc_feature: MA Experiment 20000117 PARAMETER Experiment Name: At_100uM_ABA_Mutants_cDNA_P Parameter: Tissue Value: Aerial
  misc_feature: MA Experiment 20000117 PARAMETER Experiment Name: At_100uM_ABA_Mutants_cDNA_P Parameter: Treatment Value: 100uM ABA vs. No Treatment
  misc_feature: MA Experiment ID: 20000169 Result: Up-regulated in Transcription
  misc_feature: MA Experiment 20000169 PARAMETER Experiment Name: At_100uM_ABA_P Parameter: Age (day) Value: 14
  misc_feature: MA Experiment 20000169 PARAMETER Experiment Name: At_100uM_ABA_P Parameter: Organism Value: A. thaliana
  misc_feature: MA Experiment 20000169 PARAMETER Experiment Name: At_100uM_ABA_P Parameter: Plant Line Value: WS
  misc_feature: MA Experiment 20000169 PARAMETER Experiment Name: At_100uM_ABA_P Parameter: Timepoint (hr) Value: 6
  misc_feature: MA Experiment 20000169 PARAMETER Experiment Name: At_100uM_ABA_P Parameter: Tissue Value: Aerial
  misc_feature: MA Experiment 20000169 PARAMETER Experiment Name: At_100uM_ABA_P Parameter: Treatment Value: 100uM ABA vs. No Treatment
  misc_feature: MA Experiment ID: 20000173 Result: Down-regulated in Transcription
  misc_feature: MA Experiment 20000173 PARAMETER Experiment Name: At_42deg_Heat_P Parameter: Age (day) Value: 14
  misc_feature: MA Experiment 20000173 PARAMETER Experiment Name: At_42deg_Heat_P Parameter: Organism Value: A. thaliana
  misc_feature: MA Experiment 20000173 PARAMETER Experiment Name: At_42deg_Heat_P Parameter: Plant Line Value: WS
  misc_feature: MA Experiment 20000173 PARAMETER Experiment Name: At_42deg_Heat_P Parameter: Temperature (deg C) Value: 42 vs. 22
  misc_feature: MA Experiment 20000173 PARAMETER Experiment Name: At_42deg_Heat_P Parameter: Timepoint (hr) Value: 6
  misc_feature: MA Experiment 20000173 PARAMETER Experiment Name: At_42deg_Heat_P Parameter: Tissue Value: Aerial
  misc_feature: MA Experiment ID: 20000184 Result: Down-regulated in Transcription
  misc_feature: MA Experiment 20000184 PARAMETER Experiment Name: At_Shoots__P Parameter: Age (day) Value: 7
  misc_feature: MA Experiment 20000184 PARAMETER Experiment Name: At_Shoots__P Parameter: Tissue Value: Shoots vs. Whole Plant
  misc_feature: MA Experiment ID: 20000227 Result: Down-regulated in Transcription
  misc_feature: MA Experiment 20000227 PARAMETER Experiment Name: At_Root-Tips-vs-Tops_P Parameter: Tissue Value: Root Tips vs. Root Tops
  misc_feature: MA Experiment ID: 20000234 Result: Down-regulated in Transcription
  misc_feature: MA Experiment 20000234 PARAMETER Experiment Name: At_Siliques_P Parameter: Age (day) Value: 21
  misc_feature: MA Experiment 20000234 PARAMETER Experiment Name: At_Siliques_P Parameter: Organism Value: A. thaliana
  misc_feature: MA Experiment 20000234 PARAMETER Experiment Name: At_Siliques_P Parameter: Plant Line Value: WS
  misc_feature: MA Experiment 20000234 PARAMETER Experiment Name: At_Siliques_P Parameter: Tissue Value: Less Than 5mm Siliques vs. Whole Plant
  misc_feature: MA Experiment ID: 20000265 Result: Down-regulated in Transcription
  misc_feature: MA Experiment 20000265 PARAMETER Experiment Name: At_Open_Flower_P Parameter: Age (day) Value: 21
  misc_feature: MA Experiment 20000265 PARAMETER Experiment Name: At_Open_Flower_P Parameter: Plant Line Value: WS
  misc_feature: MA Experiment 20000265 PARAMETER Experiment Name: At_Open_Flower_P Parameter: Tissue Value: Closed Flower vs. Whole Plant
  misc_feature: MA Experiment ID: 20000437 Result: Up-regulated in Transcription
  misc_feature: MA Experiment 20000437 PARAMETER Experiment Name: At_Drought_P Parameter: Age (day) Value: 8
  misc_feature: MA Experiment 20000437 PARAMETER Experiment Name: At_Drought_P Parameter: Organism Value: A. thaliana
  misc_feature: MA Experiment 20000437 PARAMETER Experiment Name: At_Drought_P Parameter: Plant Line Value: WS
  misc_feature: MA Experiment 20000437 PARAMETER Experiment Name: At_Drought_P Parameter: Timepoint (hr) Value: 24
  misc_feature: MA Experiment 20000437 PARAMETER Experiment Name: At_Drought_P Parameter: Tissue Value: Whole Plant
  misc_feature: MA Experiment 20000437 PARAMETER Experiment Name: At_Drought_P Parameter: Treatment Value: Drought vs. No Drought
  misc_feature: MA Experiment ID: 20000460 Result: Up-regulated in Transcription
  misc_feature: MA Experiment 20000460 PARAMETER Experiment Name: At_10percent_PEG_P Parameter: Age (day) Value: 12
  misc_feature: MA Experiment 20000460 PARAMETER Experiment Name: At_10percent_PEG_P Parameter: Organism Value: A. thaliana
  misc_feature: MA Experiment 20000460 PARAMETER Experiment Name: At_10percent_PEG_P Parameter: Plant Line Value: WS
  misc_feature: MA Experiment 20000460 PARAMETER Experiment Name: At_10percent_PEG_P Parameter: Timepoint (day) Value: 12
  misc_feature: MA Experiment 20000460 PARAMETER Experiment Name: At_10percent_PEG_P Parameter: Tissue Value: Whole Plant
  misc_feature: MA Experiment 20000460 PARAMETER Experiment Name: At_10percent_PEG_P Parameter: Treatment Value: 10percent PEG vs. No Treatment
  misc_feature: MA Experiment ID: 20000495 Result: Down-regulated in Transcription
  misc_feature: MA Experiment 20000495 PARAMETER Experiment Name: At_Guard_Cells_P Parameter: Harvest Date Value: 8/2/2002
  misc_feature: MA Experiment 20000495 PARAMETER Experiment Name: At_Guard_Cells_P Parameter: Organism Value: A. thaliana
  misc_feature: MA Experiment 20000495 PARAMETER Experiment Name: At_Guard_Cells_P Parameter: Tissue Value: Guard Cells vs. Leaves
  misc_feature: MA Experiment ID: 20000496 Result: Down-regulated in Transcription
  misc_feature: MA Experiment 20000496 PARAMETER Experiment Name: At_Guard_Cells_P Parameter: Harvest Date Value: 7/19/2002
  misc_feature: MA Experiment 20000496 PARAMETER Experiment Name: At_Guard_Cells_P Parameter: Organism Value: Canola
  misc_feature: MA Experiment 20000496 PARAMETER Experiment Name: At_Guard_Cells_P Parameter: Tissue Value: Guard Cells vs. Leaves
  misc_feature: MA Experiment ID: 20001911 Result: Up-regulated in Transcription
  misc_feature: MA Experiment 20001911 PARAMETER Experiment Name: At_Drought_Reproduction_P Parameter: Age (day) Value: 40
  misc_feature: MA Experiment 20001911 PARAMETER Experiment Name: At_Drought_Reproduction_P Parameter: Organism Value: A. thaliana
  misc_feature: MA Experiment 20001911 PARAMETER Experiment Name: At_Drought_Reproduction_P Parameter: Plant Line Value: WS
  misc_feature: MA Experiment 20001911 PARAMETER Experiment Name: At_Drought_Reproduction_P Parameter: Timepoint (day) Value: 10
  misc_feature: MA Experiment 20001911 PARAMETER Experiment Name: At_Drought_Reproduction_P Parameter: Tissue Value: Flowers
  misc_feature: MA Experiment 20001911 PARAMETER Experiment Name: At_Drought_Reproduction_P Parameter: Treatment Value: Drought vs. No Drought
atcacaaccatttctctctctcgtcttcgtcttcttcttcttcaacgttcctctccaaaatcctcagaccaagaaatcatcatggccgtcgatctaatgcgtttccctaagatagatgatcaaacggctattcaggaagctgcatcgcaaggtttacaaagtatggaacatctgatccgtgtcctctctaaccgtcccgaacaacaacacaacgttgactgctccgagatcactgacttcaccgtttctaaattcaaaaccgtcatttctctccttaaccgtactggtcacgctcggttcagacgcggaccggttcactccacttcctctgccgcatctcagaaactacagagtcagatcgttaaaaatactcaacctgaggctccgatagtgagaacaactacgaatcaccctcaaatcgttcctccaccgtctagtgtaacactcgatttctctaaaccaagcatcttcggcaccaaagctaagagcgccgagctggaattctccaaagaaaacttcagtgtttctttaaactcctcattcatgtcgtcggcgataaccggagacggcagcgtctccaatggaaaaatcttccttgcttctgctccgttgcagcctgttaactcttccggaaaaccaccgttggctggtcatccttacagaaagagatgtctcgagcatgagcactcagagagtttctccggaaaagtctccggctccgcctacggaaagtgccattgcaagaaaagcaggaaaaatcggatgaagagaaccgtgagagtaccggcgataagtgcaaagatcgccgatattccaccggacgaatattcgtggaggaagtacggacaaaaaccgatcaagggctcaccacacccacgtggttactacaagtgcagtacattcagaggatgtccagcgaggaaacacgtggaacgagcattagatgatccagcgatgcttattgtgacatacgaaggagagcaccgtcataaccaatccgcgatgcaggagaatatttcttcttcaggcattaatgatttagtgtttgcctcggcttgacttttttttgtactatttgttttttgattttttgagtactttagatggattgaaatttgtaaatttttttattaagaaatcaatttaaatagagaaaaattagtggtggtgcaatgtt

SEQ ID NO: 89213 - protein, 352 aa, Arabidopsis thaliana
  peptide (1)..(352): Ceres Seq. ID no. 12716126
  misc_feature (272)..(332): Pfam Name: WRKY DNA -binding domain Pfam Description: WRKY DNA -binding domain
  misc_feature (28)..(352): Homolog of NCBI NO: 30689072 NR Description: WRKY family transcription factor [Arabidopsis
  misc_feature (28)..(352): Homolog of NCBI NO: 16604573 NR Description: putative putaive DNA-binding protein [Arabidopsis
  misc_feature (28)..(352): Homolog of NCBI NO: 21537078 NR Description: putaive DNA-binding protein [Arabidopsis thaliana]
  misc_feature (28)..(352): Homolog of NCBI NO: 22329054 NR Description: WRKY family transcription factor; protein id: supported by cDNA: gi_15384214 [Arabidopsis thaliana]
  misc_feature (28)..(352): Homolog of NCBI NO: 18400580 NR Description: WRKY family transcription factor; protein id: supported by cDNA: gi_15991743 [Arabidopsis thaliana] WRKY transcription factor 17 [Arabidopsis thaliana]
  misc_feature (28)..(347): Homolog of NCBI NO: 25348152 NR Description: probable WRKY-type DNA binding protein [imported]
  misc_feature (28)..(338): Homolog of NCBI NO: 4760596 NR Description: DNA-binding protein NtWRKY3 [Nicotiana tabacum]
  misc_feature (30)..(334): Homolog of NCBI NO: 38568048 NR Description: OSJNBa0065J03.18 [Oryza sativa (japonica
  misc_feature (28)..(344): Homolog of NCBI NO: 7488950 NR Description: DNA-binding protein WRKY3 - parsley
  misc_feature (147)..(330): Homolog of NCBI NO: 4894963 NR Description: DNA-binding protein WRKY3 [Avena sativa]
ITTISLSRLRLLLLQRSSPKSSDQEIIMAVDLMRFPKIDDQTAIQEAASQGLQSMEHLIRVLSNRPEQQHNVDCSEITDFTVSKFKTVISLLNRTGHARFRRGPVHSTSSAASQKLQSQIVKNTQPEAPIVRTTTNHPQIVPPPSSVTLDFSKPSIFGTKAKSAELEFSKENFSVSLNSSFMSSAITGDGSVSNGKIFLASAPLQPVNSSGKPPLAGHPYRKRCLEHEHSESFSGKVSGSAYGKCHCKKSRKNRMKRTVRVPAISAKIADIPPDEYSWRKYGQKPIKGSPHPRGYYKCSTFRGCPARKHVERALDDPAMLIVTYEGEHRHNQSAMQENISSSGINDLVFASA

SEQ ID NO: 89214 - protein, 325 aa, Arabidopsis thaliana; identical to SEQ ID NO: 28793
  peptide (1)..(325): Ceres Seq. ID no. 12716127
  misc_feature (245)..(305): Pfam Name: WRKY DNA -binding domain Pfam Description: WRKY DNA -binding domain
  misc_feature (1)..(325): Homolog of NCBI NO: 30689072 NR Description: WRKY family transcription factor [Arabidopsis
  misc_feature (1)..(325): Homolog of NCBI NO: 16604573 NR Description: putative putaive DNA-binding protein [Arabidopsis
  misc_feature (1)..(325): Homolog of NCBI NO: 21537078 NR Description: putaive DNA-binding protein [Arabidopsis thaliana]
  misc_feature (1)..(325): Homolog of NCBI NO: 22329054 NR Description: WRKY family transcription factor; protein id: supported by cDNA: gi_15384214 [Arabidopsis thaliana]
  misc_feature (1)..(325): Homolog of NCBI NO: 18400580 NR Description: WRKY family transcription factor; protein id: supported by cDNA: gi_15991743 [Arabidopsis thaliana] WRKY transcription factor 17 [Arabidopsis thaliana]
  misc_feature (1)..(320): Homolog of NCBI NO: 25348152 NR Description: probable WRKY-type DNA binding protein [imported]
  misc_feature (1)..(311): Homolog of NCBI NO: 4760596 NR Description: DNA-binding protein NtWRKY3 [Nicotiana tabacum]
  misc_feature (3)..(307): Homolog of NCBI NO: 38568048 NR Description: OSJNBa0065J03.18 [Oryza sativa (japonica
  misc_feature (1)..(317): Homolog of NCBI NO: 7488950 NR Description: DNA-binding protein WRKY3 - parsley
  misc_feature (120)..(303): Homolog of NCBI NO: 4894963 NR Description: DNA-binding protein WRKY3 [Avena sativa]

SEQ ID NO: 89215 - protein, 320 aa, Arabidopsis thaliana; identical to SEQ ID NO: 28794
  peptide (1)..(320): Ceres Seq. ID no. 12716128
  misc_feature (240)..(300): Pfam Name: WRKY DNA -binding domain Pfam Description: WRKY DNA -binding domain
  misc_feature (1)..(320): Homolog of NCBI NO: 30689072 NR Description: WRKY family transcription factor [Arabidopsis
  misc_feature (1)..(320): Homolog of NCBI NO: 16604573 NR Description: putative putaive DNA-binding protein [Arabidopsis
  misc_feature (1)..(320): Homolog of NCBI NO: 21537078 NR Description: putaive DNA-binding protein [Arabidopsis thaliana]
  misc_feature (1)..(320): Homolog of NCBI NO: 22329054 NR Description: WRKY family transcription factor; protein id: supported by cDNA: gi_15384214 [Arabidopsis thaliana]
  misc_feature (1)..(320): Homolog of NCBI NO: 18400580 NR Description: WRKY family transcription factor; protein id: supported by cDNA: gi_15991743 [Arabidopsis thaliana] WRKY transcription factor 17 [Arabidopsis thaliana]
  misc_feature (1)..(315): Homolog of NCBI NO: 25348152 NR Description: probable WRKY-type DNA binding protein [imported]
  misc_feature (1)..(306): Homolog of NCBI NO: 4760596 NR Description: DNA-binding protein NtWRKY3 [Nicotiana tabacum]
  misc_feature (1)..(302): Homolog of NCBI NO: 38568048 NR Description: OSJNBa0065J03.18 [Oryza sativa (japonica
  misc_feature (1)..(312): Homolog of NCBI NO: 7488950 NR Description: DNA-binding protein WRKY3 - parsley
  misc_feature (115)..(298): Homolog of NCBI NO: 4894963 NR Description: DNA-binding protein WRKY3 [Avena sativa]

SEQ ID NO: 89216 - DNA, 1572 bp, Arabidopsis thaliana
  misc_feature (1)..(1572): Ceres Seq. ID no. 12716133
  misc_feature: MA Experiment ID: 20000307 Result: Up-regulated in Transcription
  misc_feature: MA Experiment 20000307 PARAMETER Experiment Name: At_Germinating_Seeds_Sub_P Parameter: Age (hr) Value: 24 vs. 0
  misc_feature: MA Experiment 20000307 PARAMETER Experiment Name: At_Germinating_Seeds_Sub_P Parameter: Organism Value: A. thaliana
  misc_feature: MA Experiment 20000307 PARAMETER Experiment Name: At_Germinating_Seeds_Sub_P Parameter: Plant Line Value: WS
  misc_feature: MA Experiment 20000307 PARAMETER Experiment Name: At_Germinating_Seeds_Sub_P Parameter: Tissue Value: Germinating Seeds
  misc_feature: MA Experiment ID: 20000328 Result: Down-regulated in Transcription
  misc_feature: MA Experiment 20000328 PARAMETER Experiment Name: At_42deg_Heat_Sub_P Parameter: Age (day) Value: 14
  misc_feature: MA Experiment 20000328 PARAMETER Experiment Name: At_42deg_Heat_Sub_P Parameter: Organism Value: A. thaliana
  misc_feature: MA Experiment 20000328 PARAMETER Experiment Name: At_42deg_Heat_Sub_P Parameter: Plant Line Value: WS
  misc_feature: MA Experiment 20000328 PARAMETER Experiment Name: At_42deg_Heat_Sub_P Parameter: Temperature (deg C) Value: 42 vs. 22
  misc_feature: MA Experiment 20000328 PARAMETER Experiment Name: At_42deg_Heat_Sub_P Parameter: Timepoint (hr) Value: 6
  misc_feature: MA Experiment 20000328 PARAMETER Experiment Name: At_42deg_Heat_Sub_P Parameter: Tissue Value: Aerial
  misc_feature: MA Experiment ID: 20000440 Result: Up-regulated in Transcription
  misc_feature: MA Experiment 20000440 PARAMETER Experiment Name: At_Closed-Flower__Sub_P Parameter: Tissue Value: Closed Flower vs. Whole Plant
atgaacaacccgacactcttttctcctaaaagtccacactttttccagcctcttcttcccggtttcaagagccacatcaacattcctgtgaagttcttctccaagtatatcaaggggaaacacgaaggaaagaccgtaaaattgagatcagattcttcgaagagaacatggaaagtgaagattgagggccatacgctcaccgacggttggaaagagtttgtggaggcacatgatcttcgaatcagtgacttcgtcatcttcaaacacaaaggagacatgttcttcgatgtcactgctttaggatccagttgctgtgaggtccaatacgcaccatcttgtagtcacggtgaaaacgaagagagtgatgaaattggggaatcttcaagaaaggagaaagaaattgaggagaatatagaaacagaacccgatcagttttcatcagatctaacatgttttagccaatctgtgaccacttcaaacctaatgagagattcagtgggtgtgcccagagatttcgcaaagcgatatggtttcaacataggaaggcatgagatagttttgatgaacgaagaaggaaagccatgggaatcagaagttataagttataagtctggtaaagttattgtagctggaggttggaaaagtctctgcactgaaagtaaattagaagttggagattcttgtacatttaaactgcttcacaacgccaaaatgcccgtgtttcggctctgcagcaagctcccaaaggctggagcagaggctcggccactcaagagagctcgagtccaaagatggagccaagagagtagatcgaagcatgacgtgagggagaagatagctgaagaaggagaaccttctcgtcgcaatcgcacatctaacaagtctactggtgatcaaggaaagttgcagcaaacgcaatcttgctttatctttgatcatgtggctaagattggaacctacgagaggatacactggttgtctcttccaaggaattttgttaggtccgatggtctgattaaaggaagtaacaagattgttctaatgaatgaaggagcaaggacatggacgcttattctgaagtttagggattcacgtagatcgttttacagtaggggtggctggagaagtttctgccgtgagaatgggcttaaacctggagattctgtcacgtttaaactggagagtagcaacacaaaaacgcctctactccttttctccattgcagaatcaaagagtgcttccacaaaagataggacccgatttctgacactaactgtcacaccatccagtatccgcagttccagactttatctttcgaagaagtttattagtgttaacaagatggaaagggcaggagggaagaagataactctattggacaagaatggagaagagtggccagtgaccttactgatggataaaagatatacaaggatggttttgggttcagggttgagagaattctgcaatgctattggcgttaaggcatatgaatctgtggtgttggagttggtttgggaagagacaacaactcttcctatgttcaaattctgctccaagatcaagacttga

SEQ ID NO: 89217 - protein, 523 aa, Arabidopsis thaliana
  peptide (1)..(523): Ceres Seq. ID no. 12716134
  misc_feature (151)..(250): Pfam Name: B3 DNA binding domain Pfam Description: B3 DNA binding domain
  misc_feature (126)..(523): Homolog of NCBI NO: 15236032 NR Description: putative protein; protein id: At4g31650.1
  misc_feature (1)..(106): Homolog of NCBI NO: 15236032 NR Description: putative protein; protein id: At4g31650.1
  misc_feature (1)..(317): Homolog of NCBI NO: 15236030 NR Description: putative protein; protein id: At4g31640.1
  misc_feature (1)..(246): Homolog of NCBI NO: 15236040 NR Description: putative protein; protein id: At4g31690.1
  misc_feature (1)..(246): Homolog of NCBI NO: 20152540 NR Description: putative auxin response factor 23 [Arabidopsis
  misc_feature (1)..(247): Homolog of NCBI NO: 30689117 NR Description: transcriptional factor B3 family [Arabidopsis >gi|24817267|emb|CAD56214.1| putative auxin response factor 24
  misc_feature (1)..(247): Homolog of NCBI NO: 7486320 NR Description: hypothetical protein F28M20.130 - Arabidopsis >gi|3281860|emb|CAA19755.1| putative protein [Arabidopsis >gi|7270071|emb|CAB79886.1| putative protein [Arabidopsis
  misc_feature (1)..(133): Homolog of NCBI NO: 7486322 NR Description: hypothetical protein F28M20.150 - Arabidopsis >gi|3281862|emb|CAA19757.1| putative protein [Arabidopsis >gi|7270069|emb|CAB79884.1| putative protein [Arabidopsis
  misc_feature (118)..(227): Homolog of NCBI NO: 7486322 NR Description: hypothetical protein F28M20.150 - Arabidopsis >gi|3281862|emb|CAA19757.1| putative protein [Arabidopsis >gi|7270069|emb|CAB79884.1| putative protein [Arabidopsis
  misc_feature (412)..(505): Homolog of NCBI NO: 7486322 NR Description: hypothetical protein F28M20.150 - Arabidopsis >gi|3281862|emb|CAA19757.1| putative protein [Arabidopsis >gi|7270069|emb|CAB79884.1| putative protein [Arabidopsis
MNNPTLFSPKSPHFFQPLLPGFKSHINIPVKFFSKYIKGKHEGKTVKLRSDSSKRTWKVKIEGHTLTDGWKEFVEAHDLRISDFVIFKHKGDMFFDVTALGSSCCEVQYAPSCSHGENEESDEIGESSRKEKEIEENIETEPDQFSSDLTCFSQSVTTSNLMRDSVGVPRDFAKRYGFNIGRHEIVLMNEEGKPWESEVISYKSGKVIVAGGWKSLCTESKLEVGDSCTFKLLHNAKMPVFRLCSKLPKAGAEARPLKRARVQRWSQESRSKHDVREKIAEEGEPSRRNRTSNKSTGDQGKLQQTQSCFIFDHVAKIGTYERIHWLSLPRNFVRSDGLIKGSNKIVLMNEGARTWTLILKFRDSRRSFYSRGGWRSFCRENGLKPGDSVTFKLESSNTKTPLLLFSIAESKSASTKDRTRFLTLTVTPSSIRSSRLYLSKKFISVNKMERAGGKKITLLDKNGEEWPVTLLMDKRYTRMVLGSGLREFCNAIGVKAYESVVLELVWEETTTLPMFKFCSKIKT

SEQ ID NO: 89218 - protein, 431 aa, Arabidopsis thaliana
  peptide (1)..(431): Ceres Seq. ID no. 12716135
  misc_feature (59)..(158): Pfam Name: B3 DNA binding domain Pfam Description: B3 DNA binding domain
  misc_feature (34)..(431): Homolog of NCBI NO: 15236032 NR Description: putative protein; protein id: At4g31650.1
  misc_feature (1)..(14): Homolog of NCBI NO: 15236032 NR Description: putative protein; protein id: At4g31650.1
  misc_feature (1)..(225): Homolog of NCBI NO: 15236030 NR Description: putative protein; protein id: At4g31640.1
  misc_feature (1)..(154): Homolog of NCBI NO: 15236040 NR Description: putative protein; protein id: At4g31690.1
  misc_feature (1)..(154): Homolog of NCBI NO: 20152540 NR Description: putative auxin response factor 23 [Arabidopsis
  misc_feature (1)..(155): Homolog of NCBI NO: 30689117 NR Description: transcriptional factor B3 family [Arabidopsis >gi|24817267|emb|CAD56214.1| putative auxin response factor 24
  misc_feature (1)..(155): Homolog of NCBI NO: 7486320 NR Description: hypothetical protein F28M20.130 - Arabidopsis >gi|3281860|emb|CAA19755.1| putative protein [Arabidopsis >gi|7270071|emb|CAB79886.1| putative protein [Arabidopsis
  misc_feature (1)..(41): Homolog of NCBI NO: 7486322 NR Description: hypothetical protein F28M20.150 - Arabidopsis >gi|3281862|emb|CAA19757.1| putative protein [Arabidopsis >gi|7270069|emb|CAB79884.1| putative protein [Arabidopsis
  misc_feature (26)..(135): Homolog of NCBI NO: 7486322 NR Description: hypothetical protein F28M20.150 - Arabidopsis >gi|3281862|emb|CAA19757.1| putative protein [Arabidopsis >gi|7270069|emb|CAB79884.1| putative protein [Arabidopsis
  misc_feature (320)..(413): Homolog of NCBI NO: 7486322 NR Description: hypothetical protein F28M20.150 - Arabidopsis >gi|3281862|emb|CAA19757.1| putative protein [Arabidopsis >gi|7270069|emb|CAB79884.1| putative protein [Arabidopsis
MFFDVTALGSSCCEVQYAPSCSHGENEESDEIGESSRKEKEIEENIETEPDQFSSDLTCFSQSVTTSNLMRDSVGVPRDFAKRYGFNIGRHEIVLMNEEGKPWESEVISYKSGKVIVAGGWKSLCTESKLEVGDSCTFKLLHNAKMPVFRLCSKLPKAGAEARPLKRARVQRWSQESRSKHDVREKIAEEGEPSRRNRTSNKSTGDQGKLQQTQSCFIFDHVAKIGTYERIHWLSLPRNFVRSDGLIKGSNKIVLMNEGARTWTLILKFRDSRRSFYSRGGWRSFCRENGLKPGDSVTFKLESSNTKTPLLLFSIAESKSASTKDRTRFLTLTVTPSSIRSSRLYLSKKFISVNKMERAGGKKITLLDKNGEEWPVTLLMDKRYTRMVLGSGLREFCNAIGVKAYESVVLELVWEETTTLPMFKFCSKIKT

SEQ ID NO: 89219 - protein, 362 aa, Arabidopsis thaliana
  peptide (1)..(362): Ceres Seq. ID no. 12716136
  misc_feature (1)..(89): Pfam Name: B3 DNA binding domain Pfam Description: B3 DNA binding domain
  misc_feature (1)..(362): Homolog of NCBI NO: 15236032 NR Description: putative protein; protein id: At4g31650.1
  misc_feature (1)..(156): Homolog of NCBI NO: 15236030 NR Description: putative protein; protein id: At4g31640.1
  misc_feature (1)..(85): Homolog of NCBI NO: 15236040 NR Description: putative protein; protein id: At4g31690.1
  misc_feature (1)..(85): Homolog of NCBI NO: 20152540 NR Description: putative auxin response factor 23 [Arabidopsis
  misc_feature (1)..(86): Homolog of NCBI NO: 30689117 NR Description: transcriptional factor B3 family [Arabidopsis >gi|24817267|emb|CAD56214.1| putative auxin response factor 24
  misc_feature (1)..(86): Homolog of NCBI NO: 7486320 NR Description: hypothetical protein F28M20.130 - Arabidopsis >gi|3281860|emb|CAA19755.1| putative protein [Arabidopsis >gi|7270071|emb|CAB79886.1| putative protein [Arabidopsis
  misc_feature (1)..(66): Homolog of NCBI NO: 7486322 NR Description: hypothetical protein F28M20.150 - Arabidopsis >gi|3281862|emb|CAA19757.1| putative protein [Arabidopsis >gi|7270069|emb|CAB79884.1| putative protein [Arabidopsis
  misc_feature (251)..(344): Homolog of NCBI NO: 7486322 NR Description: hypothetical protein F28M20.150 - Arabidopsis >gi|3281862|emb|CAA19757.1| putative protein [Arabidopsis >gi|7270069|emb|CAB79884.1| putative protein [Arabidopsis
  misc_feature (1)..(107): Homolog of NCBI NO: 27754629 NR Description: unknown protein [Arabidopsis thaliana]
  misc_feature (104)..(357): Homolog of NCBI NO: 27754629 NR Description: unknown protein [Arabidopsis thaliana]
MRDSVGVPRDFAKRYGFNIGRHEIVLMNEEGKPWESEVISYKSGKVIVAGGWKSLCTESKLEVGDSCTFKLLHNAKMPVFRLCSKLPKAGAEARPLKRARVQRWSQESRSKHDVREKIAEEGEPSRRNRTSNKSTGDQGKLQQTQSCFIFDHVAKIGTYERIHWLSLPRNFVRSDGLIKGSNKIVLMNEGARTWTLILKFRDSRRSFYSRGGWRSFCRENGLKPGDSVTFKLESSNTKTPLLLFSIAESKSASTKDRTRFLTLTVTPSSIRSSRLYLSKKFISVNKMERAGGKKITLLDKNGEEWPVTLLMDKRYTRMVLGSGLREFCNAIGVKAYESVVLELVWEETTTLPMFKFCSKIKT

SEQ ID NO: 89220 - DNA, 1836 bp, Arabidopsis thaliana
  misc_feature (1)..(1836): Ceres Seq. ID no. 12716177
  misc_feature: MA Experiment ID: 108434 Result: Up-regulated in Transcription
  misc_feature: MA Experiment 108434 PARAMETER Experiment Name: At_Root_Tips_cDNA_P Parameter: Tissue Value: Root Tips
  misc_feature: MA Experiment ID: 108461 Result: Up-regulated in Transcription
  misc_feature: MA Experiment 108461 PARAMETER Experiment Name: At_Germinating_Seeds_cDNA_P Parameter: Age (day) Value: 1 vs. 0
  misc_feature: MA Experiment 108461 PARAMETER Experiment Name: At_Germinating_Seeds_cDNA_P Parameter: Tissue Value: Germinating Seeds
  misc_feature: MA Experiment ID: 108462 Result: Up-regulated in Transcription
  misc_feature: MA Experiment 108462 PARAMETER Experiment Name: At_Germinating_Seeds_cDNA_P Parameter: Age (day) Value: 2 vs. 0
  misc_feature: MA Experiment 108462 PARAMETER Experiment Name: At_Germinating_Seeds_cDNA_P Parameter: Tissue Value: Germinating Seeds
  misc_feature: MA Experiment ID: 20000179 Result: Up-regulated in Transcription
  misc_feature: MA Experiment 20000179 PARAMETER Experiment Name: At_Germinating_Seeds_P Parameter: Age (hr) Value: 6 vs. 0
  misc_feature: MA Experiment 20000179 PARAMETER Experiment Name: At_Germinating_Seeds_P Parameter: Tissue Value: Germinating Seeds
  misc_feature: MA Experiment ID: 20000180 Result: Up-regulated in Transcription
  misc_feature: MA Experiment 20000180 PARAMETER Experiment Name: At_Germinating_Seeds_P Parameter: Age (hr) Value: 24 vs. 0
  misc_feature: MA Experiment 20000180 PARAMETER Experiment Name: At_Germinating_Seeds_P Parameter: Tissue Value: Germinating Seeds
  misc_feature: MA Experiment ID: 20000794 Result: Up-regulated in Transcription
  misc_feature: MA Experiment 20000794 PARAMETER Experiment Name: At_Petals_P Parameter: Age (day) Value: 23-25 days
  misc_feature: MA Experiment 20000794 PARAMETER Experiment Name: At_Petals_P Parameter: Plant Line Value: WS
  misc_feature: MA Experiment 20000794 PARAMETER Experiment Name: At_Petals_P Parameter: Tissue Value: Petals vs. Whole plant
  misc_feature: MA Experiment ID: 20001451 Result: Down-regulated in Transcription
  misc_feature: MA Experiment 20001451 PARAMETER Experiment Name: At_Far-red-induction_P Parameter: Age (day) Value: 7
  misc_feature: MA Experiment 20001451 PARAMETER Experiment Name: At_Far-red-induction_P Parameter: Light Value: Far-red vs. White
  misc_feature: MA Experiment 20001451 PARAMETER Experiment Name: At_Far-red-induction_P Parameter: Organism Value: A. thaliana
  misc_feature: MA Experiment 20001451 PARAMETER Experiment Name: At_Far-red-induction_P Parameter: Plant Line Value: Columbia
  misc_feature: MA Experiment 20001451 PARAMETER Experiment Name: At_Far-red-induction_P Parameter: Timepoint (hr) Value: 24
  misc_feature: MA Experiment 20001451 PARAMETER Experiment Name: At_Far-red-induction_P Parameter: Tissue Value: Whole Plant
  misc_feature: MA Experiment ID: 20001556 Result: Up-regulated in Transcription
  misc_feature: MA Experiment 20001556 PARAMETER Experiment Name: At_Drought_Soil_Dry_P Parameter: Age (day) Value: 26
  misc_feature: MA Experiment 20001556 PARAMETER Experiment Name: At_Drought_Soil_Dry_P Parameter: Organism Value: A. thaliana
  misc_feature: MA Experiment 20001556 PARAMETER Experiment Name: At_Drought_Soil_Dry_P Parameter: Plant Line Value: WS
  misc_feature: MA Experiment 20001556 PARAMETER Experiment Name: At_Drought_Soil_Dry_P Parameter: Post Timepoint (hr) Value: None
  misc_feature: MA Experiment 20001556 PARAMETER Experiment Name: At_Drought_Soil_Dry_P Parameter: Post-Treatment Value: None
  misc_feature: MA Experiment 20001556 PARAMETER Experiment Name: At_Drought_Soil_Dry_P Parameter: Timepoint (day) Value: 12
  misc_feature: MA Experiment 20001556 PARAMETER Experiment Name: At_Drought_Soil_Dry_P Parameter: Treatment Value: Drought vs. No Drought
gttaatctttttcttcaatctctcgatctgatcgttatcgaaaccgcgcgattctaaccaagtccaggtgacaaatcagctctgctaaaatactcacaaagtctcgtgatcatattttgtggatcacatcattgtcttatttttggaattgcttatcctcgcactagttcactgatttgagatctgtgcagttaattttgtgctccatagcgattccatggcttctttaatgttatctctcggttccacttctctgttaccgcgcgagattaacaaggataagctaaagcttggaacttctgcttcgaacccgttcctaaaagcaaagtcttttagcagagtgactatgacggttgcagtgaagccttctcgtttcgagggtataactatggctccaccagaccctattcttggagtcagtgaagcattcaaagctgacactaacgggatgaaactcaatcttggtgttggtgcttatcgtactgaggaactccagccttatgtgcttaatgttgttaaaaaggcggagaatttgatgttggagagaggagataacaaagagtatcttccaattgaggggttggcagcattcaacaaggctactgctgagttgctatttggagctggtcatcctgttattaaggaacaaagagtagcaacaattcagggtctttcgggaacaggttcactgcgattagcagcggctcttatagagcgttatttccctggagcaaaagttgtgatctcatcaccaacctggggtaatcacaagaatatcttcaatgatgccaaagttccgtggtccgaataccgctactatgatccaaaaacaattggtttggattttgagggaatgatagcagatataaaggaagctccagaaggatccttcatcttgcttcacggatgtgctcacaacccaactggaattgacccaacaccagaacagtgggtaaaaattgctgatgtcattcaggaaaagaaccatatcccatttttcgatgttgcataccagggctttgctagtggaagccttgatgaagatgcagcatctgtgagattatttgctgagcggggaatggagttttttgttgctcagtcatatagtaaaaatttaggtttgtatgcagaaagaattggggcaatcaatgtcgtgtgctcctcagctgatgctgctacaagggtcaagagccagttgaaaaggattgctcggcctatgtactcgaatccaccagttcatggggcgagaatcgtggccaatgtagtgggtgatgtaactatgttcagtgaatggaaagcagagatggaaatgatggcaggaagaataaagacggttagacaagagctgtatgatagcctcgtttcaaaagacaagagcgggaaggactggtccttcattctgaagcaaattggcatgttctctttcaccggcctaaacaaagctcagagcgataacatgacggacaaatggcatgtgtatatgactaaagacgggaggatatcattggccggattatctctggccaaatgcgagtatcttgctgatgcgatcatcgactcataccataacgtaagctgagcttccatctcagtagatgacaataagaaacagttttatataccctttttagcttcttcttgatctttgattgaaaccagatggctaaattaataagctagcatcacactatgattgctagacaattttcaaggaaacttttgatttgatcgtgtttgacaggccttgttgtattgggagactcccatcgagttatagaagaacttgttacgattgtattttacataatttcacaactatacttgaccggaagagtt

SEQ ID NO: 89221 - protein, 453 aa, Arabidopsis thaliana; identical to SEQ ID NO: 39108
  peptide (1)..(453): Ceres Seq. ID no. 12716178
  misc_feature (131)..(449): Pfam Name: Aminotransferase class I and II Pfam Description: Aminotransferase class I and II
  misc_feature (1)..(453): Homolog of NCBI NO: 15236129 NR Description: aspartate aminotransferase; protein id: supported by cDNA: 103854., supported by cDNA: 33414., supported cDNA: gi_15451159, supported by cDNA: gi_20148354 [Arabidopsis
  misc_feature (1)..(453): Homolog of NCBI NO: 531555 NR Description: aspartate aminotransferase [Arabidopsis thaliana]
  misc_feature (1)..(453): Homolog of NCBI NO: 21618222 NR Description: aspartate aminotransferase [Arabidopsis thaliana]
  misc_feature (1)..(453): Homolog of NCBI NO: 1076500 NR Description: aspartate transaminase (EC 2.6.1.1) - alfalfa
  misc_feature (1)..(453): Homolog of NCBI NO: 445118 NR Description: Asp aminotransferase
  misc_feature (1)..(453): Homolog of NCBI NO: 25990362 NR Description: aspartate aminotransferase [Phaseolus vulgaris]
  misc_feature (2)..(453): Homolog of NCBI NO: 2605932 NR Description: aspartate aminotransferase [Lotus corniculatus]
  misc_feature (1)..(453): Homolog of NCBI NO: 485495 NR Description: aspartate transaminase (EC 2.6.1.1) AAT5

SEQ ID NO: 89222 - protein, 449 aa, Arabidopsis thaliana; identical to SEQ ID NO: 39109
  peptide (1)..(449): Ceres Seq. ID no. 12716179
  misc_feature (127)..(445): Pfam Name: Aminotransferase class I and II Pfam Description: Aminotransferase class I and II
  misc_feature (1)..(449): Homolog of NCBI NO: 15236129 NR Description: aspartate aminotransferase; protein id: supported by cDNA: 103854., supported by cDNA: 33414., supported cDNA: gi_15451159, supported by cDNA: gi_20148354 [Arabidopsis
  misc_feature (1)..(449): Homolog of NCBI NO: 531555 NR Description: aspartate aminotransferase [Arabidopsis thaliana]
  misc_feature (1)..(449): Homolog of NCBI NO: 21618222 NR Description: aspartate aminotransferase [Arabidopsis thaliana]
  misc_feature (1)..(449): Homolog of NCBI NO: 1076500 NR Description: aspartate transaminase (EC 2.6.1.1) - alfalfa
  misc_feature (1)..(449): Homolog of NCBI NO: 445118 NR Description: Asp aminotransferase
  misc_feature (1)..(449): Homolog of NCBI NO: 25990362 NR Description: aspartate aminotransferase [Phaseolus vulgaris]
  misc_feature (1)..(449): Homolog of NCBI NO: 2605932 NR Description: aspartate aminotransferase [Lotus corniculatus]
  misc_feature (1)..(449): Homolog of NCBI NO: 485495 NR Description: aspartate transaminase (EC 2.6.1.1) AAT5

SEQ ID NO: 89223 - protein, 410 aa, Arabidopsis thaliana; identical to SEQ ID NO: 39110
  peptide (1)..(410): Ceres Seq. ID no. 12716180
  misc_feature (88)..(406): Pfam Name: Aminotransferase class I and II Pfam Description: Aminotransferase class I and II
  misc_feature (1)..(410): Homolog of NCBI NO: 15236129 NR Description: aspartate aminotransferase; protein id: supported by cDNA: 103854., supported by cDNA: 33414., supported cDNA: gi_15451159, supported by cDNA: gi_20148354 [Arabidopsis
  misc_feature (1)..(410): Homolog of NCBI NO: 531555 NR Description: aspartate aminotransferase [Arabidopsis thaliana]
  misc_feature (1)..(410): Homolog of NCBI NO: 21618222 NR Description: aspartate aminotransferase [Arabidopsis thaliana]
  misc_feature (1)..(410): Homolog of NCBI NO: 1076500 NR Description: aspartate transaminase (EC 2.6.1.1) - alfalfa
  misc_feature (1)..(410): Homolog of NCBI NO: 445118 NR Description: Asp aminotransferase
  misc_feature (1)..(410): Homolog of NCBI NO: 25990362 NR Description: aspartate aminotransferase [Phaseolus vulgaris]
  misc_feature (1)..(410): Homolog of NCBI NO: 2605932 NR Description: aspartate aminotransferase [Lotus corniculatus]
  misc_feature (1)..(410): Homolog of NCBI NO: 485495 NR Description: aspartate transaminase (EC 2.6.1.1) AAT5

SEQ ID NO: 89224 - DNA, 2373 bp, Arabidopsis thaliana
  misc_feature (1)..(2373): Ceres Seq. ID no. 12716265
  misc_feature: MA Experiment ID: 20000185 Result: Up-regulated in Transcription
  misc_feature: MA Experiment 20000185 PARAMETER Experiment Name: At_Roots__P Parameter: Age (day) Value: 7 vs. 21
  misc_feature: MA Experiment 20000185 PARAMETER Experiment Name: At_Roots__P Parameter: Organism Value: A. thaliana
  misc_feature: MA Experiment 20000185 PARAMETER Experiment Name: At_Roots__P Parameter: Tissue Value: Roots vs. Whole Plant
  misc_feature: MA Experiment ID: 20000234 Result: Up-regulated in Transcription
  misc_feature: MA Experiment 20000234 PARAMETER Experiment Name: At_Siliques_P Parameter: Age (day) Value: 21
  misc_feature: MA Experiment 20000234 PARAMETER Experiment Name: At_Siliques_P Parameter: Organism Value: A. thaliana
  misc_feature: MA Experiment 20000234 PARAMETER Experiment Name: At_Siliques_P Parameter: Plant Line Value: WS
  misc_feature: MA Experiment 20000234 PARAMETER Experiment Name: At_Siliques_P Parameter: Tissue Value: Less Than 5mm Siliques vs. Whole Plant
  misc_feature: MA Experiment ID: 20000264 Result: Up-regulated in Transcription
  misc_feature: MA Experiment 20000264 PARAMETER Experiment Name: At_Open_Flower_P Parameter: Age (day) Value: 21
  misc_feature: MA Experiment 20000264 PARAMETER Experiment Name: At_Open_Flower_P Parameter: Plant Line Value: WS
  misc_feature: MA Experiment 20000264 PARAMETER Experiment Name: At_Open_Flower_P Parameter: Tissue Value: Open Flower vs. Whole Plant
  misc_feature: MA Experiment ID: 20000286 Result: Up-regulated in Transcription
  misc_feature: MA Experiment 20000286 PARAMETER Experiment Name: At_Open_Flower_P Parameter: Age (day) Value: 21
  misc_feature: MA Experiment 20000286 PARAMETER Experiment Name: At_Open_Flower_P Parameter: Plant Line Value: WS
  misc_feature: MA Experiment 20000286 PARAMETER Experiment Name: At_Open_Flower_P Parameter: Tissue Value: Half Open vs. Whole Plant
  misc_feature: MA Experiment ID: 20000437 Result: Down-regulated in Transcription
  misc_feature: MA Experiment 20000437 PARAMETER Experiment Name: At_Drought_P Parameter: Age (day) Value: 8
  misc_feature: MA Experiment 20000437 PARAMETER Experiment Name: At_Drought_P Parameter: Organism Value: A. thaliana
  misc_feature: MA Experiment 20000437 PARAMETER Experiment Name: At_Drought_P Parameter: Plant Line Value: WS
  misc_feature: MA Experiment 20000437 PARAMETER Experiment Name: At_Drought_P Parameter: Timepoint (hr) Value: 24
  misc_feature: MA Experiment 20000437 PARAMETER Experiment Name: At_Drought_P Parameter: Tissue Value: Whole Plant
  misc_feature: MA Experiment 20000437 PARAMETER Experiment Name: At_Drought_P Parameter: Treatment Value: Drought vs. No Drought
  misc_feature: MA Experiment ID: 20000439 Result: Up-regulated in Transcription
  misc_feature: MA Experiment 20000439 PARAMETER Experiment Name: At_Roots__P Parameter: Age (day) Value: 14 vs. 21
  misc_feature: MA Experiment 20000439 PARAMETER Experiment Name: At_Roots__P Parameter: Organism Value: A. thaliana
  misc_feature: MA Experiment 20000439 PARAMETER Experiment Name: At_Roots__P Parameter: Tissue Value: Roots vs. Whole Plant
  misc_feature: MA Experiment ID: 20000496 Result: Up-regulated in Transcription
  misc_feature: MA Experiment 20000496 PARAMETER Experiment Name: At_Guard_Cells_P Parameter: Harvest Date Value: 7/19/2002
  misc_feature: MA Experiment 20000496 PARAMETER Experiment Name: At_Guard_Cells_P Parameter: Organism Value: Canola
  misc_feature: MA Experiment 20000496 PARAMETER Experiment Name: At_Guard_Cells_P Parameter: Tissue Value: Guard Cells vs. Leaves
  misc_feature: MA Experiment ID: 20001450 Result: Down-regulated in Transcription
  misc_feature: MA Experiment 20001450 PARAMETER Experiment Name: At_Far-red-induction_P Parameter: Age (day) Value: 7
  misc_feature: MA Experiment 20001450 PARAMETER Experiment Name: At_Far-red-induction_P Parameter: Light Value: Far-red vs. White
  misc_feature: MA Experiment 20001450 PARAMETER Experiment Name: At_Far-red-induction_P Parameter: Organism Value: A. thaliana
  misc_feature: MA Experiment 20001450 PARAMETER Experiment Name: At_Far-red-induction_P Parameter: Plant Line Value: Columbia
  misc_feature: MA Experiment 20001450 PARAMETER Experiment Name: At_Far-red-induction_P Parameter: Timepoint (hr) Value: 8
  misc_feature: MA Experiment 20001450 PARAMETER Experiment Name: At_Far-red-induction_P Parameter: Tissue Value: Whole Plant
  misc_feature: MA Experiment ID: 20001451 Result: Down-regulated in Transcription
  misc_feature: MA Experiment 20001451 PARAMETER Experiment Name: At_Far-red-induction_P Parameter: Age (day) Value: 7
  misc_feature: MA Experiment 20001451 PARAMETER Experiment Name: At_Far-red-induction_P Parameter: Light Value: Far-red vs. White
  misc_feature: MA Experiment 20001451 PARAMETER Experiment Name: At_Far-red-induction_P Parameter: Organism Value: A. thaliana
  misc_feature: MA Experiment 20001451 PARAMETER Experiment Name: At_Far-red-induction_P Parameter: Plant Line Value: Columbia
  misc_feature: MA Experiment 20001451 PARAMETER Experiment Name: At_Far-red-induction_P Parameter: Timepoint (hr) Value: 24
  misc_feature: MA Experiment 20001451 PARAMETER Experiment Name: At_Far-red-induction_P Parameter: Tissue Value: Whole Plant
atgccacttcgcaaccagaatcgcgctcctttacctagtccaaacgtcaaaaaggaagcgctctcaagtattccttttgacaagcgaaggaaggagacgcaaggtactggaagaagacaagtgctttcgacagtgaacagacaagatgcgaacagcgatgtgggaagcacagaggagtgtggtaaagttgagtttacaaaagatgaagtgttggctttgcttaacgagagagctaaagctggaaaatttgataccaagggtaagattgagcaaatgacggatattatcaagaagcttaaggtctgtgttagatggtaccaacaagtggatgaaactcatgttcaagacaaggaaaatctttcttcttctcttcaatctgcagagaaaagatacagtgataaagagttggatgcaaagaccaaagaggaagagctacgagcaactataacagagatgaaggagaacatagaatcacttcaggaaaagctgtccaaggagaagttgagtaaactggatgcaattgaaaatcacagaagagaaaaagattgtagagttgtagctgagaagcttcaggtttctctcagagaagagcttgacaaagttaaagaggaaaaaatggctgcgaagcagaaggtgacgtctctagaagatatgtacaagaggctgcaagagtacaacacaagtttgcaacaatataacaccaaactccagactgatcttgaagtagctagagaggctcacactcgtgctgaaaaagaaaagtcaagtatactggagaatcttactacactaagaggtcacagtaaatcactacaagatcaattagcatcgagccgggtttcacaagatgaagcggtaaaacaaaaggattcattgctgatggaagttaataaccttcaaagcgagctgcaacaagtccgtgatgatcgtgatcgccatgttgtacagtcacaaaagctggctggtgagatactgatgtataaggagagtgttggaaagtcatctcatgagttggacattcttatagccaaatcaggatctttagaggaaacatgttcgttgcaaaaagagcgtattaaaatgttggagcaggaattagcttttgctaaggaaaagcttaagatggtggatttatctatgtctcatacaatgacagaatttgaggagcagaaacaatgtatgcatgaactgcaagatcgccttgcagacacggagcgtcaactttttgaaggagagttattaaggaaaaagcttcataacaccattcttgaactcaaaggaaacatacgcgtgttctgccgagtgcgccccttgctaccagatgatggaggacgccaagaggccagtgttattgcctatcctacatcaactgaatctcttggtagaggcattgatgtggtccaaagtggtaacaaacatcctttcactttcgacaaggtcttcgaccacggagcttctcaggaggaagtattctttgaaatatctcaacttgtgcagagcgcattggatggctacaaggtttgtatttttgcctacggtcagacaggttctggcaaaacctataccatgatgggcaggcctgaaacaccagaacagaaaggactgatccctcgatcactcgaacaaatattcaaaaccagccaaagtcttagtacacaaggctggaaatacaagatgcaggtctcaatgttggagatatataatgagtccatcagagacttgttgtctacaagccgaacgattgctatagaatctgtgcgggcagacagtagcacatctggaagacaatatacaatcacacatgatgttaatggaaacactcatgttagcgacctgacaatagtagatgtatgcagcattggacaaatttcctcacttttgcaacaagctgctcagagcaggtctgttgggaagacgcatatgaatgaacaatcatcaagaagtcatttcgtgtttactcttaggatttctggtgtgaatgagagcactgaacagcaagtacaaggtgttcttaacctaattgatcttgctggaagtgagcgactttcaaggagcggggcaaccggagaccggttaaaggagacacaggctataaacaaaagcttgtctgcattgagtgatgttatatttgcattggcaaagaaagaggatcatgtacctttcagaaactcaaagttaacatatctgctccagccatgtttaggaggggactcaaagaccttaatgtttgtgaacatatcacctgatccatcttcaactggagagtctctatgctctcttcggtttgctgctagagttaatgcatgtgagattggaatacctcgcagacaaacttccgcaaaactcctcgactctcgcctaagttacggttaa

SEQ ID NO: 89225 - protein, 790 aa, Arabidopsis thaliana
  peptide (1)..(790): Ceres Seq. ID no. 12716266
  misc_feature (42)..(426): Pfam Name: Myosin tail Pfam Description: Myosin tail
  misc_feature (48)..(790): Homolog of NCBI NO: 18416938 NR Description: kinesin-like protein B (katB); protein id:
  misc_feature (51)..(790): Homolog of NCBI NO: 18423656 NR Description: kinesin-like protein C (katC); protein id:
  misc_feature (48)..(790): Homolog of NCBI NO: 7446304 NR Description: kinesin-related protein katB - Arabidopsis
  misc_feature (131)..(790): Homolog of NCBI NO: 10176794 NR Description: kinesin-like protein [Arabidopsis thaliana]
  misc_feature (128)..(783): Homolog of NCBI NO: 34915504 NR Description: putative kinesin-related protein katA [Oryza
  misc_feature (383)..(783): Homolog of NCBI NO: 33354214 NR Description: kinesin-related protein KLPA-like protein [Oryza
  misc_feature (1)..(394): Homolog of NCBI NO: 4455160 NR Description: kinesin-related protein katA (fragment)
  misc_feature (424)..(778): Homolog of NCBI NO: 15208457 NR Description: kinesin heavy chain [Zea mays]
  misc_feature (498)..(774): Homolog of NCBI NO: 15208463 NR Description: kinesin heavy chain [Zea mays]
  misc_feature (251)..(777): Homolog of NCBI NO: 3133267 NR Description: kinesin-related protein K2 [Dictyostelium
MPLRNQNRAPLPSPNVKKEALSSIPFDKRRKETQGTGRRQVLSTVNRQDANSDVGSTEECGKVEFTKDEVLALLNERAKAGKFDTKGKIEQMTDIIKKLKVCVRWYQQVDETHVQDKENLSSSLQSAEKRYSDKELDAKTKEEELRATITEMKENIESLQEKLSKEKLSKLDAIENHRREKDCRVVAEKLQVSLREELDKVKEEKMAAKQKVTSLEDMYKRLQEYNTSLQQYNTKLQTDLEVAREAHTRAEKEKSSILENLTTLRGHSKSLQDQLASSRVSQDEAVKQKDSLLMEVNNLQSELQQVRDDRDRHVVQSQKLAGEILMYKESVGKSSHELDILIAKSGSLEETCSLQKERIKMLEQELAFAKEKLKMVDLSMSHTMTEFEEQKQCMHELQDRLADTERQLFEGELLRKKLHNTILELKGNIRVFCRVRPLLPDDGGRQEASVIAYPTSTESLGRGIDVVQSGNKHPFTFDKVFDHGASQEEVFFEISQLVQSALDGYKVCIFAYGQTGSGKTYTMMGRPETPEQKGLIPRSLEQIFKTSQSLSTQGWKYKMQVSMLEIYNESIRDLLSTSRTIAIESVRADSSTSGRQYTITHDVNGNTHVSDLTIVDVCSIGQISSLLQQAAQSRSVGKTHMNEQSSRSHFVFTLRISGVNESTEQQVQGVLNLIDLAGSERLSRSGATGDRLKETQAINKSLSALSDVIFALAKKEDHVPFRNSKLTYLLQPCLGGDSKTLMFVNISPDPSSTGESLCSLRFAARVNACEIGIPRRQTSAKLLDSRLSYG

SEQ ID NO: 89226 - protein, 699 aa, Arabidopsis thaliana
  peptide (1)..(699): Ceres Seq. ID no. 12716267
  misc_feature (1)..(335): Pfam Name: Myosin tail Pfam Description: Myosin tail
  misc_feature (1)..(699): Homolog of NCBI NO: 18416938 NR Description: kinesin-like protein B (katB); protein id:
  misc_feature (1)..(699): Homolog of NCBI NO: 18423656 NR Description: kinesin-like protein C (katC); protein id:
  misc_feature (1)..(699): Homolog of NCBI NO: 7446304 NR Description: kinesin-related protein katB - Arabidopsis
  misc_feature (40)..(699): Homolog of NCBI NO: 10176794 NR Description: kinesin-like protein [Arabidopsis thaliana]
  misc_feature (37)..(692): Homolog of NCBI NO: 34915504 NR Description: putative kinesin-related protein katA [Oryza
  misc_feature (292)..(692): Homolog of NCBI NO: 33354214 NR Description: kinesin-related protein KLPA-like protein [Oryza
  misc_feature (1)..(303): Homolog of NCBI NO: 4455160 NR Description: kinesin-related protein katA (fragment)
  misc_feature (333)..(687): Homolog of NCBI NO: 15208457 NR Description: kinesin heavy chain [Zea mays]
  misc_feature (407)..(683): Homolog of NCBI NO: 15208463 NR Description: kinesin heavy chain [Zea mays]
  misc_feature (160)..(686): Homolog of NCBI NO: 3133267 NR Description: kinesin-related protein K2 [Dictyostelium
MTDIIKKLKVCVRWYQQVDETHVQDKENLSSSLQSAEKRYSDKELDAKTKEEELRATITEMKENIESLQEKLSKEKLSKLDAIENHRREKDCRVVAEKLQVSLREELDKVKEEKMAAKQKVTSLEDMYKRLQEYNTSLQQYNTKLQTDLEVAREAHTRAEKEKSSILENLTTLRGHSKSLQDQLASSRVSQDEAVKQKDSLLMEVNNLQSELQQVRDDRDRHVVQSQKLAGEILMYKESVGKSSHELDILIAKSGSLEETCSLQKERIKMLEQELAFAKEKLKMVDLSMSHTMTEFEEQKQCMHELQDRLADTERQLFEGELLRKKLHNTILELKGNIRVFCRVRPLLPDDGGRQEASVIAYPTSTESLGRGIDVVQSGNKHPFTFDKVFDHGASQEEVFFEISQLVQSALDGYKVCIFAYGQTGSGKTYTMMGRPETPEQKGLIPRSLEQIFKTSQSLSTQGWKYKMQVSMLEIYNESIRDLLSTSRTIAIESVRADSSTSGRQYTITHDVNGNTHVSDLTIVDVCSIGQISSLLQQAAQSRSVGKTHMNEQSSRSHFVFTLRISGVNESTEQQVQGVLNLIDLAGSERLSRSGATGDRLKETQAINKSLSALSDVIFALAKKEDHVPFRNSKLTYLLQPCLGGDSKTLMFVNISPDPSSTGESLCSLRFAARVNACEIGIPRRQTSAKLLDSRLSYG

SEQ ID NO: 89227 - protein, 639 aa, Arabidopsis thaliana
  peptide (1)..(639): Ceres Seq. ID no. 12716268
  misc_feature (1)..(275): Pfam Name: Myosin tail Pfam Description: Myosin tail
  misc_feature (1)..(639): Homolog of NCBI NO: 18416938 NR Description: kinesin-like protein B (katB); protein id:
  misc_feature (1)..(639): Homolog of NCBI NO: 18423656 NR Description: kinesin-like protein C (katC); protein id:
  misc_feature (1)..(639): Homolog of NCBI NO: 7446304 NR Description: kinesin-related protein katB - Arabidopsis
  misc_feature (1)..(639): Homolog of NCBI NO: 10176794 NR Description: kinesin-like protein [Arabidopsis thaliana]
  misc_feature (1)..(632): Homolog of NCBI NO: 34915504 NR Description: putative kinesin-related protein katA [Oryza
  misc_feature (232)..(632): Homolog of NCBI NO: 33354214 NR Description: kinesin-related protein KLPA-like protein [Oryza
  misc_feature (1)..(243): Homolog of NCBI NO: 4455160 NR Description: kinesin-related protein katA (fragment)
  misc_feature (273)..(627): Homolog of NCBI NO: 15208457 NR Description: kinesin heavy chain [Zea mays]
  misc_feature (347)..(623): Homolog of NCBI NO: 15208463 NR Description: kinesin heavy chain [Zea mays]
  misc_feature (100)..(626): Homolog of NCBI NO: 3133267 NR Description: kinesin-related protein K2 [Dictyostelium
MKENIESLQEKLSKEKLSKLDAIENHRREKDCRVVAEKLQVSLREELDKVKEEKMAAKQKVTSLEDMYKRLQEYNTSLQQYNTKLQTDLEVAREAHTRAEKEKSSILENLTTLRGHSKSLQDQLASSRVSQDEAVKQKDSLLMEVNNLQSELQQVRDDRDRHVVQSQKLAGEILMYKESVGKSSHELDILIAKSGSLEETCSLQKERIKMLEQELAFAKEKLKMVDLSMSHTMTEFEEQKQCMHELQDRLADTERQLFEGELLRKKLHNTILELKGNIRVFCRVRPLLPDDGGRQEASVIAYPTSTESLGRGIDVVQSGNKHPFTFDKVFDHGASQEEVFFEISQLVQSALDGYKVCIFAYGQTGSGKTYTMMGRPETPEQKGLIPRSLEQIFKTSQSLSTQGWKYKMQVSMLEIYNESIRDLLSTSRTIAIESVRADSSTSGRQYTITHDVNGNTHVSDLTIVDVCSIGQISSLLQQAAQSRSVGKTHMNEQSSRSHFVFTLRISGVNESTEQQVQGVLNLIDLAGSERLSRSGATGDRLKETQAINKSLSALSDVIFALAKKEDHVPFRNSKLTYLLQPCLGGDSKTLMFVNISPDPSSTGESLCSLRFAARVNACEIGIPRRQTSAKLLDSRLSYG

SEQ ID NO: 89228 - DNA, 1320 bp, Arabidopsis thaliana
  misc_feature (1)..(1320): Ceres Seq. ID no. 12716284
  misc_feature: MA Experiment ID: 20000171 Result: Up-regulated in Transcription
  misc_feature: MA Experiment 20000171 PARAMETER Experiment Name: At_42deg_Heat_P Parameter: Age (day) Value: 14
  misc_feature: MA Experiment 20000171 PARAMETER Experiment Name: At_42deg_Heat_P Parameter: Organism Value: A. thaliana
  misc_feature: MA Experiment 20000171 PARAMETER Experiment Name: At_42deg_Heat_P Parameter: Plant Line Value: WS
  misc_feature: MA Experiment 20000171 PARAMETER Experiment Name: At_42deg_Heat_P Parameter: Temperature (deg C) Value: 42 vs. 22
  misc_feature: MA Experiment 20000171 PARAMETER Experiment Name: At_42deg_Heat_P Parameter: Timepoint (hr) Value: 1
  misc_feature: MA Experiment 20000171 PARAMETER Experiment Name: At_42deg_Heat_P Parameter: Tissue Value: Aerial
  misc_feature: MA Experiment ID: 20000573 Result: Up-regulated in Transcription
  misc_feature: MA Experiment 20000573 PARAMETER Experiment Name: At_100uM_ABA_Mutants__P Parameter: Organism Value: A. thaliana
  misc_feature: MA Experiment 20000573 PARAMETER Experiment Name: At_100uM_ABA_Mutants__P Parameter: Plant Line Value: CS22 vs. Ler wt
  misc_feature: MA Experiment 20000573 PARAMETER Experiment Name: At_100uM_ABA_Mutants__P Parameter: Timepoint (hr) Value: N/A
  misc_feature: MA Experiment 20000573 PARAMETER Experiment Name: At_100uM_ABA_Mutants__P Parameter: Tissue Value: Whole Plant
  misc_feature: MA Experiment 20000573 PARAMETER Experiment Name: At_100uM_ABA_Mutants__P Parameter: Treatment Value: None
  misc_feature: MA Experiment ID: 20000574 Result: Up-regulated in Transcription
  misc_feature: MA Experiment 20000574 PARAMETER Experiment Name: At_100uM_ABA_Mutants__P Parameter: Organism Value: A. thaliana
  misc_feature: MA Experiment 20000574 PARAMETER Experiment Name: At_100uM_ABA_Mutants__P Parameter: Plant Line Value: CS23 vs. Ler wt
  misc_feature: MA Experiment 20000574 PARAMETER Experiment Name: At_100uM_ABA_Mutants__P Parameter: Timepoint (hr) Value: N/A
  misc_feature: MA Experiment 20000574 PARAMETER Experiment Name: At_100uM_ABA_Mutants__P Parameter: Tissue Value: Whole Plant
  misc_feature: MA Experiment 20000574 PARAMETER Experiment Name: At_100uM_ABA_Mutants__P Parameter: Treatment Value: None
  misc_feature: MA Experiment ID: 20000576 Result: Up-regulated in Transcription
  misc_feature: MA Experiment 20000576 PARAMETER Experiment Name: At_100uM_ABA_Mutants__P Parameter: Organism Value: A. thaliana
  misc_feature: MA Experiment 20000576 PARAMETER Experiment Name: At_100uM_ABA_Mutants__P Parameter: Plant Line Value: CS23
  misc_feature: MA Experiment 20000576 PARAMETER Experiment Name: At_100uM_ABA_Mutants__P Parameter: Timepoint (hr) Value: 6
  misc_feature: MA Experiment 20000576 PARAMETER Experiment Name: At_100uM_ABA_Mutants__P Parameter: Tissue Value: Whole Plant
  misc_feature: MA Experiment 20000576 PARAMETER Experiment Name: At_100uM_ABA_Mutants__P Parameter: Treatment Value: 1uM ABA vs. No Treatment
atggcgtcaaatctcttcacaaaaatcccttcactctctgcaattttctcggtttacacatctctatctgccttcacgatcctcttcaaaaccattctctatgagttcattcccgtcaatatccgtgactttatcatctccaaattcacagactacttttctttttatctcaactccaatttcacgttcatcatcgaggaacagagcgattacgttatgaatcagactttccgtgcagcccaagtttacttgccgactcttctctccagaatcaccaccagaagtctcctcgtcagttcgagcgacctcaagaatccgatggctaaaccgaaattcggaatcccagtcaaagccaaaatcatcgatgaattcgaagggattcgtcttgaatggacacttctctctaaggagtttagggacaagattatgtcagattacttcacatacattgcaaaatcatcggtgaagatattgacacataaagaaaatctcaatatctacaattacaatccagactgtctgagatgggaatcagcaatcttccaacaccacaccacatttgaaaccttagcaatggagcctgagctcaagaacacattgatccgtgacctagacgctttctccaatggaaaagacttcttcaaaaccgtgggacgagcttggaaacgcggttatcttctttacggtccacctggaaccggaaaatcatcgcttgttgctgcaattgctaattttatgaactatagtatctatgatcttcagattcagagcgttaaagatgatgcaatgcttagacagattcttacctcaaccgagaaccgctccattcttctcattgaagatcttgattgcagtggagcagatactacttgtagaaaggaaaataaagatgaaacagagtatggtgagaatcagaacaagaagaagaagaaggatcctaaggtaactctgtctgggctactaaactttgtagacgggttatggtcaagctgtgtagaagagaggatcatcatattcacaacgaaccataaggagaaactcgatccggcattgctgagaccaggaaggatggatgttcacatcctcatggattattgcacgcctattgttttcaagaaacttgctgcattgtatcttgaaatcgaagaacacgagttgtttgaccctattgagaagatgttccttgaggtgaaagcaactccagctgagatcacagagaagcttatggtaagcaaggatccggatgttacgcttaagggtcttgttgagtttcttgaatccaagaagatgaccaaggagagtgttgattctgaaatttaa

SEQ ID NO: 89229 - protein, 439 aa, Arabidopsis thaliana
  peptide (1)..(439): Ceres Seq. ID no. 12716285
  misc_feature (136)..(439): Homolog of NCBI NO: 15218579 NR Description: unknown protein; protein id: At1g43910.1
  misc_feature (3)..(159): Homolog of NCBI NO: 15218579 NR Description: unknown protein; protein id: At1g43910.1
  misc_feature (136)..(439): Homolog of NCBI NO: 39104583 NR Description: unknown protein [Arabidopsis thaliana]
  misc_feature (3)..(159): Homolog of NCBI NO: 39104583 NR Description: unknown protein [Arabidopsis thaliana]
  misc_feature (192)..(439): Homolog of NCBI NO: 15235565 NR Description: putative protein; protein id: At4g05380.1
  misc_feature (136)..(434): Homolog of NCBI NO: 30686502 NR Description: BCS1 - like protein [Arabidopsis thaliana]
  misc_feature (6)..(135): Homolog of NCBI NO: 30686502 NR Description: BCS1 - like protein [Arabidopsis thaliana]
  misc_feature (136)..(439): Homolog of NCBI NO: 25411838 NR Description: probable AAA-type ATPase [imported] - Arabidopsis
  misc_feature (136)..(439): Homolog of NCBI NO: 30680274 NR Description: AAA-type ATPase family [Arabidopsis thaliana]
  misc_feature (11)..(172): Homolog of NCBI NO: 25411838 NR Description: probable AAA-type ATPase [imported] - Arabidopsis
MASNLFTKIPSLSAIFSVYTSLSAFTILFKTILYEFIPVNIRDFIISKFTDYFSFYLNSNFTFIIEEQSDYVMNQTFRAAQVYLPTLLSRITTRSLLVSSSDLKNPMAKPKFGIPVKAKIIDEFEGIRLEWTLLSKEFRDKIMSDYFTYIAKSSVKILTHKENLNIYNYNPDCLRWESAIFQHHTTFETLAMEPELKNTLIRDLDAFSNGKDFFKTVGRAWKRGYLLYGPPGTGKSSLVAAIANFMNYSIYDLQIQSVKDDAMLRQILTSTENRSILLIEDLDCSGADTTCRKENKDETEYGENQNKKKKKDPKVTLSGLLNFVDGLWSSCVEERIIIFTTNHKEKLDPALLRPGRMDVHILMDYCTPIVFKKLAALYLEIEEHELFDPIEKMFLEVKATPAEITEKLMVSKDPDVTLKGLVEFLESKKMTKESVDSEI

SEQ ID NO: 89230 - protein, 367 aa, Arabidopsis thaliana
  peptide (1)..(367): Ceres Seq. ID no. 12716286
  misc_feature (64)..(367): Homolog of NCBI NO: 15218579 NR Description: unknown protein; protein id: At1g43910.1
  misc_feature (1)..(87): Homolog of NCBI NO: 15218579 NR Description: unknown protein; protein id: At1g43910.1
  misc_feature (64)..(367): Homolog of NCBI NO: 39104583 NR Description: unknown protein [Arabidopsis thaliana]
  misc_feature (1)..(87): Homolog of NCBI NO: 39104583 NR Description: unknown protein [Arabidopsis thaliana]
  misc_feature (120)..(367): Homolog of NCBI NO: 15235565 NR Description: putative protein; protein id: At4g05380.1
  misc_feature (64)..(362): Homolog of NCBI NO: 30686502 NR Description: BCS1 - like protein [Arabidopsis thaliana]
  misc_feature (1)..(63): Homolog of NCBI NO: 30686502 NR Description: BCS1 - like protein [Arabidopsis thaliana]
  misc_feature (64)..(367): Homolog of NCBI NO: 25411838 NR Description: probable AAA-type ATPase [imported] - Arabidopsis
  misc_feature (64)..(367): Homolog of NCBI NO: 30680274 NR Description: AAA-type ATPase family [Arabidopsis thaliana]
  misc_feature (1)..(100): Homolog of NCBI NO: 25411838 NR Description: probable AAA-type ATPase [imported] - Arabidopsis
MNQTFRAAQVYLPTLLSRITTRSLLVSSSDLKNPMAKPKFGIPVKAKIIDEFEGIRLEWTLLSKEFRDKIMSDYFTYIAKSSVKILTHKENLNIYNYNPDCLRWESAIFQHHTTFETLAMEPELKNTLIRDLDAFSNGKDFFKTVGRAWKRGYLLYGPPGTGKSSLVAAIANFMNYSIYDLQIQSVKDDAMLRQILTSTENRSILLIEDLDCSGADTTCRKENKDETEYGENQNKKKKKDPKVTLSGLLNFVDGLWSSCVEERIIIFTTNHKEKLDPALLRPGRMDVHILMDYCTPIVFKKLAALYLEIEEHELFDPIEKMFLEVKATPAEITEKLMVSKDPDVTLKGLVEFLESKKMTKESVDSEI

SEQ ID NO: 89231 - protein, 333 aa, Arabidopsis thaliana
  peptide (1)..(333): Ceres Seq. ID no. 12716287
  misc_feature (30)..(333): Homolog of NCBI NO: 15218579 NR Description: unknown protein; protein id: At1g43910.1
  misc_feature (1)..(53): Homolog of NCBI NO: 15218579 NR Description: unknown protein; protein id: At1g43910.1
  misc_feature (30)..(333): Homolog of NCBI NO: 39104583 NR Description: unknown protein [Arabidopsis thaliana]
  misc_feature (1)..(53): Homolog of NCBI NO: 39104583 NR Description: unknown protein [Arabidopsis thaliana]
  misc_feature (86)..(333): Homolog of NCBI NO: 15235565 NR Description: putative protein; protein id: At4g05380.1
  misc_feature (30)..(328): Homolog of NCBI NO: 30686502 NR Description: BCS1 - like protein [Arabidopsis thaliana]
  misc_feature (1)..(29): Homolog of NCBI NO: 30686502 NR Description: BCS1 - like protein [Arabidopsis thaliana]
  misc_feature (30)..(333): Homolog of NCBI NO: 25411838 NR Description: probable AAA-type ATPase [imported] - Arabidopsis
  misc_feature (30)..(333): Homolog of NCBI NO: 30680274 NR Description: AAA-type ATPase family [Arabidopsis thaliana]
  misc_feature (1)..(66): Homolog of NCBI NO: 25411838 NR Description: probable AAA-type ATPase [imported] - Arabidopsis
MAKPKFGIPVKAKIIDEFEGIRLEWTLLSKEFRDKIMSDYFTYIAKSSVKILTHKENLNIYNYNPDCLRWESAIFQHHTTFETLAMEPELKNTLIRDLDAFSNGKDFFKTVGRAWKRGYLLYGPPGTGKSSLVAAIANFMNYSIYDLQIQSVKDDAMLRQILTSTENRSILLIEDLDCSGADTTCRKENKDETEYGENQNKKKKKDPKVTLSGLLNFVDGLWSSCVEERIIIFTTNHKEKLDPALLRPGRMDVHILMDYCTPIVFKKLAALYLEIEEHELFDPIEKMFLEVKATPAEITEKLMVSKDPDVTLKGLVEFLESKKMTKESVDSEI

SEQ ID NO: 89232 - DNA, 897 bp, Arabidopsis thaliana
  misc_feature (1)..(897): Ceres Seq. ID no. 12716632
  misc_feature: MA Experiment ID: 20000185 Result: Down-regulated in Transcription
  misc_feature: MA Experiment 20000185 PARAMETER Experiment Name: At_Roots__P Parameter: Age (day) Value: 7 vs. 21
  misc_feature: MA Experiment 20000185 PARAMETER Experiment Name: At_Roots__P Parameter: Organism Value: A. thaliana
  misc_feature: MA Experiment 20000185 PARAMETER Experiment Name: At_Roots__P Parameter: Tissue Value: Roots vs. Whole Plant
  misc_feature: MA Experiment ID: 20000437 Result: Down-regulated in Transcription
  misc_feature: MA Experiment 20000437 PARAMETER Experiment Name: At_Drought_P Parameter: Age (day) Value: 8
  misc_feature: MA Experiment 20000437 PARAMETER Experiment Name: At_Drought_P Parameter: Organism Value: A. thaliana
  misc_feature: MA Experiment 20000437 PARAMETER Experiment Name: At_Drought_P Parameter: Plant Line Value: WS
  misc_feature: MA Experiment 20000437 PARAMETER Experiment Name: At_Drought_P Parameter: Timepoint (hr) Value: 24
  misc_feature: MA Experiment 20000437 PARAMETER Experiment Name: At_Drought_P Parameter: Tissue Value: Whole Plant
  misc_feature: MA Experiment 20000437 PARAMETER Experiment Name: At_Drought_P Parameter: Treatment Value: Drought vs. No Drought
  misc_feature: MA Experiment ID: 20000438 Result: Up-regulated in Transcription
  misc_feature: MA Experiment 20000438 PARAMETER Experiment Name: At_Shoots__P Parameter: Age (day) Value: 14
  misc_feature: MA Experiment 20000438 PARAMETER Experiment Name: At_Shoots__P Parameter: Tissue Value: Shoots vs. Whole Plant
  misc_feature: MA Experiment ID: 20000439 Result: Down-regulated in Transcription
  misc_feature: MA Experiment 20000439 PARAMETER Experiment Name: At_Roots__P Parameter: Age (day) Value: 14 vs. 21
  misc_feature: MA Experiment 20000439 PARAMETER Experiment Name: At_Roots__P Parameter: Organism Value: A. thaliana
  misc_feature: MA Experiment 20000439 PARAMETER Experiment Name: At_Roots__P Parameter: Tissue Value: Roots vs. Whole Plant
  misc_feature: MA Experiment ID: 20000495 Result: Down-regulated in Transcription
  misc_feature: MA Experiment 20000495 PARAMETER Experiment Name: At_Guard_Cells_P Parameter: Harvest Date Value: 8/2/2002
  misc_feature: MA Experiment 20000495 PARAMETER Experiment Name: At_Guard_Cells_P Parameter: Organism Value: A. thaliana
  misc_feature: MA Experiment 20000495 PARAMETER Experiment Name: At_Guard_Cells_P Parameter: Tissue Value: Guard Cells vs. Leaves
  misc_feature: MA Experiment ID: 20000794 Result: Down-regulated in Transcription
  misc_feature: MA Experiment 20000794 PARAMETER Experiment Name: At_Petals_P Parameter: Age (day) Value: 23-25 days
  misc_feature: MA Experiment 20000794 PARAMETER Experiment Name: At_Petals_P Parameter: Plant Line Value: WS
  misc_feature: MA Experiment 20000794 PARAMETER Experiment Name: At_Petals_P Parameter: Tissue Value: Petals vs. Whole plant
  misc_feature: MA Experiment ID: 20001451 Result: Down-regulated in Transcription
  misc_feature: MA Experiment 20001451 PARAMETER Experiment Name: At_Far-red-induction_P Parameter: Age (day) Value: 7
  misc_feature: MA Experiment 20001451 PARAMETER Experiment Name: At_Far-red-induction_P Parameter: Light Value: Far-red vs. White
  misc_feature: MA Experiment 20001451 PARAMETER Experiment Name: At_Far-red-induction_P Parameter: Organism Value: A. thaliana
  misc_feature: MA Experiment 20001451 PARAMETER Experiment Name: At_Far-red-induction_P Parameter: Plant Line Value: Columbia
  misc_feature: MA Experiment 20001451 PARAMETER Experiment Name: At_Far-red-induction_P Parameter: Timepoint (hr) Value: 24
  misc_feature: MA Experiment 20001451 PARAMETER Experiment Name: At_Far-red-induction_P Parameter: Tissue Value: Whole Plant
  misc_feature: MA Experiment ID: 20001556 Result: Up-regulated in Transcription
  misc_feature: MA Experiment 20001556 PARAMETER Experiment Name: At_Drought_Soil_Dry_P Parameter: Age (day) Value: 26
  misc_feature: MA Experiment 20001556 PARAMETER Experiment Name: At_Drought_Soil_Dry_P Parameter: Organism Value: A. thaliana
  misc_feature: MA Experiment 20001556 PARAMETER Experiment Name: At_Drought_Soil_Dry_P Parameter: Plant Line Value: WS
  misc_feature: MA Experiment 20001556 PARAMETER Experiment Name: At_Drought_Soil_Dry_P Parameter: Post Timepoint (hr) Value: None
  misc_feature: MA Experiment 20001556 PARAMETER Experiment Name: At_Drought_Soil_Dry_P Parameter: Post-Treatment Value: None
  misc_feature: MA Experiment 20001556 PARAMETER Experiment Name: At_Drought_Soil_Dry_P Parameter: Timepoint (day) Value: 12
  misc_feature: MA Experiment 20001556 PARAMETER Experiment Name: At_Drought_Soil_Dry_P Parameter: Treatment Value: Drought vs. No Drought
  misc_feature: MA Experiment ID: 20001558 Result: Up-regulated in Transcription
  misc_feature: MA Experiment 20001558 PARAMETER Experiment Name: At_Drought_Soil_Dry_P Parameter: Age (day) Value: 27
  misc_feature: MA Experiment 20001558 PARAMETER Experiment Name: At_Drought_Soil_Dry_P Parameter: Organism Value: A. thaliana
  misc_feature: MA Experiment 20001558 PARAMETER Experiment Name: At_Drought_Soil_Dry_P Parameter: Plant Line Value: WS
  misc_feature: MA Experiment 20001558 PARAMETER Experiment Name: At_Drought_Soil_Dry_P Parameter: Post Timepoint (hr) Value: 6
  misc_feature: MA Experiment 20001558 PARAMETER Experiment Name: At_Drought_Soil_Dry_P Parameter: Post-Treatment Value: Re-Water vs. No Drought
  misc_feature: MA Experiment 20001558 PARAMETER Experiment Name: At_Drought_Soil_Dry_P Parameter: Timepoint (day) Value: 13
  misc_feature: MA Experiment 20001558 PARAMETER Experiment Name: At_Drought_Soil_Dry_P Parameter: Treatment Value: Drought vs. No Drought
  misc_feature: MA Experiment ID: 20001757 Result: Up-regulated in Transcription
  misc_feature: MA Experiment 20001757 PARAMETER Experiment Name: At_50mM_NH4NO3_L-to-H_P Parameter: Timepoint (hr) Value: 6
  misc_feature: MA Experiment 20001757 PARAMETER Experiment Name: At_50mM_NH4NO3_L-to-H_P Parameter: Tissue Value: Leaf
  misc_feature: MA Experiment 20001757 PARAMETER Experiment Name: At_50mM_NH4NO3_L-to-H_P Parameter: Treatment Value: 50mM NH4NO3 vs 100mM Mannitol
  misc_feature: MA Experiment ID: 20001911 Result: Down-regulated in Transcription
  misc_feature: MA Experiment 20001911 PARAMETER Experiment Name: At_Drought_Reproduction_P Parameter: Age (day) Value: 40
  misc_feature: MA Experiment 20001911 PARAMETER Experiment Name: At_Drought_Reproduction_P Parameter: Organism Value: A. thaliana
  misc_feature: MA Experiment 20001911 PARAMETER Experiment Name: At_Drought_Reproduction_P Parameter: Plant Line Value: WS
  misc_feature: MA Experiment 20001911 PARAMETER Experiment Name: At_Drought_Reproduction_P Parameter: Timepoint (day) Value: 10
  misc_feature: MA Experiment 20001911 PARAMETER Experiment Name: At_Drought_Reproduction_P Parameter: Tissue Value: Flowers
  misc_feature: MA Experiment 20001911 PARAMETER Experiment Name: At_Drought_Reproduction_P Parameter: Treatment Value: Drought vs. No Drought
atgaataagaatctgggtgtttcgtattcttctttccctcaaattcatctctttaagggttctactccactgcgtgttcgaacattcgtcgtctcgagtcgtaaaaattcaggaactggtttggcaagtgaggataagaaattgttgctggaacgatatggttatgatgctaatgatgactttgggtctcaatctaagaaggcgagaaggaaagaagagaaaatgagtggaaggaatagtcaacaagtagaagaagttgttgttgtacagccaagaacaactcataggttactgcaggttcttgcaggaacggcgaaacgaaagaaattgctttctcttaagggaatggatgtgagacctatgatggaagttgttaaaggagcagcttttggaattctccaggctgctggtggttgtccaacgtctctgcgtcctggtaggtggttggatttgtatagtggtacagggtctgttgggattgaagcaatcagtcgaggatgttctgaggcacattttgttgagatggatccttgggttgtttcaaatgttctacaaccaaacttggaacacactgggtttgttgatgcttcggttatacacactgctcgagttgaaaacttcctggaacgtgctgataaattagtaggtaaggatggagtgtttgattatatcagcgttacgccaccttacatggaggttgattatgaggttctgatggatcagattgctaagtcaccagcgattggggaaaatacttttattttggtcgagtacccatcacgaacaacaatgcttgattcatgtggatgccttgaaaagatgactgatagaaggtttggccggacacatctagctatatatggaccaaaatgggctcagaagccaagaaaatcttaa

SEQ ID NO: 89233 - protein, 298 aa, Arabidopsis thaliana; identical to SEQ ID NO: 45097
  peptide (1)..(298): Ceres Seq. ID no. 12716633
  misc_feature (98)..(288): Pfam Name: Conserved hypothetical protein 95 Pfam Description: Conserved hypothetical protein 95
  misc_feature (1)..(298): Homolog of NCBI NO: 22331389 NR Description: unknown protein; protein id: At3g28460.1, by cDNA: gi_18389225 [Arabidopsis thaliana] gb|AAC66597.1~gene_id:MFJ20.15~similar to unknown protein
  misc_feature (23)..(298): Homolog of NCBI NO: 29788862 NR Description: hypothetical protein [Oryza sativa (japonica
  misc_feature (98)..(287): Homolog of NCBI NO: 39996346 NR Description: methyltransferase, putative [Geobacter PCA] >gi|39983226|gb|AAR34620.1| methyltransferase, putative
  misc_feature (121)..(287): Homolog of NCBI NO: 22973536 NR Description: hypothetical protein [Chloroflexus aurantiacus]
  misc_feature (98)..(287): Homolog of NCBI NO: 34763572 NR Description: METHYLTRANSFERASE [Fusobacterium nucleatum subsp. ATCC 49256] >gi|27886761|gb|EAA23899.1| METHYLTRANSFERASE
  misc_feature (98)..(287): Homolog of NCBI NO: 19704664 NR Description: Methyltransferase [Fusobacterium nucleatum subsp. ATCC 25586] >gi|19714972|gb|AAL95525.1| Methyltransferase
  misc_feature (98)..(287): Homolog of NCBI NO: 16804092 NR Description: similar to unknown proteins [Listeria
  misc_feature (98)..(290): Homolog of NCBI NO: 28210920 NR Description: methyltransferase [Clostridium tetani E88]
  misc_feature (98)..(287): Homolog of NCBI NO: 16801225 NR Description: similar to unknown proteins [Listeria innocua]
  misc_feature (98)..(287): Homolog of NCBI NO: 20807931 NR Description: N6-adenine-specific methylase [Thermoanaerobacter

SEQ ID NO: 89234 - protein, 224 aa, Arabidopsis thaliana
  peptide (1)..(224): Ceres Seq. ID no. 12716634
  misc_feature (24)..(214): Pfam Name: Conserved hypothetical protein 95 Pfam Description: Conserved hypothetical protein 95
  misc_feature (1)..(224): Homolog of NCBI NO: 22331389 NR Description: unknown protein; protein id: At3g28460.1, by cDNA: gi_18389225 [Arabidopsis thaliana] gb|AAC66597.1~gene_id:MFJ20.15~similar to unknown protein
  misc_feature (1)..(224): Homolog of NCBI NO: 29788862 NR Description: hypothetical protein [Oryza sativa (japonica
  misc_feature (24)..(213): Homolog of NCBI NO: 39996346 NR Description: methyltransferase, putative [Geobacter PCA] >gi|39983226|gb|AAR34620.1| methyltransferase, putative
  misc_feature (47)..(213): Homolog of NCBI NO: 22973536 NR Description: hypothetical protein [Chloroflexus aurantiacus]
  misc_feature (24)..(213): Homolog of NCBI NO: 34763572 NR Description: METHYLTRANSFERASE [Fusobacterium nucleatum subsp. ATCC 49256] >gi|27886761|gb|EAA23899.1| METHYLTRANSFERASE
  misc_feature (24)..(213): Homolog of NCBI NO: 19704664 NR Description: Methyltransferase [Fusobacterium nucleatum subsp. ATCC 25586] >gi|19714972|gb|AAL95525.1| Methyltransferase
  misc_feature (24)..(213): Homolog of NCBI NO: 16804092 NR Description: similar to unknown proteins [Listeria
  misc_feature (24)..(216): Homolog of NCBI NO: 28210920 NR Description: methyltransferase [Clostridium tetani E88]
  misc_feature (24)..(213): Homolog of NCBI NO: 16801225 NR Description: similar to unknown proteins [Listeria innocua]
  misc_feature (24)..(213): Homolog of NCBI NO: 20807931 NR Description: N6-adenine-specific methylase [Thermoanaerobacter
MSGRNSQQVEEVVVVQPRTTHRLLQVLAGTAKRKKLLSLKGMDVRPMMEVVKGAAFGILQAAGGCPTSLRPGRWLDLYSGTGSVGIEAISRGCSEAHFVEMDPWVVSNVLQPNLEHTGFVDASVIHTARVENFLERADKLVGKDGVFDYISVTPPYMEVDYEVLMDQIAKSPAIGENTFILVEYPSRTTMLDSCGCLEKMTDRRFGRTHLAIYGPKWAQKPRKS

SEQ ID NO: 89235 - protein, 183 aa, Arabidopsis thaliana
  peptide (1)..(183): Ceres Seq. ID no. 12716635
  misc_feature (1)..(173): Pfam Name: Conserved hypothetical protein 95 Pfam Description: Conserved hypothetical protein 95
  misc_feature (1)..(183): Homolog of NCBI NO: 22331389 NR Description: unknown protein; protein id: At3g28460.1, by cDNA: gi_18389225 [Arabidopsis thaliana] gb|AAC66597.1~gene_id:MFJ20.15~similar to unknown protein
  misc_feature (1)..(183): Homolog of NCBI NO: 29788862 NR Description: hypothetical protein [Oryza sativa (japonica
  misc_feature (1)..(172): Homolog of NCBI NO: 39996346 NR Description: methyltransferase, putative [Geobacter PCA] >gi|39983226|gb|AAR34620.1| methyltransferase, putative
  misc_feature (6)..(172): Homolog of NCBI NO: 22973536 NR Description: hypothetical protein [Chloroflexus aurantiacus]
  misc_feature (1)..(172): Homolog of NCBI NO: 34763572 NR Description: METHYLTRANSFERASE [Fusobacterium nucleatum subsp. ATCC 49256] >gi|27886761|gb|EAA23899.1| METHYLTRANSFERASE
  misc_feature (1)..(172): Homolog of NCBI NO: 19704664 NR Description: Methyltransferase [Fusobacterium nucleatum subsp. ATCC 25586] >gi|19714972|gb|AAL95525.1| Methyltransferase
  misc_feature (1)..(172): Homolog of NCBI NO: 16804092 NR Description: similar to unknown proteins [Listeria
  misc_feature (1)..(175): Homolog of NCBI NO: 28210920 NR Description: methyltransferase [Clostridium tetani E88]
  misc_feature (1)..(172): Homolog of NCBI NO: 16801225 NR Description: similar to unknown proteins [Listeria innocua]
  misc_feature (1)..(172): Homolog of NCBI NO: 20807931 NR Description: N6-adenine-specific methylase [Thermoanaerobacter
MDVRPMMEVVKGAAFGILQAAGGCPTSLRPGRWLDLYSGTGSVGIEAISRGCSEAHFVEMDPWVVSNVLQPNLEHTGFVDASVIHTARVENFLERADKLVGKDGVFDYISVTPPYMEVDYEVLMDQIAKSPAIGENTFILVEYPSRTTMLDSCGCLEKMTDRRFGRTHLAIYGPKWAQKPRKS

SEQ ID NO: 89236 - DNA, 2982 bp, Arabidopsis thaliana
  misc_feature (1)..(2982): Ceres Seq. ID no. 12716642
  misc_feature: MA Experiment ID: 20000307 Result: Up-regulated in Transcription
  misc_feature: MA Experiment 20000307 PARAMETER Experiment Name: At_Germinating_Seeds_Sub_P Parameter: Age (hr) Value: 24 vs. 0
  misc_feature: MA Experiment 20000307 PARAMETER Experiment Name: At_Germinating_Seeds_Sub_P Parameter: Organism Value: A. thaliana
  misc_feature: MA Experiment 20000307 PARAMETER Experiment Name: At_Germinating_Seeds_Sub_P Parameter: Plant Line Value: WS
  misc_feature: MA Experiment 20000307 PARAMETER Experiment Name: At_Germinating_Seeds_Sub_P Parameter: Tissue Value: Germinating Seeds
  misc_feature: MA Experiment ID: 20000314 Result: Up-regulated in Transcription
  misc_feature: MA Experiment 20000314 PARAMETER Experiment Name: At_14day_Shoots-Roots_Sub_P Parameter: Age (day) Value: 14
  misc_feature: MA Experiment 20000314 PARAMETER Experiment Name: At_14day_Shoots-Roots_Sub_P Parameter: Organism Value: A. thaliana
  misc_feature: MA Experiment 20000314 PARAMETER Experiment Name: At_14day_Shoots-Roots_Sub_P Parameter: Plant Line Value: WS
  misc_feature: MA Experiment 20000314 PARAMETER Experiment Name: At_14day_Shoots-Roots_Sub_P Parameter: Tissue Value: Roots vs. Whole Plant
atggggccttctgcccatctcgtctacgctataggagttatcatcatggcaacaatggttgcggcatatgagccatacacagatagctcacctccaccatactctgtgccacttcccaaagtggaatacaaatctcctccattaccagatgtttacagttctccaccaccaccactagaatactctccagcgcctaaagttgattataaatctccaccaccaccatactattcaccatctcctaaagttgagtacaagtctcctccaccaccatatgtctacaactctccaccaccaccatattactctccatccccaaaggtagactacaagtctcctccaccaccatatgtttacagttcgccaccaccaccaatctattcaccatctcctaaggtagactacaaatctcctccaccaccatatgtttacagttccccaccaccaccatactattcgccatcccctaaggtggagtacaaatctccaccatcaccgtatgtttacaactctccaccaccatcatattattcaccatcccctaaggtagattacaaatctcctccaccaccatatgtttatagttctccaccaccaccatattactctccatcccctaaggttgtatacaagtctcctcctccaccatatgtttacagttctccaccaccaccatactactcaccatcacctaaggtagactacaagtctccaccaccaccatacgtctacagctcaccaccaccaccatactactcaccttctcctaagatagtctacaaatctcccccaccaccgtacgtctacagctccccaccacccccatactactcaccttcccctaaggtagactacaaatctcccccaccaccgtatgtctacagttctccaccaccaccatactactctccatcccctaaggttgtatacaagtctcctcctccaccatatgtttacagttccccaccaccaccatactactcaccaaccccgaaggtagactacaaatctcctcctccaccatatgtttacagttctccaccaccaccatactactcaccatcacctaaggtagactacaagtctccaccaccaccatacgtctacagctcaccaccaccaccatactactcaccttctcctaagatagtctacaaatctcccccaccaccgtacgtctacagctccccaccacccccatactacacaccttcaccaaaggttgtatacaagtctcctcctccaccatatgtttacagttccccaccaccaccatactactcaccatcccctaaggtagactacaaatctcctcctccaccatatgtttacagttctcctccaccaccatactactcgccatctccaaaggttgtatacaaatctcctcctccaccatatgtttacagttctcctccaccaccatactattcaccatcccctaaggtagactacaagtctcctccaccaccatatgtttacagttctccaccaccaccgtactactctccttcaccaaaggttttatacaagtctcccccaccaccgtatgtctacagttctccaccaccaccatactactctccttctcctaaggtagtctacaagtctcccccaccaccgtatgtttacagttctccaccacctccatactactctccttctcctaaggtagtctacaagtctcccccaccaccgtatgtctacagttctccaccaccaccatactactctccttctcctaaggtagtctacaagtctcccccaccaccatacgtttacagttctccaccaccaccatactactccccttctcctaaagtatactacaagtctcctccatcaccataccacgcaccatcccctaaggttctatacaaatctccaccacaccctcatgtatgtgtctgtccaccacctcctccatgttattctccatctccaaaggtacactacaagtctcccccaccaccgtatgtctacagttctccaccaccaccatattactctccttcccctaaggtacactacaagtctcccccaccaccgtatgtctatagttctccaccaccaccatactactctccttctcctaaggtagtctacaagtctcccccaccaccgtatgtttacagttctccaccacctccatactattctccttctcctaaggtagtctacaagtctcccccaccaccgtatgtctacagttctccaccaccaccatactactctccttctcctaaggtagtctacaagtctcccccaccaccatacgtttacagttctccaccaccaccatattattctccttctcctaaggtagtctacaagtctcctccaccaccgtatgtctacagttctccaccaccaccatactactctccttctcctaaggtagtctacaagtctcccccaccaccgtacgtctacagctcaccaccaccaccatactactctccttctcctaaagtagtttacaagtctcccccaccaccgtacgtctacagctcaccaccaccaccatactactcaccttcccctaaggtagactacaaatctcccccaccaccgtacgtctacagctcaccaccaccaccatactactcaccttcccctaaagtagactacaaatctcctccaccaccgtacgtctatagctcaccaccaccaccatactactcaccttccccgaaggtagactacaaatctcccccaccaccgtatgtctacagctcacccccaccaccatactactcacctgcccctaaggtagattacaaatctccaccaccaccatacgtctatagttcaccaccaccaccatactactcaccttcccctaaggttgactacaaatctcctccaccaccatactactcaccttcccctaaggttgactacaaatctcctccaccaccatatgtctacagttctccaccaccaccatcatactcaccttctccaaaaactgagtactaa

SEQ ID NO: 89237 - protein, 993 aa, Arabidopsis thaliana
  peptide (1)..(993): Ceres Seq. ID no. 12716643
  misc_feature (638)..(942): Pfam Name: Formin Homology 2 Domain Pfam Description: Formin Homology 2 Domain
  misc_feature (32)..(602): Homolog of NCBI NO: 15239790 NR Description: putative protein; protein id: At5g49080.1 thaliana] >gi|10176941|dbj|BAB10090.1|
  misc_feature (142)..(719): Homolog of NCBI NO: 15239790 NR Description: putative protein; protein id: At5g49080.1 thaliana] >gi|10176941|dbj|BAB10090.1|
  misc_feature (192)..(769): Homolog of NCBI NO: 15239790 NR Description: putative protein; protein id: At5g49080.1 thaliana] >gi|10176941|dbj|BAB10090.1|
  misc_feature (160)..(744): Homolog of NCBI NO: 15239790 NR Description: putative protein; protein id: At5g49080.1 thaliana] >gi|10176941|dbj|BAB10090.1|
  misc_feature (367)..(944): Homolog of NCBI NO: 15239790 NR Description: putative protein; protein id: At5g49080.1 thaliana] >gi|10176941|dbj|BAB10090.1|
  misc_feature (392)..(980): Homolog of NCBI NO: 15239790 NR Description: putative protein; protein id: At5g49080.1 thaliana] >gi|10176941|dbj|BAB10090.1|
  misc_feature (217)..(794): Homolog of NCBI NO: 15239790 NR Description: putative protein; protein id: At5g49080.1 thaliana] >gi|10176941|dbj|BAB10090.1|
  misc_feature (342)..(919): Homolog of NCBI NO: 15239790 NR Description: putative protein; protein id: At5g49080.1 thaliana] >gi|10176941|dbj|BAB10090.1|
  misc_feature (242)..(819): Homolog of NCBI NO: 15239790 NR Description: putative protein; protein id: At5g49080.1 thaliana] >gi|10176941|dbj|BAB10090.1|
  misc_feature (267)..(844): Homolog of NCBI NO: 15239790 NR Description: putative protein; protein id: At5g49080.1 thaliana] >gi|10176941|dbj|BAB10090.1|
MGPSAHLVYAIGVIIMATMVAAYEPYTDSSPPPYSVPLPKVEYKSPPLPDVYSSPPPPLEYSPAPKVDYKSPPPPYYSPSPKVEYKSPPPPYVYNSPPPPYYSPSPKVDYKSPPPPYVYSSPPPPIYSPSPKVDYKSPPPPYVYSSPPPPYYSPSPKVEYKSPPSPYVYNSPPPSYYSPSPKVDYKSPPPPYVYSSPPPPYYSPSPKVVYKSPPPPYVYSSPPPPYYSPSPKVDYKSPPPPYVYSSPPPPYYSPSPKIVYKSPPPPYVYSSPPPPYYSPSPKVDYKSPPPPYVYSSPPPPYYSPSPKVVYKSPPPPYVYSSPPPPYYSPTPKVDYKSPPPPYVYSSPPPPYYSPSPKVDYKSPPPPYVYSSPPPPYYSPSPKIVYKSPPPPYVYSSPPPPYYTPSPKVVYKSPPPPYVYSSPPPPYYSPSPKVDYKSPPPPYVYSSPPPPYYSPSPKVVYKSPPPPYVYSSPPPPYYSPSPKVDYKSPPPPYVYSSPPPPYYSPSPKVLYKSPPPPYVYSSPPPPYYSPSPKVVYKSPPPPYVYSSPPPPYYSPSPKVVYKSPPPPYVYSSPPPPYYSPSPKVVYKSPPPPYVYSSPPPPYYSPSPKVYYKSPPSPYHAPSPKVLYKSPPHPHVCVCPPPPPCYSPSPKVHYKSPPPPYVYSSPPPPYYSPSPKVHYKSPPPPYVYSSPPPPYYSPSPKVVYKSPPPPYVYSSPPPPYYSPSPKVVYKSPPPPYVYSSPPPPYYSPSPKVVYKSPPPPYVYSSPPPPYYSPSPKVVYKSPPPPYVYSSPPPPYYSPSPKVVYKSPPPPYVYSSPPPPYYSPSPKVVYKSPPPPYVYSSPPPPYYSPSPKVDYKSPPPPYVYSSPPPPYYSPSPKVDYKSPPPPYVYSSPPPPYYSPSPKVDYKSPPPPYVYSSPPPPYYSPAPKVDYKSPPPPYVYSSPPPPYYSPSPKVDYKSPPPPYYSPSPKVDYKSPPPPYVYSSPPPPSYSPSPKTEY

SEQ ID NO: 89238 - protein, 978 aa, Arabidopsis thaliana
  peptide (1)..(978): Ceres Seq. ID no. 12716644
  misc_feature (623)..(927): Pfam Name: Formin Homology 2 Domain Pfam Description: Formin Homology 2 Domain
  misc_feature (17)..(587): Homolog of NCBI NO: 15239790 NR Description: putative protein; protein id: At5g49080.1 thaliana] >gi|10176941|dbj|BAB10090.1|
  misc_feature (127)..(704): Homolog of NCBI NO: 15239790 NR Description: putative protein; protein id: At5g49080.1 thaliana] >gi|10176941|dbj|BAB10090.1|
  misc_feature (177)..(754): Homolog of NCBI NO: 15239790 NR Description: putative protein; protein id: At5g49080.1 thaliana] >gi|10176941|dbj|BAB10090.1|
  misc_feature (145)..(729): Homolog of NCBI NO: 15239790 NR Description: putative protein; protein id: At5g49080.1 thaliana] >gi|10176941|dbj|BAB10090.1|
  misc_feature (352)..(929): Homolog of NCBI NO: 15239790 NR Description: putative protein; protein id: At5g49080.1 thaliana] >gi|10176941|dbj|BAB10090.1|
  misc_feature (377)..(965): Homolog of NCBI NO: 15239790 NR Description: putative protein; protein id: At5g49080.1 thaliana] >gi|10176941|dbj|BAB10090.1|
  misc_feature (202)..(779): Homolog of NCBI NO: 15239790 NR Description: putative protein; protein id: At5g49080.1 thaliana] >gi|10176941|dbj|BAB10090.1|
  misc_feature (327)..(904): Homolog of NCBI NO: 15239790 NR Description: putative protein; protein id: At5g49080.1 thaliana] >gi|10176941|dbj|BAB10090.1|
  misc_feature (227)..(804): Homolog of NCBI NO: 15239790 NR Description: putative protein; protein id: At5g49080.1 thaliana] >gi|10176941|dbj|BAB10090.1|
  misc_feature (252)..(829): Homolog of NCBI NO: 15239790 NR Description: putative protein; protein id: At5g49080.1 thaliana] >gi|10176941|dbj|BAB10090.1|
MATMVAAYEPYTDSSPPPYSVPLPKVEYKSPPLPDVYSSPPPPLEYSPAPKVDYKSPPPPYYSPSPKVEYKSPPPPYVYNSPPPPYYSPSPKVDYKSPPPPYVYSSPPPPIYSPSPKVDYKSPPPPYVYSSPPPPYYSPSPKVEYKSPPSPYVYNSPPPSYYSPSPKVDYKSPPPPYVYSSPPPPYYSPSPKVVYKSPPPPYVYSSPPPPYYSPSPKVDYKSPPPPYVYSSPPPPYYSPSPKIVYKSPPPPYVYSSPPPPYYSPSPKVDYKSPPPPYVYSSPPPPYYSPSPKVVYKSPPPPYVYSSPPPPYYSPTPKVDYKSPPPPYVYSSPPPPYYSPSPKVDYKSPPPPYVYSSPPPPYYSPSPKIVYKSPPPPYVYSSPPPPYYTPSPKVVYKSPPPPYVYSSPPPPYYSPSPKVDYKSPPPPYVYSSPPPPYYSPSPKVVYKSPPPPYVYSSPPPPYYSPSPKVDYKSPPPPYVYSSPPPPYYSPSPKVLYKSPPPPYVYSSPPPPYYSPSPKVVYKSPPPPYVYSSPPPPYYSPSPKVVYKSPPPPYVYSSPPPPYYSPSPKVVYKSPPPPYVYSSPPPPYYSPSPKVYYKSPPSPYHAPSPKVLYKSPPHPHVCVCPPPPPCYSPSPKVHYKSPPPPYVYSSPPPPYYSPSPKVHYKSPPPPYVYSSPPPPYYSPSPKVVYKSPPPPYVYSSPPPPYYSPSPKVVYKSPPPPYVYSSPPPPYYSPSPKVVYKSPPPPYVYSSPPPPYYSPSPKVVYKSPPPPYVYSSPPPPYYSPSPKVVYKSPPPPYVYSSPPPPYYSPSPKVVYKSPPPPYVYSSPPPPYYSPSPKVDYKSPPPPYVYSSPPPPYYSPSPKVDYKSPPPPYVYSSPPPPYYSPSPKVDYKSPPPPYVYSSPPPPYYSPAPKVDYKSPPPPYVYSSPPPPYYSPSPKVDYKSPPPPYYSPSPKVDYKSPPPPYVYSSPPPPSYSPSPKTEY

SEQ ID NO: 89239 - protein, 975 aa, Arabidopsis thaliana
  peptide (1)..(975): Ceres Seq. ID no. 12716645
  misc_feature (620)..(924): Pfam Name: Formin Homology 2 Domain Pfam Description: Formin Homology 2 Domain
  misc_feature (14)..(584): Homolog of NCBI NO: 15239790 NR Description: putative protein; protein id: At5g49080.1 thaliana] >gi|10176941|dbj|BAB10090.1|
  misc_feature (124)..(701): Homolog of NCBI NO: 15239790 NR Description: putative protein; protein id: At5g49080.1 thaliana] >gi|10176941|dbj|BAB10090.1|
  misc_feature (174)..(751): Homolog of NCBI NO: 15239790 NR Description: putative protein; protein id: At5g49080.1 thaliana] >gi|10176941|dbj|BAB10090.1|
  misc_feature (142)..(726): Homolog of NCBI NO: 15239790 NR Description: putative protein; protein id: At5g49080.1 thaliana] >gi|10176941|dbj|BAB10090.1|
  misc_feature (349)..(926): Homolog of NCBI NO: 15239790 NR Description: putative protein; protein id: At5g49080.1 thaliana] >gi|10176941|dbj|BAB10090.1|
  misc_feature (374)..(962): Homolog of NCBI NO: 15239790 NR Description: putative protein; protein id: At5g49080.1 thaliana] >gi|10176941|dbj|BAB10090.1|
  misc_feature (199)..(776): Homolog of NCBI NO: 15239790 NR Description: putative protein; protein id: At5g49080.1 thaliana] >gi|10176941|dbj|BAB10090.1|
  misc_feature (324)..(901): Homolog of NCBI NO: 15239790 NR Description: putative protein; protein id: At5g49080.1 thaliana] >gi|10176941|dbj|BAB10090.1|
  misc_feature (224)..(801): Homolog of NCBI NO: 15239790 NR Description: putative protein; protein id: At5g49080.1 thaliana] >gi|10176941|dbj|BAB10090.1|
  misc_feature (249)..(826): Homolog of NCBI NO: 15239790 NR Description: putative protein; protein id: At5g49080.1 thaliana] >gi|10176941|dbj|BAB10090.1|
MVAAYEPYTDSSPPPYSVPLPKVEYKSPPLPDVYSSPPPPLEYSPAPKVDYKSPPPPYYSPSPKVEYKSPPPPYVYNSPPPPYYSPSPKVDYKSPPPPYVYSSPPPPIYSPSPKVDYKSPPPPYVYSSPPPPYYSPSPKVEYKSPPSPYVYNSPPPSYYSPSPKVDYKSPPPPYVYSSPPPPYYSPSPKVVYKSPPPPYVYSSPPPPYYSPSPKVDYKSPPPPYVYSSPPPPYYSPSPKIVYKSPPPPYVYSSPPPPYYSPSPKVDYKSPPPPYVYSSPPPPYYSPSPKVVYKSPPPPYVYSSPPPPYYSPTPKVDYKSPPPPYVYSSPPPPYYSPSPKVDYKSPPPPYVYSSPPPPYYSPSPKIVYKSPPPPYVYSSPPPPYYTPSPKVVYKSPPPPYVYSSPPPPYYSPSPKVDYKSPPPPYVYSSPPPPYYSPSPKVVYKSPPPPYVYSSPPPPYYSPSPKVDYKSPPPPYVYSSPPPPYYSPSPKVLYKSPPPPYVYSSPPPPYYSPSPKVVYKSPPPPYVYSSPPPPYYSPSPKVVYKSPPPPYVYSSPPPPYYSPSPKVVYKSPPPPYVYSSPPPPYYSPSPKVYYKSPPSPYHAPSPKVLYKSPPHPHVCVCPPPPPCYSPSPKVHYKSPPPPYVYSSPPPPYYSPSPKVHYKSPPPPYVYSSPPPPYYSPSPKVVYKSPPPPYVYSSPPPPYYSPSPKVVYKSPPPPYVYSSPPPPYYSPSPKVVYKSPPPPYVYSSPPPPYYSPSPKVVYKSPPPPYVYSSPPPPYYSPSPKVVYKSPPPPYVYSSPPPPYYSPSPKVVYKSPPPPYVYSSPPPPYYSPSPKVDYKSPPPPYVYSSPPPPYYSPSPKVDYKSPPPPYVYSSPPPPYYSPSPKVDYKSPPPPYVYSSPPPPYYSPAPKVDYKSPPPPYVYSSPPPPYYSPSPKVDYKSPPPPYYSPSPKVDYKSPPPPYVYSSPPPPSYSPSPKTEY

SEQ ID NO: 89240 - DNA, 1434 bp, Arabidopsis thaliana
  misc_feature (1)..(1434): Ceres Seq. ID no. 12716650
  misc_feature: MA Experiment ID: 20000347 Result: Up-regulated in Transcription
  misc_feature: MA Experiment 20000347 PARAMETER Experiment Name: At_2mM_SA_Sub_P Parameter: Age (day) Value: 14
  misc_feature: MA Experiment 20000347 PARAMETER Experiment Name: At_2mM_SA_Sub_P Parameter: Organism Value: A. thaliana
  misc_feature: MA Experiment 20000347 PARAMETER Experiment Name: At_2mM_SA_Sub_P Parameter: Plant Line Value: WS
  misc_feature: MA Experiment 20000347 PARAMETER Experiment Name: At_2mM_SA_Sub_P Parameter: Timepoint (hr) Value: 6
  misc_feature: MA Experiment 20000347 PARAMETER Experiment Name: At_2mM_SA_Sub_P Parameter: Tissue Value: Aerial
  misc_feature: MA Experiment 20000347 PARAMETER Experiment Name: At_2mM_SA_Sub_P Parameter: Treatment Value: 2mM SA vs. No Treatment
  misc_feature: MA Experiment ID: 20000440 Result: Up-regulated in Transcription
  misc_feature: MA Experiment 20000440 PARAMETER Experiment Name: At_Closed-Flower__Sub_P Parameter: Tissue Value: Closed Flower vs. Whole Plant
atgatgatgggaaatacatttggttcaagtttggcgagtttattcttcttgtgggcaactattcaacaaatcttcccaaaccatctcagaatcgccattaaagagtttcttatctccacaatacaacaactctcatttgtccagagattttccgacagattcatcaacttcttttcgccttatgtcgaaatcagcttctctcaatacgaagattatcaattcaatcacgcatttgcagccattgagacttaccttggggcaaaagcaactgataaagccaagcatctaagagcaagccaagttaaagagagtaaaggtttggtcttgaaacgagacgagactaaagtccgagatgagtatgaaggaggtactgtctggtgggagatggaaaccgactccacaggatatagaacattcaaactcactttccatagacgctcgcgagatattgtaaccgactcttacataaaatatgtttttgaagaaggcaaatcgattcaagccaagagcaagcagatgaagttgttcacaaataatccgagttctcactggggcactagcaagaagagtttttggagatatattgattttgagcatcccgcaagttttcacacgctagctatggatacaaagaagaaagaggagatcttgaatgatcttgctgcgtttagcaatggtaaagagtattacaagaaaataggtaaagcttggaagaggggttacttgctacatggaccaccagggaccggtaaatcaacaatgatcgctgcaatggcgaatcatttaaactatagtatctatgatcttgaactcacggctatacgtaacaactcggagttgaggaagctactcactgctacttctagcaagtcgatcatcgtgattgaagatatagattgttctttggatcttacgggaaagagaaagaaagagaaaaacttgatgacctcgagagaagatggagaacaaggtaccgaagaagacaagagttttgtaacactctcggggcttttgaacttcattgatggcatttggtctgcttgtggacaagagaggattattatcttcactacgaatcactttgagaaacttgacccggctttgatcaggagagggagaatggacatgcatattgagttgtcatactgttctttcgaggcgtttaagattctcgccaagaactatcttgatcttgatactcatcctctattcaagaagatcgaatcattattgaaggaaacgaagatcgcaccagctgatgttgctgagaacttgatgaagaagaatactgaaatagatgctgatggatctcttaaagatctaattcaagctctggaggggaagaagaagattcatggagctcaagtagatgaaccgaaggacaaatataccaagaagttttataaagcattttgcatgtcatctaaagcctga

SEQ ID NO: 89241 - protein, 477 aa, Arabidopsis thaliana
  peptide (1)..(477): Ceres Seq. ID no. 12716651
  misc_feature (240)..(435): Pfam Name: ATPase family associated with various cellular Pfam Description: ATPase family associated with various cellular
  misc_feature (3)..(477): Homolog of NCBI NO: 15233039 NR Description: unknown protein; protein id: At3g28600.1
  misc_feature (2)..(471): Homolog of NCBI NO: 9294274 NR Description: mitochondrial protein-like [Arabidopsis thaliana]
  misc_feature (3)..(471): Homolog of NCBI NO: 15233040 NR Description: unknown protein; protein id: At3g28610.1
  misc_feature (1)..(463): Homolog of NCBI NO: 10176992 NR Description: contains similarity to AAA-type
  misc_feature (1)..(463): Homolog of NCBI NO: 15242534 NR Description: putative protein; protein id: At5g40000.1
  misc_feature (8)..(458): Homolog of NCBI NO: 9294271 NR Description: mitochondrial protein-like [Arabidopsis thaliana]
  misc_feature (8)..(458): Homolog of NCBI NO: 15233036 NR Description: unknown protein; protein id: At3g28570.1
  misc_feature (8)..(470): Homolog of NCBI NO: 15233010 NR Description: hypothetical protein; protein id: At3g28510.1, by cDNA: gi_20466451 [Arabidopsis thaliana]
  misc_feature (5)..(462): Homolog of NCBI NO: 15242536 NR Description: putative protein; protein id: At5g40010.1
  misc_feature (2)..(466): Homolog of NCBI NO: 15233037 NR Description: hypothetical protein; protein id: At3g28580.1, by cDNA: gi_18175626 [Arabidopsis thaliana]
MMMGNTFGSSLASLFFLWATIQQIFPNHLRIAIKEFLISTIQQLSFVQRFSDRFINFFSPYVEISFSQYEDYQFNHAFAAIETYLGAKATDKAKHLRASQVKESKGLVLKRDETKVRDEYEGGTVWWEMETDSTGYRTFKLTFHRRSRDIVTDSYIKYVFEEGKSIQAKSKQMKLFTNNPSSHWGTSKKSFWRYIDFEHPASFHTLAMDTKKKEEILNDLAAFSNGKEYYKKIGKAWKRGYLLHGPPGTGKSTMIAAMANHLNYSIYDLELTAIRNNSELRKLLTATSSKSIIVIEDIDCSLDLTGKRKKEKNLMTSREDGEQGTEEDKSFVTLSGLLNFIDGIWSACGQERIIIFTTNHFEKLDPALIRRGRMDMHIELSYCSFEAFKILAKNYLDLDTHPLFKKIESLLKETKIAPADVAENLMKKNTEIDADGSLKDLIQALEGKKKIHGAQVDEPKDKYTKKFYKAFCMSSKA

SEQ ID NO: 89242 - protein, 476 aa, Arabidopsis thaliana
  peptide (1)..(476): Ceres Seq. ID no. 12716652
  misc_feature (239)..(434): Pfam Name: ATPase family associated with various cellular Pfam Description: ATPase family associated with various cellular
  misc_feature (2)..(476): Homolog of NCBI NO: 15233039 NR Description: unknown protein; protein id: At3g28600.1
  misc_feature (1)..(470): Homolog of NCBI NO: 9294274 NR Description: mitochondrial protein-like [Arabidopsis thaliana]
  misc_feature (2)..(470): Homolog of NCBI NO: 15233040 NR Description: unknown protein; protein id: At3g28610.1
  misc_feature (1)..(462): Homolog of NCBI NO: 10176992 NR Description: contains similarity to AAA-type
  misc_feature (1)..(462): Homolog of NCBI NO: 15242534 NR Description: putative protein; protein id: At5g40000.1
  misc_feature (7)..(457): Homolog of NCBI NO: 9294271 NR Description: mitochondrial protein-like [Arabidopsis thaliana]
  misc_feature (7)..(457): Homolog of NCBI NO: 15233036 NR Description: unknown protein; protein id: At3g28570.1
  misc_feature (7)..(469): Homolog of NCBI NO: 15233010 NR Description: hypothetical protein; protein id: At3g28510.1, by cDNA: gi_20466451 [Arabidopsis thaliana]
  misc_feature (4)..(461): Homolog of NCBI NO: 15242536 NR Description: putative protein; protein id: At5g40010.1
  misc_feature (1)..(465): Homolog of NCBI NO: 15233037 NR Description: hypothetical protein; protein id: At3g28580.1, by cDNA: gi_18175626 [Arabidopsis thaliana]
MMGNTFGSSLASLFFLWATIQQIFPNHLRIAIKEFLISTIQQLSFVQRFSDRFINFFSPYVEISFSQYEDYQFNHAFAAIETYLGAKATDKAKHLRASQVKESKGLVLKRDETKVRDEYEGGTVWWEMETDSTGYRTFKLTFHRRSRDIVTDSYIKYVFEEGKSIQAKSKQMKLFTNNPSSHWGTSKKSFWRYIDFEHPASFHTLAMDTKKKEEILNDLAAFSNGKEYYKKIGKAWKRGYLLHGPPGTGKSTMIAAMANHLNYSIYDLELTAIRNNSELRKLLTATSSKSIIVIEDIDCSLDLTGKRKKEKNLMTSREDGEQGTEEDKSFVTLSGLLNFIDGIWSACGQERIIIFTTNHFEKLDPALIRRGRMDMHIELSYCSFEAFKILAKNYLDLDTHPLFKKIESLLKETKIAPADVAENLMKKNTEIDADGSLKDLIQALEGKKKIHGAQVDEPKDKYTKKFYKAFCMSSKA

SEQ ID NO: 89243 - protein, 475 aa, Arabidopsis thaliana; identical to SEQ ID NO: 73765
  peptide (1)..(475): Ceres Seq. ID no. 12716653
  misc_feature (238)..(433): Pfam Name: ATPase family associated with various cellular Pfam Description: ATPase family associated with various cellular
  misc_feature (1)..(475): Homolog of NCBI NO: 15233039 NR Description: unknown protein; protein id: At3g28600.1
  misc_feature (1)..(469): Homolog of NCBI NO: 9294274 NR Description: mitochondrial protein-like [Arabidopsis thaliana]
  misc_feature (1)..(469): Homolog of NCBI NO: 15233040 NR Description: unknown protein; protein id: At3g28610.1
  misc_feature (1)..(461): Homolog of NCBI NO: 10176992 NR Description: contains similarity to AAA-type
  misc_feature (1)..(461): Homolog of NCBI NO: 15242534 NR Description: putative protein; protein id: At5g40000.1
  misc_feature (6)..(456): Homolog of NCBI NO: 9294271 NR Description: mitochondrial protein-like [Arabidopsis thaliana]
  misc_feature (6)..(456): Homolog of NCBI NO: 15233036 NR Description: unknown protein; protein id: At3g28570.1
  misc_feature (6)..(468): Homolog of NCBI NO: 15233010 NR Description: hypothetical protein; protein id: At3g28510.1, by cDNA: gi_20466451 [Arabidopsis thaliana]
  misc_feature (3)..(460): Homolog of NCBI NO: 15242536 NR Description: putative protein; protein id: At5g40010.1
  misc_feature (1)..(464): Homolog of NCBI NO: 15233037 NR Description: hypothetical protein; protein id: At3g28580.1, by cDNA: gi_18175626 [Arabidopsis thaliana]

SEQ ID NO: 89244 - DNA, 921 bp, Arabidopsis thaliana
  misc_feature (1)..(921): Ceres Seq. ID no. 12716713
  misc_feature: MA Experiment ID: 20000327 Result: Down-regulated in Transcription
  misc_feature: MA Experiment 20000327 PARAMETER Experiment Name: At_42deg_Heat_Sub_P Parameter: Age (day) Value: 14
  misc_feature: MA Experiment 20000327 PARAMETER Experiment Name: At_42deg_Heat_Sub_P Parameter: Organism Value: A. thaliana
  misc_feature: MA Experiment 20000327 PARAMETER Experiment Name: At_42deg_Heat_Sub_P Parameter: Plant Line Value: WS
  misc_feature: MA Experiment 20000327 PARAMETER Experiment Name: At_42deg_Heat_Sub_P Parameter: Temperature (deg C) Value: 42 vs. 22
  misc_feature: MA Experiment 20000327 PARAMETER Experiment Name: At_42deg_Heat_Sub_P Parameter: Timepoint (hr) Value: 1
  misc_feature: MA Experiment 20000327 PARAMETER Experiment Name: At_42deg_Heat_Sub_P Parameter: Tissue Value: Aerial
  misc_feature: MA Experiment ID: 20000328 Result: Down-regulated in Transcription
  misc_feature: MA Experiment 20000328 PARAMETER Experiment Name: At_42deg_Heat_Sub_P Parameter: Age (day) Value: 14
  misc_feature: MA Experiment 20000328 PARAMETER Experiment Name: At_42deg_Heat_Sub_P Parameter: Organism Value: A. thaliana
  misc_feature: MA Experiment 20000328 PARAMETER Experiment Name: At_42deg_Heat_Sub_P Parameter: Plant Line Value: WS
  misc_feature: MA Experiment 20000328 PARAMETER Experiment Name: At_42deg_Heat_Sub_P Parameter: Temperature (deg C) Value: 42 vs. 22
  misc_feature: MA Experiment 20000328 PARAMETER Experiment Name: At_42deg_Heat_Sub_P Parameter: Timepoint (hr) Value: 6
  misc_feature: MA Experiment 20000328 PARAMETER Experiment Name: At_42deg_Heat_Sub_P Parameter: Tissue Value: Aerial
atggatatgactccaaaatcaccagaacccgaatccgaaactccgacccggatccaaccagctaaaccaatctctttcagtaacggaatcatcaaacgccaccaccaccaccaccacaacaacaacaaagtcacttacaaagaatgtctcaagaaccacgcggcggcgattggtggtcacgcgcttgacggttgcggcgaatttatgccgtctccttcgtcaacaccttccgatccaacttctctcaagtgtgcagcttgtggttgtcaccgtaacttccaccgccgtgaaactgacgattcctccgccgttccaccaccgtctcttcttccatcttcaacaacaaccgccgcaattgagtatcagcctcatcaccgtcatcatcctcctcctccgctagctcctccgttaccacgtagtcctaattcatcttctccgccgcctatctcttcctcctacatgcttttagctctctccggtaataataaaaccgcaccgttctcagatctaaacttcgccgccgcggctaaccatctctccgccacgcctggctcgaggaagcgattcaggacgaagtttagctcaaatcagaaagagaagatgcatgaattcgccgatcgaatcggttggaagattcagaaacgtgacgaagacgaagttcgtgatttttgccgtgagatcggagttgataaaggtgttctcaaagtttggatgcataataacaaaaactccttcaaattctccggcggaggagcaaccaccgtgcagagaaacgataacggtatcggcggcgagaacagtaacgatgatggagttcgcggtttagctaacgacggtgacggtggtggtgggagatttgagagtgatagtggaggagctgatggtggcggaaacgtaaacgcctcgtcgtcttcgtcgtga

SEQ ID NO: 89245 - protein, 306 aa, Arabidopsis thaliana; identical to SEQ ID NO: 49016
  peptide (1)..(306): Ceres Seq. ID no. 12716714
  misc_feature (41)..(102): Pfam Name: ZF-HD protein dimerisation region Pfam Description: ZF-HD protein dimerisation region
  misc_feature (1)..(306): Homolog of NCBI NO: 15228530 NR Description: unknown protein; protein id: At3g28920.1, by cDNA: gi_20260543 [Arabidopsis thaliana] contains similarity to unknown
  misc_feature (4)..(305): Homolog of NCBI NO: 18421904 NR Description: putative protein; protein id: At5g39760.1, by cDNA: 249321., supported by cDNA: gi_20259469 [Arabidopsis >gi|10177976|dbj|BAB11382.1| gene_id:MKM21.8~pir||T00609~similar
  misc_feature (4)..(305): Homolog of NCBI NO: 21592512 NR Description: unknown [Arabidopsis thaliana]
  misc_feature (4)..(306): Homolog of NCBI NO: 13277220 NR Description: ZF-HD homeobox protein [Flaveria bidentis]
  misc_feature (68)..(306): Homolog of NCBI NO: 13277222 NR Description: ZF-HD homeobox protein [Flaveria bidentis]
  misc_feature (7)..(172): Homolog of NCBI NO: 15242243 NR Description: putative protein; protein id: At5g15210.1
  misc_feature (44)..(244): Homolog of NCBI NO: 15222382 NR Description: hypothetical protein; protein id: At1g69600.1
  misc_feature (43)..(256): Homolog of NCBI NO: 5091602 NR Description: 10A19I.6 [Oryza sativa]
  misc_feature (7)..(260): Homolog of NCBI NO: 15223757 NR Description: hypothetical protein; protein id: At1g14440.1, by cDNA: gi_18377625, supported by cDNA: gi_20465766 [Arabidopsis
  misc_feature (10)..(244): Homolog of NCBI NO: 15226993 NR Description: hypothetical protein; protein id: At2g02540.1, by cDNA: gi_20148767 [Arabidopsis thaliana]

SEQ ID NO: 89246 - protein, 304 aa, Arabidopsis thaliana; identical to SEQ ID NO: 49017
  peptide (1)..(304): Ceres Seq. ID no. 12716715
  misc_feature (39)..(100): Pfam Name: ZF-HD protein dimerisation region Pfam Description: ZF-HD protein dimerisation region
  misc_feature (1)..(304): Homolog of NCBI NO: 15228530 NR Description: unknown protein; protein id: At3g28920.1, by cDNA: gi_20260543 [Arabidopsis thaliana] contains similarity to unknown
  misc_feature (2)..(303): Homolog of NCBI NO: 18421904 NR Description: putative protein; protein id: At5g39760.1, by cDNA: 249321., supported by cDNA: gi_20259469 [Arabidopsis >gi|10177976|dbj|BAB11382.1| gene_id:MKM21.8~pir||T00609~similar
  misc_feature (2)..(303): Homolog of NCBI NO: 21592512 NR Description: unknown [Arabidopsis thaliana]
  misc_feature (2)..(304): Homolog of NCBI NO: 13277220 NR Description: ZF-HD homeobox protein [Flaveria bidentis]
  misc_feature (66)..(304): Homolog of NCBI NO: 13277222 NR Description: ZF-HD homeobox protein [Flaveria bidentis]
  misc_feature (5)..(170): Homolog of NCBI NO: 15242243 NR Description: putative protein; protein id: At5g15210.1
  misc_feature (42)..(242): Homolog of NCBI NO: 15222382 NR Description: hypothetical protein; protein id: At1g69600.1
  misc_feature (41)..(254): Homolog of NCBI NO: 5091602 NR Description: 10A19I.6 [Oryza sativa]
  misc_feature (5)..(258): Homolog of NCBI NO: 15223757 NR Description: hypothetical protein; protein id: At1g14440.1, by cDNA: gi_18377625, supported by cDNA: gi_20465766 [Arabidopsis
  misc_feature (8)..(242): Homolog of NCBI NO: 15226993 NR Description: hypothetical protein; protein id: At2g02540.1, by cDNA: gi_20148767 [Arabidopsis thaliana]

SEQ ID NO: 89247 - protein, 238 aa, Arabidopsis thaliana
  peptide (1)..(238): Ceres Seq. ID no. 12716716
  misc_feature (1)..(238): Homolog of NCBI NO: 15228530 NR Description: unknown protein; protein id: At3g28920.1, by cDNA: gi_20260543 [Arabidopsis thaliana] contains similarity to unknown
  misc_feature (1)..(237): Homolog of NCBI NO: 18421904 NR Description: putative protein; protein id: At5g39760.1, by cDNA: 249321., supported by cDNA: gi_20259469 [Arabidopsis >gi|10177976|dbj|BAB11382.1| gene_id:MKM21.8~pir||T00609~similar
  misc_feature (1)..(237): Homolog of NCBI NO: 21592512 NR Description: unknown [Arabidopsis thaliana]
  misc_feature (1)..(238): Homolog of NCBI NO: 13277220 NR Description: ZF-HD homeobox protein [Flaveria bidentis]
  misc_feature (1)..(238): Homolog of NCBI NO: 13277222 NR Description: ZF-HD homeobox protein [Flaveria bidentis]
  misc_feature (1)..(104): Homolog of NCBI NO: 15242243 NR Description: putative protein; protein id: At5g15210.1
  misc_feature (1)..(176): Homolog of NCBI NO: 15222382 NR Description: hypothetical protein; protein id: At1g69600.1
  misc_feature (1)..(188): Homolog of NCBI NO: 5091602 NR Description: 10A19I.6 [Oryza sativa]
  misc_feature (1)..(192): Homolog of NCBI NO: 15223757 NR Description: hypothetical protein; protein id: At1g14440.1, by cDNA: gi_18377625, supported by cDNA: gi_20465766 [Arabidopsis
  misc_feature (1)..(176): Homolog of NCBI NO: 15226993 NR Description: hypothetical protein; protein id: At2g02540.1, by cDNA: gi_20148767 [Arabidopsis thaliana]
MPSPSSTPSDPTSLKCAACGCHRNFHRRETDDSSAVPPPSLLPSSTTTAAIEYQPHHRHHPPPPLAPPLPRSPNSSSPPPISSSYMLLALSGNNKTAPFSDLNFAAAANHLSATPGSRKRFRTKFSSNQKEKMHEFADRIGWKIQKRDEDEVRDFCREIGVDKGVLKVWMHNNKNSFKFSGGGATTVQRNDNGIGGENSNDDGVRGLANDGDGGGGRFESDSGGADGGGNVNASSSSS

SEQ ID NO: 89248 - DNA, 924 bp, Arabidopsis thaliana
  misc_feature (1)..(924): Ceres Seq. ID no. 12716736
  misc_feature: MA Experiment ID: 20000185 Result: Down-regulated in Transcription
  misc_feature: MA Experiment 20000185 PARAMETER Experiment Name: At_Roots__P Parameter: Age (day) Value: 7 vs. 21
  misc_feature: MA Experiment 20000185 PARAMETER Experiment Name: At_Roots__P Parameter: Organism Value: A. thaliana
  misc_feature: MA Experiment 20000185 PARAMETER Experiment Name: At_Roots__P Parameter: Tissue Value: Roots vs. Whole Plant
  misc_feature: MA Experiment ID: 20000234 Result: Down-regulated in Transcription
  misc_feature: MA Experiment 20000234 PARAMETER Experiment Name: At_Siliques_P Parameter: Age (day) Value: 21
  misc_feature: MA Experiment 20000234 PARAMETER Experiment Name: At_Siliques_P Parameter: Organism Value: A. thaliana
  misc_feature: MA Experiment 20000234 PARAMETER Experiment Name: At_Siliques_P Parameter: Plant Line Value: WS
  misc_feature: MA Experiment 20000234 PARAMETER Experiment Name: At_Siliques_P Parameter: Tissue Value: Less Than 5mm Siliques vs. Whole Plant
  misc_feature: MA Experiment ID: 20000235 Result: Down-regulated in Transcription
  misc_feature: MA Experiment 20000235 PARAMETER Experiment Name: At_Siliques_P Parameter: Age (day) Value: 21
  misc_feature: MA Experiment 20000235 PARAMETER Experiment Name: At_Siliques_P Parameter: Organism Value: A. thaliana
  misc_feature: MA Experiment 20000235 PARAMETER Experiment Name: At_Siliques_P Parameter: Plant Line Value: WS
  misc_feature: MA Experiment 20000235 PARAMETER Experiment Name: At_Siliques_P Parameter: Tissue Value: 5-10mm Siliques vs. Whole Plant
  misc_feature: MA Experiment ID: 20000264 Result: Down-regulated in Transcription
  misc_feature: MA Experiment 20000264 PARAMETER Experiment Name: At_Open_Flower_P Parameter: Age (day) Value: 21
  misc_feature: MA Experiment 20000264 PARAMETER Experiment Name: At_Open_Flower_P Parameter: Plant Line Value: WS
  misc_feature: MA Experiment 20000264 PARAMETER Experiment Name: At_Open_Flower_P Parameter: Tissue Value: Open Flower vs. Whole Plant
  misc_feature: MA Experiment ID: 20001560 Result: Down-regulated in Transcription
  misc_feature: MA Experiment 20001560 PARAMETER Experiment Name: At_Drought_Soil_Dry_P Parameter: Age (day) Value: 28
  misc_feature: MA Experiment 20001560 PARAMETER Experiment Name: At_Drought_Soil_Dry_P Parameter: Organism Value: A. thaliana
  misc_feature: MA Experiment 20001560 PARAMETER Experiment Name: At_Drought_Soil_Dry_P Parameter: Plant Line Value: WS
  misc_feature: MA Experiment 20001560 PARAMETER Experiment Name: At_Drought_Soil_Dry_P Parameter: Post Timepoint (hr) Value: None
  misc_feature: MA Experiment 20001560 PARAMETER Experiment Name: At_Drought_Soil_Dry_P Parameter: Post-Treatment Value: None
  misc_feature: MA Experiment 20001560 PARAMETER Experiment Name: At_Drought_Soil_Dry_P Parameter: Timepoint (day) Value: 14
  misc_feature: MA Experiment 20001560 PARAMETER Experiment Name: At_Drought_Soil_Dry_P Parameter: Treatment Value: Drought vs. No Drought
atggattcttcgccagtttctgctcgattcgatatattcgagatttatcgtagattctgtgctattcgatcaggacaacaattgtgtaataagaaaccctgtgatggcgaagaatctcaaagatttaacttgtctaaagaagcaataactcagctcttatatctagtagagaataagtttcaagctaggaactcgatttttgatgaattgtttaagttgatgtcacggctagacttaatggcaagttgttttgtatctcggttctttagttttcgggtggactttacggagtttacttgcttttacgattttgttttctttatgtgccgcgagaatgggcaaaagaatataactataagtagagctattactgcatggaaacttgttttggctgggagatttaggttacttaaccgctggtgtgactttatcgagaaaaatcaacggcacaatatttcagaagatacttggcaacaagtcttggcgtttagtcgttgtgtacatgagaatctagaaggatatgactctgaaggtgcatggcctgtcctaatagatgactttgtcgagcatatgtacagtattttaggaccgaataaggacactagcttgttctgcaaatgtggtgacacagaatctgaatcatgcctctatcaagaagatgagcatcacaaagattatcgccgcccacacacgggtttaagaaacattccaggtttaaagagaaaaacatcgaagaagaatgacgaagaagaagaagatgaagatgaagaagtgttagaaacccaaaactcttcttctttgctaaacttcaaacgaatcaaaaccagcaacagtccaaggtgttcatcaaagtccccttgttcaatcgagcgaagtctttcacaaggttttgcgagtcttttatcgactggagataaaccatga

SEQ ID NO: 89249 - protein, 307 aa, Arabidopsis thaliana
  peptide (1)..(307): Ceres Seq. ID no. 12716737
  misc_feature (157)..(277): Pfam Name: Domain of unknown function (DUF298) Pfam Description: Domain of unknown function (DUF298)
  misc_feature (1)..(307): Homolog of NCBI NO: 15228555 NR Description: unknown protein; protein id: At3g28970.1 thaliana] >gi|7939547|dbj|BAA95750.1| gene_id:K5K13.10~unknown [Arabidopsis thaliana] >gi|26452857|dbj|BAC43507.1| unknown
  misc_feature (45)..(255): Homolog of NCBI NO: 33146550 NR Description: leucine zipper protein-like [Oryza sativa
  misc_feature (45)..(192): Homolog of NCBI NO: 34913252 NR Description: P0011H09.36 [Oryza sativa (japonica
  misc_feature (94)..(189): Homolog of NCBI NO: 24664675 NR Description: CG7427-PA [Drosophila melanogaster]
  misc_feature (94)..(204): Homolog of NCBI NO: 7019967 NR Description: unnamed protein product [Homo sapiens]
  misc_feature (94)..(204): Homolog of NCBI NO: 34784818 NR Description: RP42 homolog [Homo sapiens]
  misc_feature (94)..(192): Homolog of NCBI NO: 15292985 NR Description: unknown protein [Arabidopsis thaliana]
  misc_feature (94)..(192): Homolog of NCBI NO: 18399737 NR Description: expressed protein; protein id: At3g12760.1, by cDNA: gi_15292984 [Arabidopsis thaliana] gb|AAF04863.1~gene_id:MBK21.14~similar to unknown protein
  misc_feature (94)..(203): Homolog of NCBI NO: 34784120 NR Description: Unknown (protein for MGC:66414) [Danio rerio]
  misc_feature (98)..(203): Homolog of NCBI NO: 18700658 NR Description: leucine zipper protein [Homo sapiens]
MDSSPVSARFDIFEIYRRFCAIRSGQQLCNKKPCDGEESQRFNLSKEAITQLLYLVENKFQARNSIFDELFKLMSRLDLMASCFVSRFFSFRVDFTEFTCFYDFVFFMCRENGQKNITISRAITAWKLVLAGRFRLLNRWCDFIEKNQRHNISEDTWQQVLAFSRCVHENLEGYDSEGAWPVLIDDFVEHMYSILGPNKDTSLFCKCGDTESESCLYQEDEHHKDYRRPHTGLRNIPGLKRKTSKKNDEEEEDEDEEVLETQNSSSLLNFKRIKTSNSPRCSSKSPCSIERSLSQGFASLLSTGDKP

SEQ ID NO: 89250 - protein, 234 aa, Arabidopsis thaliana
  peptide (1)..(234): Ceres Seq. ID no. 12716738
  misc_feature (84)..(204): Pfam Name: Domain of unknown function (DUF298) Pfam Description: Domain of unknown function (DUF298)
  misc_feature (1)..(234): Homolog of NCBI NO: 15228555 NR Description: unknown protein; protein id: At3g28970.1 thaliana] >gi|7939547|dbj|BAA95750.1| gene_id:K5K13.10~unknown [Arabidopsis thaliana] >gi|26452857|dbj|BAC43507.1| unknown
  misc_feature (1)..(182): Homolog of NCBI NO: 33146550 NR Description: leucine zipper protein-like [Oryza sativa
  misc_feature (1)..(119): Homolog of NCBI NO: 34913252 NR Description: P0011H09.36 [Oryza sativa (japonica
  misc_feature (21)..(116): Homolog of NCBI NO: 24664675 NR Description: CG7427-PA [Drosophila melanogaster]
  misc_feature (21)..(131): Homolog of NCBI NO: 7019967 NR Description: unnamed protein product [Homo sapiens]
  misc_feature (21)..(131): Homolog of NCBI NO: 34784818 NR Description: RP42 homolog [Homo sapiens]
  misc_feature (21)..(119): Homolog of NCBI NO: 15292985 NR Description: unknown protein [Arabidopsis thaliana]
  misc_feature (21)..(119): Homolog of NCBI NO: 18399737 NR Description: expressed protein; protein id: At3g12760.1, by cDNA: gi_15292984 [Arabidopsis thaliana] gb|AAF04863.1~gene_id:MBK21.14~similar to unknown protein
  misc_feature (21)..(130): Homolog of NCBI NO: 34784120 NR Description: Unknown (protein for MGC:66414) [Danio rerio]
  misc_feature (25)..(130): Homolog of NCBI NO: 18700658 NR Description: leucine zipper protein [Homo sapiens]
MSRLDLMASCFVSRFFSFRVDFTEFTCFYDFVFFMCRENGQKNITISRAITAWKLVLAGRFRLLNRWCDFIEKNQRHNISEDTWQQVLAFSRCVHENLEGYDSEGAWPVLIDDFVEHMYSILGPNKDTSLFCKCGDTESESCLYQEDEHHKDYRRPHTGLRNIPGLKRKTSKKNDEEEEDEDEEVLETQNSSSLLNFKRIKTSNSPRCSSKSPCSIERSLSQGFASLLSTGDKP

SEQ ID NO: 89251 - protein, 228 aa, Arabidopsis thaliana
  peptide (1)..(228): Ceres Seq. ID no. 12716739
  misc_feature (78)..(198): Pfam Name: Domain of unknown function (DUF298) Pfam Description: Domain of unknown function (DUF298)
  misc_feature (1)..(228): Homolog of NCBI NO: 15228555 NR Description: unknown protein; protein id: At3g28970.1 thaliana] >gi|7939547|dbj|BAA95750.1| gene_id:K5K13.10~unknown [Arabidopsis thaliana] >gi|26452857|dbj|BAC43507.1| unknown
  misc_feature (1)..(176): Homolog of NCBI NO: 33146550 NR Description: leucine zipper protein-like [Oryza sativa
  misc_feature (1)..(113): Homolog of NCBI NO: 34913252 NR Description: P0011H09.36 [Oryza sativa (japonica
  misc_feature (15)..(110): Homolog of NCBI NO: 24664675 NR Description: CG7427-PA [Drosophila melanogaster]
  misc_feature (15)..(125): Homolog of NCBI NO: 7019967 NR Description: unnamed protein product [Homo sapiens]
  misc_feature (15)..(125): Homolog of NCBI NO: 34784818 NR Description: RP42 homolog [Homo sapiens]
  misc_feature (15)..(113): Homolog of NCBI NO: 15292985 NR Description: unknown protein [Arabidopsis thaliana]
  misc_feature (15)..(113): Homolog of NCBI NO: 18399737 NR Description: expressed protein; protein id: At3g12760.1, by cDNA: gi_15292984 [Arabidopsis thaliana] gb|AAF04863.1~gene_id:MBK21.14~similar to unknown protein
  misc_feature (15)..(124): Homolog of NCBI NO: 34784120 NR Description: Unknown (protein for MGC:66414) [Danio rerio]
  misc_feature (19)..(124): Homolog of NCBI NO: 18700658 NR Description: leucine zipper protein [Homo sapiens]
MASCFVSRFFSFRVDFTEFTCFYDFVFFMCRENGQKNITISRAITAWKLVLAGRFRLLNRWCDFIEKNQRHNISEDTWQQVLAFSRCVHENLEGYDSEGAWPVLIDDFVEHMYSILGPNKDTSLFCKCGDTESESCLYQEDEHHKDYRRPHTGLRNIPGLKRKTSKKNDEEEEDEDEEVLETQNSSSLLNFKRIKTSNSPRCSSKSPCSIERSLSQGFASLLSTGDKP

SEQ ID NO: 89252 - DNA, 936 bp, Arabidopsis thaliana
  misc_feature (1)..(936): Ceres Seq. ID no. 12716751
  misc_feature: MA Experiment ID: 20000440 Result: Up-regulated in Transcription
  misc_feature: MA Experiment 20000440 PARAMETER Experiment Name: At_Closed-Flower__Sub_P Parameter: Tissue Value: Closed Flower vs. Whole Plant
atgtcttcattctgtttatcaaaacacctcattttagttcctatcttggtcatgatggcacaactgctccttatccgaaacgttttgtccttgaacatgaacaatccgtacttgtaccataaatgctcagccaatcaaggggagtacaagctaggaagcctctacaaaaaatccctcgattctggcatccaacaattgtcgaaagataatgaagtttttcgtggcggtttcgtctatatggaccacaccgatcctaatggaactcgttttaaagaatcagagaagagagaagatgaaagagatttctgtgtgaataatatcccaatacgttttgagcctgaagtaagggtctacatcacctttcaatgccgtggagacatttacgggtcccactgtcgctcttgctttgccactgcccgggctgagctttttaagagatgtccgagagataaggcggcaataatatggtacgatcaatgttttctcgagttttcttcgatcagtactggagggaagatcaattacgatgacaatatctgtattgataccgcaagggcaaggccgaatgcgaaaactcataccggtgatgattcagttttggagtttttgagactcttcgaaaatctgacaaatatagccgtcactaaaagaaataacttcgtaaaagatgtggagaaaccggcactatatgcggcaggagagaaaaggttcggaaataagaagatctatgtaatggttcagtgtacgcatgacttaactcctagggcttgtgtggagtgtgtgaatcataatgtccggcaatttcaagattgctatgaagataaaccagtaggtttgaaaaaaggtgctagagttttgggtaggagctgtaactttaggtttgagcgttacccttttgttaacgccaagaccagtcctaactatttgaagttctaa

SEQ ID NO: 89253 - protein, 311 aa, Arabidopsis thaliana
  peptide (1)..(311): Ceres Seq. ID no. 12716752
  misc_feature (242)..(301): Pfam Name: Domain of unknown function DUF26 Pfam Description: Domain of unknown function DUF26
  misc_feature (1)..(311): Homolog of NCBI NO: 11994709 NR Description: contains similarity to receptor protein
  misc_feature (162)..(311): Homolog of NCBI NO: 15228584 NR Description: hypothetical protein; protein id: At3g29050.1
  misc_feature (19)..(89): Homolog of NCBI NO: 15228584 NR Description: hypothetical protein; protein id: At3g29050.1
  misc_feature (113)..(310): Homolog of NCBI NO: 15233201 NR Description: hypothetical protein; protein id: At3g21910.1 thaliana] >gi|9279742|dbj|BAB01368.1| contains similarity to
  misc_feature (6)..(84): Homolog of NCBI NO: 15233201 NR Description: hypothetical protein; protein id: At3g21910.1 thaliana] >gi|9279742|dbj|BAB01368.1| contains similarity to
  misc_feature (112)..(311): Homolog of NCBI NO: 15233204 NR Description: pollen coat receptor kinase, putative; protein At3g21920.1 [Arabidopsis thaliana] >gi|9279743|dbj|BAB01369.1| similarity to receptor protein kinase~gene_id:MZN24.4
  misc_feature (2)..(77): Homolog of NCBI NO: 15233204 NR Description: pollen coat receptor kinase, putative; protein At3g21920.1 [Arabidopsis thaliana] >gi|9279743|dbj|BAB01369.1| similarity to receptor protein kinase~gene_id:MZN24.4
  misc_feature (112)..(311): Homolog of NCBI NO: 9279744 NR Description: contains similarity to receptor protein
  misc_feature (112)..(311): Homolog of NCBI NO: 15233207 NR Description: receptor kinase, putative; protein id:
  misc_feature (2)..(77): Homolog of NCBI NO: 9279744 NR Description: contains similarity to receptor protein
MSSFCLSKHLILVPILVMMAQLLLIRNVLSLNMNNPYLYHKCSANQGEYKLGSLYKKSLDSGIQQLSKDNEVFRGGFVYMDHTDPNGTRFKESEKREDERDFCVNNIPIRFEPEVRVYITFQCRGDIYGSHCRSCFATARAELFKRCPRDKAAIIWYDQCFLEFSSISTGGKINYDDNICIDTARARPNAKTHTGDDSVLEFLRLFENLTNIAVTKRNNFVKDVEKPALYAAGEKRFGNKKIYVMVQCTHDLTPRACVECVNHNVRQFQDCYEDKPVGLKKGARVLGRSCNFRFERYPFVNAKTSPNYLKF

SEQ ID NO: 89254 - protein, 294 aa, Arabidopsis thaliana
  peptide (1)..(294): Ceres Seq. ID no. 12716753
  misc_feature (225)..(284): Pfam Name: Domain of unknown function DUF26 Pfam Description: Domain of unknown function DUF26
  misc_feature (1)..(294): Homolog of NCBI NO: 11994709 NR Description: contains similarity to receptor protein
  misc_feature (145)..(294): Homolog of NCBI NO: 15228584 NR Description: hypothetical protein; protein id: At3g29050.1
  misc_feature (2)..(72): Homolog of NCBI NO: 15228584 NR Description: hypothetical protein; protein id: At3g29050.1
  misc_feature (96)..(293): Homolog of NCBI NO: 15233201 NR Description: hypothetical protein; protein id: At3g21910.1 thaliana] >gi|9279742|dbj|BAB01368.1| contains similarity to
  misc_feature (1)..(67): Homolog of NCBI NO: 15233201 NR Description: hypothetical protein; protein id: At3g21910.1 thaliana] >gi|9279742|dbj|BAB01368.1| contains similarity to
  misc_feature (95)..(294): Homolog of NCBI NO: 15233204 NR Description: pollen coat receptor kinase, putative; protein At3g21920.1 [Arabidopsis thaliana] >gi|9279743|dbj|BAB01369.1| similarity to receptor protein kinase~gene_id:MZN24.4
  misc_feature (1)..(60): Homolog of NCBI NO: 15233204 NR Description: pollen coat receptor kinase, putative; protein At3g21920.1 [Arabidopsis thaliana] >gi|9279743|dbj|BAB01369.1| similarity to receptor protein kinase~gene_id:MZN24.4
  misc_feature (95)..(294): Homolog of NCBI NO: 9279744 NR Description: contains similarity to receptor protein
  misc_feature (95)..(294): Homolog of NCBI NO: 15233207 NR Description: receptor kinase, putative; protein id:
  misc_feature (1)..(60): Homolog of NCBI NO: 9279744 NR Description: contains similarity to receptor protein
MMAQLLLIRNVLSLNMNNPYLYHKCSANQGEYKLGSLYKKSLDSGIQQLSKDNEVFRGGFVYMDHTDPNGTRFKESEKREDERDFCVNNIPIRFEPEVRVYITFQCRGDIYGSHCRSCFATARAELFKRCPRDKAAIIWYDQCFLEFSSISTGGKINYDDNICIDTARARPNAKTHTGDDSVLEFLRLFENLTNIAVTKRNNFVKDVEKPALYAAGEKRFGNKKIYVMVQCTHDLTPRACVECVNHNVRQFQDCYEDKPVGLKKGARVLGRSCNFRFERYPFVNAKTSPNYLKF

SEQ ID NO: 89255 - protein, 293 aa, Arabidopsis thaliana
  peptide (1)..(293): Ceres Seq. ID no. 12716754
  misc_feature (224)..(283): Pfam Name: Domain of unknown function DUF26 Pfam Description: Domain of unknown function DUF26
  misc_feature (1)..(293): Homolog of NCBI NO: 11994709 NR Description: contains similarity to receptor protein
  misc_feature (144)..(293): Homolog of NCBI NO: 15228584 NR Description: hypothetical protein; protein id: At3g29050.1
  misc_feature (1)..(71): Homolog of NCBI NO: 15228584 NR Description: hypothetical protein; protein id: At3g29050.1
  misc_feature (95)..(292): Homolog of NCBI NO: 15233201 NR Description: hypothetical protein; protein id: At3g21910.1 thaliana] >gi|9279742|dbj|BAB01368.1| contains similarity to
  misc_feature (1)..(66): Homolog of NCBI NO: 15233201 NR Description: hypothetical protein; protein id: At3g21910.1 thaliana] >gi|9279742|dbj|BAB01368.1| contains similarity to
  misc_feature (94)..(293): Homolog of NCBI NO: 15233204 NR Description: pollen coat receptor kinase, putative; protein At3g21920.1 [Arabidopsis thaliana] >gi|9279743|dbj|BAB01369.1| similarity to receptor protein kinase~gene_id:MZN24.4
  misc_feature (1)..(59): Homolog of NCBI NO: 15233204 NR Description: pollen coat receptor kinase, putative; protein At3g21920.1 [Arabidopsis thaliana] >gi|9279743|dbj|BAB01369.1| similarity to receptor protein kinase~gene_id:MZN24.4
  misc_feature (94)..(293): Homolog of NCBI NO: 9279744 NR Description: contains similarity to receptor protein
  misc_feature (94)..(293): Homolog of NCBI NO: 15233207 NR Description: receptor kinase, putative; protein id:
  misc_feature (1)..(59): Homolog of NCBI NO: 9279744 NR Description: contains similarity to receptor protein
MAQLLLIRNVLSLNMNNPYLYHKCSANQGEYKLGSLYKKSLDSGIQQLSKDNEVFRGGFVYMDHTDPNGTRFKESEKREDERDFCVNNIPIRFEPEVRVYITFQCRGDIYGSHCRSCFATARAELFKRCPRDKAAIIWYDQCFLEFSSISTGGKINYDDNICIDTARARPNAKTHTGDDSVLEFLRLFENLTNIAVTKRNNFVKDVEKPALYAAGEKRFGNKKIYVMVQCTHDLTPRACVECVNHNVRQFQDCYEDKPVGLKKGARVLGRSCNFRFERYPFVNAKTSPNYLKF

SEQ ID NO: 89256 - DNA, 504 bp, Arabidopsis thaliana
  misc_feature (1)..(504): Ceres Seq. ID no. 12716784
  misc_feature: MA Experiment ID: 20000328 Result: Down-regulated in Transcription
  misc_feature: MA Experiment 20000328 PARAMETER Experiment Name: At_42deg_Heat_Sub_P Parameter: Age (day) Value: 14
  misc_feature: MA Experiment 20000328 PARAMETER Experiment Name: At_42deg_Heat_Sub_P Parameter: Organism Value: A. thaliana
  misc_feature: MA Experiment 20000328 PARAMETER Experiment Name: At_42deg_Heat_Sub_P Parameter: Plant Line Value: WS
  misc_feature: MA Experiment 20000328 PARAMETER Experiment Name: At_42deg_Heat_Sub_P Parameter: Temperature (deg C) Value: 42 vs. 22
  misc_feature: MA Experiment 20000328 PARAMETER Experiment Name: At_42deg_Heat_Sub_P Parameter: Timepoint (hr) Value: 6
  misc_feature: MA Experiment 20000328 PARAMETER Experiment Name: At_42deg_Heat_Sub_P Parameter: Tissue Value: Aerial
  misc_feature: MA Experiment ID: 20000355 Result: Up-regulated in Transcription
  misc_feature: MA Experiment 20000355 PARAMETER Experiment Name: At_Siliques_Sub_P Parameter: Age (day) Value: 21
  misc_feature: MA Experiment 20000355 PARAMETER Experiment Name: At_Siliques_Sub_P Parameter: Organism Value: A. thaliana
  misc_feature: MA Experiment 20000355 PARAMETER Experiment Name: At_Siliques_Sub_P Parameter: Plant Line Value: WS
  misc_feature: MA Experiment 20000355 PARAMETER Experiment Name: At_Siliques_Sub_P Parameter: Tissue Value: Less Than 5mm Siliques vs. Whole Plant
  misc_feature: MA Experiment ID: 20000440 Result: Up-regulated in Transcription
  misc_feature: MA Experiment 20000440 PARAMETER Experiment Name: At_Closed-Flower__Sub_P Parameter: Tissue Value: Closed Flower vs. Whole Plant
atggacctcgaggcaagaaaccttccacccaatgttaaatccagtctccttgtcaaattaagggaatacaaatctgatcttaacaatttcaagacggaagtgaagagaatcacatctggaaacttaaacgctactgctcgagatgagttactagaagctggtatggctgacacattgacggcttcagctgatcaaagatcaagattgatgatgtcaacagaccatttaggccgaaccacagacagaatcaaggacagtaggagaacgatactggagacagaagagcttggtgtttcaatccttcaggatttgcacgggcagagacagtctctcttacgggcccatgaaacgcttcatggagtcgatgataacgtcggaaagagcaagaaaatattgacaacaatgactaggagaatgaatagaaacaaatggaccatcggtgcgataatcacagtccttgtcctcgccattatctttatcttgtacttcaaactcaccaggtga

SEQ ID NO: 89257 - protein, 167 aa, Arabidopsis thaliana
  peptide (1)..(167): Ceres Seq. ID no. 12716785
  misc_feature (1)..(142): Pfam Name: Vesicle transport v-SNARE protein Pfam Description: Vesicle transport v-SNARE protein
  misc_feature (1)..(167): Homolog of NCBI NO: 15228600 NR Description: SNARE protein AtVTI13; protein id: At3g29100.1
  misc_feature (1)..(167): Homolog of NCBI NO: 26451552 NR Description: putative vesicle transport protein [Arabidopsis
  misc_feature (1)..(167): Homolog of NCBI NO: 6690274 NR Description: v-SNARE AtVTI1a [Arabidopsis thaliana]
  misc_feature (1)..(167): Homolog of NCBI NO: 15241780 NR Description: v-SNARE AtVTI1a (ZIG); protein id: At5g39510.1, by cDNA: gi_17979269, supported by cDNA: gi_20147178, supported
  misc_feature (1)..(165): Homolog of NCBI NO: 34910406 NR Description: putative vesicle transport v-SNARE protein [Oryza
  misc_feature (1)..(164): Homolog of NCBI NO: 34914100 NR Description: similar to vesicle transport protein [Oryza
  misc_feature (1)..(166): Homolog of NCBI NO: 6690276 NR Description: v-SNARE AtVTI1b [Arabidopsis thaliana]
  misc_feature (1)..(166): Homolog of NCBI NO: 18396008 NR Description: v-SNARE protein AtVTI1b, putative; protein id: supported by cDNA: gi_6690275 [Arabidopsis thaliana]
  misc_feature (1)..(166): Homolog of NCBI NO: 27805772 NR Description: Vesicle transport v-SNARE 12 (AtVTI12) (Vesicle v- SNARE protein VTI1b) (Vesicle soluble NSF attachment protein
  misc_feature (1)..(167): Homolog of NCBI NO: 15241823 NR Description: SNARE protein AtMEMB11; protein id: At5g39630.1
MDLEARNLPPNVKSSLLVKLREYKSDLNNFKTEVKRITSGNLNATARDELLEAGMADTLTASADQRSRLMMSTDHLGRTTDRIKDSRRTILETEELGVSILQDLHGQRQSLLRAHETLHGVDDNVGKSKKILTTMTRRMNRNKWTIGAIITVLVLAIIFILYFKLTR

SEQ ID NO: 89258 - protein, 113 aa, Arabidopsis thaliana
  peptide (1)..(113): Ceres Seq. ID no. 12716786
  misc_feature (1)..(88): Pfam Name: Vesicle transport v-SNARE protein Pfam Description: Vesicle transport v-SNARE protein
  misc_feature (1)..(113): Homolog of NCBI NO: 15228600 NR Description: SNARE protein AtVTI13; protein id: At3g29100.1
  misc_feature (1)..(113): Homolog of NCBI NO: 26451552 NR Description: putative vesicle transport protein [Arabidopsis
  misc_feature (1)..(113): Homolog of NCBI NO: 6690274 NR Description: v-SNARE AtVTI1a [Arabidopsis thaliana]
  misc_feature (1)..(113): Homolog of NCBI NO: 15241780 NR Description: v-SNARE AtVTI1a (ZIG); protein id: At5g39510.1, by cDNA: gi_17979269, supported by cDNA: gi_20147178, supported
  misc_feature (1)..(111): Homolog of NCBI NO: 34910406 NR Description: putative vesicle transport v-SNARE protein [Oryza
  misc_feature (1)..(110): Homolog of NCBI NO: 34914100 NR Description: similar to vesicle transport protein [Oryza
  misc_feature (1)..(112): Homolog of NCBI NO: 6690276 NR Description: v-SNARE AtVTI1b [Arabidopsis thaliana]
  misc_feature (1)..(112): Homolog of NCBI NO: 27805772 NR Description: Vesicle transport v-SNARE 12 (AtVTI12) (Vesicle v- SNARE protein VTI1b) (Vesicle soluble NSF attachment protein
  misc_feature (1)..(112): Homolog of NCBI NO: 18396008 NR Description: v-SNARE protein AtVTI1b, putative; protein id: supported by cDNA: gi_6690275 [Arabidopsis thaliana]
  misc_feature (1)..(113): Homolog of NCBI NO: 15241823 NR Description: SNARE protein AtMEMB11; protein id: At5g39630.1
MADTLTASADQRSRLMMSTDHLGRTTDRIKDSRRTILETEELGVSILQDLHGQRQSLLRAHETLHGVDDNVGKSKKILTTMTRRMNRNKWTIGAIITVLVLAIIFILYFKLTR

SEQ ID NO: 89259 - protein, 98 aa, Arabidopsis thaliana
  peptide (1)..(98): Ceres Seq. ID no. 12716787
  misc_feature (1)..(73): Pfam Name: Vesicle transport v-SNARE protein Pfam Description: Vesicle transport v-SNARE protein
  misc_feature (1)..(98): Homolog of NCBI NO: 15228600 NR Description: SNARE protein AtVTI13; protein id: At3g29100.1
  misc_feature (1)..(98): Homolog of NCBI NO: 26451552 NR Description: putative vesicle transport protein [Arabidopsis
  misc_feature (1)..(98): Homolog of NCBI NO: 6690274 NR Description: v-SNARE AtVTI1a [Arabidopsis thaliana]
  misc_feature (1)..(98): Homolog of NCBI NO: 15241780 NR Description: v-SNARE AtVTI1a (ZIG); protein id: At5g39510.1, by cDNA: gi_17979269, supported by cDNA: gi_20147178, supported
  misc_feature (1)..(96): Homolog of NCBI NO: 34910406 NR Description: putative vesicle transport v-SNARE protein [Oryza
  misc_feature (1)..(95): Homolog of NCBI NO: 34914100 NR Description: similar to vesicle transport protein [Oryza
  misc_feature (1)..(97): Homolog of NCBI NO: 6690276 NR Description: v-SNARE AtVTI1b [Arabidopsis thaliana]
  misc_feature (1)..(97): Homolog of NCBI NO: 27805772 NR Description: Vesicle transport v-SNARE 12 (AtVTI12) (Vesicle v- SNARE protein VTI1b) (Vesicle soluble NSF attachment protein
  misc_feature (1)..(97): Homolog of NCBI NO: 18396008 NR Description: v-SNARE protein AtVTI1b, putative; protein id: supported by cDNA: gi_6690275 [Arabidopsis thaliana]
  misc_feature (1)..(98): Homolog of NCBI NO: 15241823 NR Description: SNARE protein AtMEMB11; protein id: At5g39630.1
MMSTDHLGRTTDRIKDSRRTILETEELGVSILQDLHGQRQSLLRAHETLHGVDDNVGKSKKILTTMTRRMNRNKWTIGAIITVLVLAIIFILYFKLTR

SEQ ID NO: 89260 - DNA, 783 bp, Arabidopsis thaliana
  misc_feature (1)..(783): Ceres Seq. ID no. 12716831
  misc_feature: MA Experiment ID: 20000173 Result: Up-regulated in Transcription
  misc_feature: MA Experiment 20000173 PARAMETER Experiment Name: At_42deg_Heat_P Parameter: Age (day) Value: 14
  misc_feature: MA Experiment 20000173 PARAMETER Experiment Name: At_42deg_Heat_P Parameter: Organism Value: A. thaliana
  misc_feature: MA Experiment 20000173 PARAMETER Experiment Name: At_42deg_Heat_P Parameter: Plant Line Value: WS
  misc_feature: MA Experiment 20000173 PARAMETER Experiment Name: At_42deg_Heat_P Parameter: Temperature (deg C) Value: 42 vs. 22
  misc_feature: MA Experiment 20000173 PARAMETER Experiment Name: At_42deg_Heat_P Parameter: Timepoint (hr) Value: 6
  misc_feature: MA Experiment 20000173 PARAMETER Experiment Name: At_42deg_Heat_P Parameter: Tissue Value: Aerial
atgtcgggacaaagaagattggatggcaagatcgtaattataacaggcggggctagtgggatcggagctgaagcagcgaggttgttcacggaccatggagctaaagttgtcatcgttgacttacaagaggagcttggtcaaaacgtcgccgtttcgatcgggctagacaaagcaagtttttaccgttgcgatataacggatgagacggaagttgagaacgccgttaagttcaccgttgaaaaacacggaaagcttgacgttctgtttagtaacgccggggtcatggaaccgcatggaagcattcttgatttggatcttgaggcgtttgatcgaacgatggccgtcaacgttcgcggtgcggctgcgtttataaaacatgcagcgcgttcgatggtggctagtggaactcgtggctccattgtttgtacaacgagtgtgacggctgagattggtggtccgggacctcacagttacacagcgtcgaaacacgcgcttctcgggttggttcgatcagcgtgtggcgggttggggaagtacgggattagagtcaacggtgttgcaccgtatggagtagcaacggggttaactagctacaacgaggaaactgtgaagatggttgaggattactgttcagccacggcgattctcaaaggtgttgtacttaaagctcgacatgtggcagatgcagctttgtttttggcttctgatgattcggtttatattagtggtcaaaacttgggggttgacggcggttatagcgtcgttaagctgacatcgaattaa

SEQ ID NO: 89261 - protein, 260 aa, Arabidopsis thaliana
  peptide (1)..(260): Ceres Seq. ID no. 12716832
  misc_feature (1)..(260): Homolog of NCBI NO: 15228656 NR Description: short-chain alcohol dehydrogenase, putative;
  misc_feature (1)..(257): Homolog of NCBI NO: 9293918 NR Description: alcohol dehydrogenase-like protein [Arabidopsis
  misc_feature (1)..(256): Homolog of NCBI NO: 15226503 NR Description: (NM_130281) putative alcohol dehydrogenase; id: At2g47130.1 [Arabidopsis thaliana] >gi|7431088|pir||T02175
  misc_feature (14)..(257): Homolog of NCBI NO: 22331405 NR Description: short-chain alcohol dehydrogenase, putative;
  misc_feature (1)..(256): Homolog of NCBI NO: 15226500 NR Description: (NM_130280) putative alcohol dehydrogenase; id: At2g47120.1 [Arabidopsis thaliana] >gi|7431089|pir||T02176
  misc_feature (1)..(256): Homolog of NCBI NO: 18407273 NR Description: putative alcohol dehydrogenase; protein id: supported by cDNA: gi_13878112, supported by cDNA: gi_17104782 thaliana] >gi|13878113|gb|AAK44134.1|AF370319_1 putative alcohol
  misc_feature (6)..(256): Homolog of NCBI NO: 7431087 NR Description: probable alcohol dehydrogenase [imported] -
  misc_feature (95)..(260): Homolog of NCBI NO: 9293921 NR Description: contains similarity to alcohol
  misc_feature (1)..(256): Homolog of NCBI NO: 15983819 NR Description: 3-beta-hydroxysteroiddehydrogenase [Digitalis
  misc_feature (1)..(257): Homolog of NCBI NO: 7981382 NR Description: putative alcohol dehydrogenase [Lycopersicon
MSGQRRLDGKIVIITGGASGIGAEAARLFTDHGAKVVIVDLQEELGQNVAVSIGLDKASFYRCDITDETEVENAVKFTVEKHGKLDVLFSNAGVMEPHGSILDLDLEAFDRTMAVNVRGAAAFIKHAARSMVASGTRGSIVCTTSVTAEIGGPGPHSYTASKHALLGLVRSACGGLGKYGIRVNGVAPYGVATGLTSYNEETVKMVEDYCSATAILKGVVLKARHVADAALFLASDDSVYISGQNLGVDGGYSVVKLTSN

SEQ ID NO: 89262 - protein, 166 aa, Arabidopsis thaliana
  peptide (1)..(166): Ceres Seq. ID no. 12716833
  misc_feature (1)..(166): Homolog of NCBI NO: 15228656 NR Description: short-chain alcohol dehydrogenase, putative;
  misc_feature (1)..(163): Homolog of NCBI NO: 9293918 NR Description: alcohol dehydrogenase-like protein [Arabidopsis
  misc_feature (1)..(162): Homolog of NCBI NO: 15226503 NR Description: (NM_130281) putative alcohol dehydrogenase; id: At2g47130.1 [Arabidopsis thaliana] >gi|7431088|pir||T02175
  misc_feature (1)..(163): Homolog of NCBI NO: 22331405 NR Description: short-chain alcohol dehydrogenase, putative;
  misc_feature (1)..(162): Homolog of NCBI NO: 15226500 NR Description: (NM_130280) putative alcohol dehydrogenase; id: At2g47120.1 [Arabidopsis thaliana] >gi|7431089|pir||T02176
  misc_feature (1)..(162): Homolog of NCBI NO: 18407273 NR Description: putative alcohol dehydrogenase; protein id: supported by cDNA: gi_13878112, supported by cDNA: gi_17104782 thaliana] >gi|13878113|gb|AAK44134.1|AF370319_1 putative alcohol
  misc_feature (1)..(162): Homolog of NCBI NO: 7431087 NR Description: probable alcohol dehydrogenase [imported] -
  misc_feature (1)..(166): Homolog of NCBI NO: 9293921 NR Description: contains similarity to alcohol
  misc_feature (1)..(162): Homolog of NCBI NO: 15983819 NR Description: 3-beta-hydroxysteroiddehydrogenase [Digitalis
  misc_feature (1)..(163): Homolog of NCBI NO: 7981382 NR Description: putative alcohol dehydrogenase [Lycopersicon
MEPHGSILDLDLEAFDRTMAVNVRGAAAFIKHAARSMVASGTRGSIVCTTSVTAEIGGPGPHSYTASKHALLGLVRSACGGLGKYGIRVNGVAPYGVATGLTSYNEETVKMVEDYCSATAILKGVVLKARHVADAALFLASDDSVYISGQNLGVDGGYSVVKLTSN

SEQ ID NO: 89263 - protein, 148 aa, Arabidopsis thaliana
  peptide (1)..(148): Ceres Seq. ID no. 12716834
  misc_feature (1)..(148): Homolog of NCBI NO: 15228656 NR Description: short-chain alcohol dehydrogenase, putative;
  misc_feature (1)..(145): Homolog of NCBI NO: 9293918 NR Description: alcohol dehydrogenase-like protein [Arabidopsis
  misc_feature (1)..(144): Homolog of NCBI NO: 15226503 NR Description: (NM_130281) putative alcohol dehydrogenase; id: At2g47130.1 [Arabidopsis thaliana] >gi|7431088|pir||T02175
  misc_feature (1)..(145): Homolog of NCBI NO: 22331405 NR Description: short-chain alcohol dehydrogenase, putative;
  misc_feature (1)..(144): Homolog of NCBI NO: 15226500 NR Description: (NM_130280) putative alcohol dehydrogenase; id: At2g47120.1 [Arabidopsis thaliana] >gi|7431089|pir||T02176
  misc_feature (1)..(144): Homolog of NCBI NO: 18407273 NR Description: putative alcohol dehydrogenase; protein id: supported by cDNA: gi_13878112, supported by cDNA: gi_17104782 thaliana] >gi|13878113|gb|AAK44134.1|AF370319_1 putative alcohol
  misc_feature (1)..(144): Homolog of NCBI NO: 7431087 NR Description: probable alcohol dehydrogenase [imported] -
  misc_feature (1)..(148): Homolog of NCBI NO: 9293921 NR Description: contains similarity to alcohol
  misc_feature (1)..(144): Homolog of NCBI NO: 15983819 NR Description: 3-beta-hydroxysteroiddehydrogenase [Digitalis
  misc_feature (1)..(145): Homolog of NCBI NO: 7981382 NR Description: putative alcohol dehydrogenase [Lycopersicon
MAVNVRGAAAFIKHAARSMVASGTRGSIVCTTSVTAEIGGPGPHSYTASKHALLGLVRSACGGLGKYGIRVNGVAPYGVATGLTSYNEETVKMVEDYCSATAILKGVVLKARHVADAALFLASDDSVYISGQNLGVDGGYSVVKLTSN

SEQ ID NO: 89264 - DNA, 1794 bp, Arabidopsis thaliana
  misc_feature (1)..(1794): Ceres Seq. ID no. 12716936
  misc_feature: MA Experiment ID: 108668 Result: Up-regulated in Transcription
  misc_feature: MA Experiment 108668 PARAMETER Experiment Name: At_2mM_SA_cDNA_P Parameter: Plant Line Value: WS
  misc_feature: MA Experiment 108668 PARAMETER Experiment Name: At_2mM_SA_cDNA_P Parameter: Timepoint (hr) Value: 6
  misc_feature: MA Experiment 108668 PARAMETER Experiment Name: At_2mM_SA_cDNA_P Parameter: Treatment Value: 2mM SA vs. No Treatment
  misc_feature: MA Experiment ID: 20000111 Result: Down-regulated in Transcription
  misc_feature: MA Experiment 20000111 PARAMETER Experiment Name: At_42deg_Heat_cDNA_P Parameter: Temperature (deg C) Value: 42 vs. 22
  misc_feature: MA Experiment 20000111 PARAMETER Experiment Name: At_42deg_Heat_cDNA_P Parameter: Timepoint (hr) Value: 6
  misc_feature: MA Experiment 20000111 PARAMETER Experiment Name: At_42deg_Heat_cDNA_P Parameter: Tissue Value: Aerial
  misc_feature: MA Experiment ID: 20000113 Result: Down-regulated in Transcription
  misc_feature: MA Experiment 20000113 PARAMETER Experiment Name: At_42deg_Heat_cDNA_P Parameter: Temperature (deg C) Value: 42 vs. 22
  misc_feature: MA Experiment 20000113 PARAMETER Experiment Name: At_42deg_Heat_cDNA_P Parameter: Timepoint (hr) Value: 8
  misc_feature: MA Experiment 20000113 PARAMETER Experiment Name: At_42deg_Heat_cDNA_P Parameter: Tissue Value: Aerial
  misc_feature: MA Experiment ID: 20000224 Result: Up-regulated in Transcription
  misc_feature: MA Experiment ID: 20000315 Result: Down-regulated in Transcription
  misc_feature: MA Experiment 20000315 PARAMETER Experiment Name: At_14day_Shoots-Roots_Sub_P Parameter: Age (day) Value: 14
  misc_feature: MA Experiment 20000315 PARAMETER Experiment Name: At_14day_Shoots-Roots_Sub_P Parameter: Organism Value: A. thaliana
  misc_feature: MA Experiment 20000315 PARAMETER Experiment Name: At_14day_Shoots-Roots_Sub_P Parameter: Plant Line Value: WS
  misc_feature: MA Experiment 20000315 PARAMETER Experiment Name: At_14day_Shoots-Roots_Sub_P Parameter: Tissue Value: Shoots vs. Whole Plant
  misc_feature: MA Experiment ID: 20000328 Result: Down-regulated in Transcription
  misc_feature: MA Experiment 20000328 PARAMETER Experiment Name: At_42deg_Heat_Sub_P Parameter: Age (day) Value: 14
  misc_feature: MA Experiment 20000328 PARAMETER Experiment Name: At_42deg_Heat_Sub_P Parameter: Organism Value: A. thaliana
  misc_feature: MA Experiment 20000328 PARAMETER Experiment Name: At_42deg_Heat_Sub_P Parameter: Plant Line Value: WS
  misc_feature: MA Experiment 20000328 PARAMETER Experiment Name: At_42deg_Heat_Sub_P Parameter: Temperature (deg C) Value: 42 vs. 22
  misc_feature: MA Experiment 20000328 PARAMETER Experiment Name: At_42deg_Heat_Sub_P Parameter: Timepoint (hr) Value: 6
  misc_feature: MA Experiment 20000328 PARAMETER Experiment Name: At_42deg_Heat_Sub_P Parameter: Tissue Value: Aerial
  misc_feature: MA Experiment ID: 20000347 Result: Up-regulated in Transcription
  misc_feature: MA Experiment 20000347 PARAMETER Experiment Name: At_2mM_SA_Sub_P Parameter: Age (day) Value: 14
  misc_feature: MA Experiment 20000347 PARAMETER Experiment Name: At_2mM_SA_Sub_P Parameter: Organism Value: A. thaliana
  misc_feature: MA Experiment 20000347 PARAMETER Experiment Name: At_2mM_SA_Sub_P Parameter: Plant Line Value: WS
  misc_feature: MA Experiment 20000347 PARAMETER Experiment Name: At_2mM_SA_Sub_P Parameter: Timepoint (hr) Value: 6
  misc_feature: MA Experiment 20000347 PARAMETER Experiment Name: At_2mM_SA_Sub_P Parameter: Tissue Value: Aerial
  misc_feature: MA Experiment 20000347 PARAMETER Experiment Name: At_2mM_SA_Sub_P Parameter: Treatment Value: 2mM SA vs. No Treatment
  misc_feature: Pfam Name: Pkinase_Tyr Pfam Description: Protein tyrosine kinase
gggaagcgacgactgactcttcttcctcctcctcctccacctcttgtttaggttcttagcactgaaatttgatcagaaggtgttgacggtgtagagcttcacgaaacataaactttcatttcttctagcttcttgatttgctcttaaaggtgcatgttgaagtgattgaaagcgatttacatgtgacttgcagctcggtcagacattatacattacactcaacacgagattggaaaggatgcttgagaatccaaagttcgatttgcacgctgttggcaatcacaacaacgacaacaattactatgccttcacccaagacttttatcaaaagctcggggaagaaggtacaaacatgtctgttgacagtatgcagacaagtaatgctggagggtctgtgtcaatgtctgtcgataacagtagcgttggttcgagtgatgctcttattggccatcctggtttgaagcctatgcgccatccctactctctctcggatggccaaagcgtatttcggccaggaaaagttactcatgcacttaacgatgatgccttagcacaagcgttgatggatagtaagtatccaaccgagggactggtgaactatgaagagtggacaatagatctgaggaaactacatatgggtcctgcttttgctcaaggggcttttggaaagttatacagagggacttacaacggagaagatgtagccattaagctactcgagaggtcagatagcaaccctgaaaaggcacaagccctcgaacagcagtttcagcaggaagtttctatgcttgcatttttgaagcatcctaacatcgttaggtttattggtgcgtgcattaaaccgatggtgtggtgcatcgtgactgaatatgcaaaaggagggtctgtcagacagtttctgactaagagacaaaaccgagctgtgcctttgaagttagctgttatgcaggcgttggatgttgccaggggtatggcttacgtccatgagcgcaactttatacaccgggatctaaagtcagataacctcctcatatcagctgatcggtccatcaagattgctgattttggtgttgcaagaattgaagttcaaaccgaagggatgacaccagagactggaacttacagatggatggcaccagagatgatccagcacagaccctacactcaaaaagtggacgtgtatagttttggaatcgtgctgtgggagttgattacaggtctgttaccgttccagaacatgacggcggttcaggctgcatttgcagtggtgaacagaggagtccgtccaacagtcccagcagattgtcttcctgtgcttggagagatcatgacacgttgctgggatgcggaccctgaagtccgtccttgttttgcagagattgtcaatcttctggaggcggcggaaactgagataatgacgaatgtgagaaaagcccgtttcagatgttgcatgacgcaaccaatgacagtcgactaatctgttgtgaagaaagagagaggagaagaagaggaatgaacaaagaagagaacataaaagaaaaaaacagagagagagagagagaaagcaagaagggctttagatatatgtaagtttgtgtgtgtatctatctatctatatatatatatccgattgtatctcttttctcaagataggagaagtaacccaaccattttagactactgattttctagatttttgtattaagaaagaacaacgaaaaaattagatgtacggtgattgtctcaagtgtttggtttagttttccttgaatttgatgatgcatacttttctcc

SEQ ID NO: 89265 - protein, 412 aa, Arabidopsis thaliana; identical to SEQ ID NO: 43168
  peptide (1)..(412): Ceres Seq. ID no. 12716937
  misc_feature: Pfam Name: Pkinase_Tyr Pfam Description: Protein tyrosine kinase
  misc_feature (1)..(412): Homolog of NCBI NO: 15235845 NR Description: protein kinase - like protein; protein id: supported by cDNA: 156374. [Arabidopsis thaliana]
  misc_feature (1)..(412): Homolog of NCBI NO: 18400528 NR Description: putative protein kinase; protein id: At2g24360.1, by cDNA: gi_15028152 [Arabidopsis thaliana] putative protein kinase [Arabidopsis thaliana]
  misc_feature (1)..(412): Homolog of NCBI NO: 25287646 NR Description: probable protein kinase [imported] - Arabidopsis
  misc_feature (1)..(412): Homolog of NCBI NO: 27085278 NR Description: serine/threonine protein kinase [Oryza sativa
  misc_feature (1)..(412): Homolog of NCBI NO: 27085280 NR Description: serine/threonine protein kinase [Oryza sativa
  misc_feature (1)..(412): Homolog of NCBI NO: 13124865 NR Description: serine/threonine/tyrosine kinase [Arachis
  misc_feature (1)..(412): Homolog of NCBI NO: 14571547 NR Description: serine/threonine protein kinase [Triticum
  misc_feature (5)..(412): Homolog of NCBI NO: 27085282 NR Description: serine/threonine protein kinase [Oryza sativa
  misc_feature (13)..(412): Homolog of NCBI NO: 28864539 NR Description: serine/threonine protein kinase [Oryza sativa
  misc_feature (55)..(412): Homolog of NCBI NO: 29367355 NR Description: serine/thronine protein kinase-like protein

SEQ ID NO: 89266 - protein, 374 aa, Arabidopsis thaliana; identical to SEQ ID NO: 43169
  peptide (1)..(374): Ceres Seq. ID no. 12716938
  misc_feature: Pfam Name: Pkinase_Tyr Pfam Description: Protein tyrosine kinase
  misc_feature (1)..(374): Homolog of NCBI NO: 15235845 NR Description: protein kinase - like protein; protein id: supported by cDNA: 156374. [Arabidopsis thaliana]
  misc_feature (1)..(374): Homolog of NCBI NO: 18400528 NR Description: putative protein kinase; protein id: At2g24360.1, by cDNA: gi_15028152 [Arabidopsis thaliana] putative protein kinase [Arabidopsis thaliana]
  misc_feature (1)..(374): Homolog of NCBI NO: 25287646 NR Description: probable protein kinase [imported] - Arabidopsis
  misc_feature (1)..(374): Homolog of NCBI NO: 27085278 NR Description: serine/threonine protein kinase [Oryza sativa
  misc_feature (1)..(374): Homolog of NCBI NO: 27085280 NR Description: serine/threonine protein kinase [Oryza sativa
  misc_feature (1)..(374): Homolog of NCBI NO: 13124865 NR Description: serine/threonine/tyrosine kinase [Arachis
  misc_feature (1)..(374): Homolog of NCBI NO: 14571547 NR Description: serine/threonine protein kinase [Triticum
  misc_feature (1)..(374): Homolog of NCBI NO: 27085282 NR Description: serine/threonine protein kinase [Oryza sativa
  misc_feature (1)..(374): Homolog of NCBI NO: 28864539 NR Description: serine/threonine protein kinase [Oryza sativa
  misc_feature (17)..(374): Homolog of NCBI NO: 29367355 NR Description: serine/thronine protein kinase-like protein

SEQ ID NO: 89267 - protein, 369 aa, Arabidopsis thaliana; identical to SEQ ID NO: 43170
  peptide (1)..(369): Ceres Seq. ID no. 12716939
  misc_feature: Pfam Name: Pkinase_Tyr Pfam Description: Protein tyrosine kinase
  misc_feature (1)..(369): Homolog of NCBI NO: 15235845 NR Description: protein kinase - like protein; protein id: supported by cDNA: 156374. [Arabidopsis thaliana]
  misc_feature (1)..(369): Homolog of NCBI NO: 18400528 NR Description: putative protein kinase; protein id: At2g24360.1, by cDNA: gi_15028152 [Arabidopsis thaliana] putative protein kinase [Arabidopsis thaliana]
  misc_feature (1)..(369): Homolog of NCBI NO: 25287646 NR Description: probable protein kinase [imported] - Arabidopsis
  misc_feature (1)..(369): Homolog of NCBI NO: 27085278 NR Description: serine/threonine protein kinase [Oryza sativa
  misc_feature (1)..(369): Homolog of NCBI NO: 27085280 NR Description: serine/threonine protein kinase [Oryza sativa
  misc_feature (1)..(369): Homolog of NCBI NO: 13124865 NR Description: serine/threonine/tyrosine kinase [Arachis
  misc_feature (1)..(369): Homolog of NCBI NO: 14571547 NR Description: serine/threonine protein kinase [Triticum
  misc_feature (1)..(369): Homolog of NCBI NO: 27085282 NR Description: serine/threonine protein kinase [Oryza sativa
  misc_feature (1)..(369): Homolog of NCBI NO: 28864539 NR Description: serine/threonine protein kinase [Oryza sativa
  misc_feature (12)..(369): Homolog of NCBI NO: 29367355 NR Description: serine/thronine protein kinase-like protein

SEQ ID NO: 89268 - DNA, 2179 bp, Arabidopsis thaliana
  misc_feature (1)..(2179): Ceres Seq. ID no. 12716983
  misc_feature: MA Experiment ID: 20000169 Result: Up-regulated in Transcription
  misc_feature: MA Experiment 20000169 PARAMETER Experiment Name: At_100uM_ABA_P Parameter: Age (day) Value: 14
  misc_feature: MA Experiment 20000169 PARAMETER Experiment Name: At_100uM_ABA_P Parameter: Organism Value: A. thaliana
  misc_feature: MA Experiment 20000169 PARAMETER Experiment Name: At_100uM_ABA_P Parameter: Plant Line Value: WS
  misc_feature: MA Experiment 20000169 PARAMETER Experiment Name: At_100uM_ABA_P Parameter: Timepoint (hr) Value: 6
  misc_feature: MA Experiment 20000169 PARAMETER Experiment Name: At_100uM_ABA_P Parameter: Tissue Value: Aerial
  misc_feature: MA Experiment 20000169 PARAMETER Experiment Name: At_100uM_ABA_P Parameter: Treatment Value: 100uM ABA vs. No Treatment
  misc_feature: MA Experiment ID: 20000185 Result: Down-regulated in Transcription
  misc_feature: MA Experiment 20000185 PARAMETER Experiment Name: At_Roots__P Parameter: Age (day) Value: 7 vs. 21
  misc_feature: MA Experiment 20000185 PARAMETER Experiment Name: At_Roots__P Parameter: Organism Value: A. thaliana
  misc_feature: MA Experiment 20000185 PARAMETER Experiment Name: At_Roots__P Parameter: Tissue Value: Roots vs. Whole Plant
  misc_feature: MA Experiment ID: 20000264 Result: Up-regulated in Transcription
  misc_feature: MA Experiment 20000264 PARAMETER Experiment Name: At_Open_Flower_P Parameter: Age (day) Value: 21
  misc_feature: MA Experiment 20000264 PARAMETER Experiment Name: At_Open_Flower_P Parameter: Plant Line Value: WS
  misc_feature: MA Experiment 20000264 PARAMETER Experiment Name: At_Open_Flower_P Parameter: Tissue Value: Open Flower vs. Whole Plant
  misc_feature: MA Experiment ID: 20000436 Result: Up-regulated in Transcription
  misc_feature: MA Experiment 20000436 PARAMETER Experiment Name: At_Drought_P Parameter: Age (day) Value: 7
  misc_feature: MA Experiment 20000436 PARAMETER Experiment Name: At_Drought_P Parameter: Organism Value: A. thaliana
  misc_feature: MA Experiment 20000436 PARAMETER Experiment Name: At_Drought_P Parameter: Plant Line Value: WS
  misc_feature: MA Experiment 20000436 PARAMETER Experiment Name: At_Drought_P Parameter: Timepoint (hr) Value: 12
  misc_feature: MA Experiment 20000436 PARAMETER Experiment Name: At_Drought_P Parameter: Tissue Value: Whole Plant
  misc_feature: MA Experiment 20000436 PARAMETER Experiment Name: At_Drought_P Parameter: Treatment Value: Drought vs. No Drought
  misc_feature: MA Experiment ID: 20000437 Result: Up-regulated in Transcription
  misc_feature: MA Experiment 20000437 PARAMETER Experiment Name: At_Drought_P Parameter: Age (day) Value: 8
  misc_feature: MA Experiment 20000437 PARAMETER Experiment Name: At_Drought_P Parameter: Organism Value: A. thaliana
  misc_feature: MA Experiment 20000437 PARAMETER Experiment Name: At_Drought_P Parameter: Plant Line Value: WS
  misc_feature: MA Experiment 20000437 PARAMETER Experiment Name: At_Drought_P Parameter: Timepoint (hr) Value: 24
  misc_feature: MA Experiment 20000437 PARAMETER Experiment Name: At_Drought_P Parameter: Tissue Value: Whole Plant
  misc_feature: MA Experiment 20000437 PARAMETER Experiment Name: At_Drought_P Parameter: Treatment Value: Drought vs. No Drought
  misc_feature: MA Experiment ID: 20000439 Result: Down-regulated in Transcription
  misc_feature: MA Experiment 20000439 PARAMETER Experiment Name: At_Roots__P Parameter: Age (day) Value: 14 vs. 21
  misc_feature: MA Experiment 20000439 PARAMETER Experiment Name: At_Roots__P Parameter: Organism Value: A. thaliana
  misc_feature: MA Experiment 20000439 PARAMETER Experiment Name: At_Roots__P Parameter: Tissue Value: Roots vs. Whole Plant
  misc_feature: MA Experiment ID: 20000453 Result: Up-regulated in Transcription
  misc_feature: MA Experiment 20000453 PARAMETER Experiment Name: At_100uM_ABA_P Parameter: Age (day) Value: 15
  misc_feature: MA Experiment 20000453 PARAMETER Experiment Name: At_100uM_ABA_P Parameter: Organism Value: A. thaliana
  misc_feature: MA Experiment 20000453 PARAMETER Experiment Name: At_100uM_ABA_P Parameter: Plant Line Value: WS
  misc_feature: MA Experiment 20000453 PARAMETER Experiment Name: At_100uM_ABA_P Parameter: Timepoint (hr) Value: 24
  misc_feature: MA Experiment 20000453 PARAMETER Experiment Name: At_100uM_ABA_P Parameter: Tissue Value: Aerial
  misc_feature: MA Experiment 20000453 PARAMETER Experiment Name: At_100uM_ABA_P Parameter: Treatment Value: 100uM ABA vs. No Treatment
  misc_feature: MA Experiment ID: 20000794 Result: Up-regulated in Transcription
  misc_feature: MA Experiment 20000794 PARAMETER Experiment Name: At_Petals_P Parameter: Age (day) Value: 23-25 days
  misc_feature: MA Experiment 20000794 PARAMETER Experiment Name: At_Petals_P Parameter: Plant Line Value: WS
  misc_feature: MA Experiment 20000794 PARAMETER Experiment Name: At_Petals_P Parameter: Tissue Value: Petals vs. Whole plant
  misc_feature: MA Experiment ID: 20001559 Result: Up-regulated in Transcription
  misc_feature: MA Experiment 20001559 PARAMETER Experiment Name: At_Drought_Soil_Dry_P Parameter: Age (day) Value: 28
  misc_feature: MA Experiment 20001559 PARAMETER Experiment Name: At_Drought_Soil_Dry_P Parameter: Organism Value: A. thaliana
  misc_feature: MA Experiment 20001559 PARAMETER Experiment Name: At_Drought_Soil_Dry_P Parameter: Plant Line Value: WS
  misc_feature: MA Experiment 20001559 PARAMETER Experiment Name: At_Drought_Soil_Dry_P Parameter: Post Timepoint (hr) Value: 29
  misc_feature: MA Experiment 20001559 PARAMETER Experiment Name: At_Drought_Soil_Dry_P Parameter: Post-Treatment Value: Re-Water vs. No Drought
  misc_feature: MA Experiment 20001559 PARAMETER Experiment Name: At_Drought_Soil_Dry_P Parameter: Timepoint (day) Value: 14
  misc_feature: MA Experiment 20001559 PARAMETER Experiment Name: At_Drought_Soil_Dry_P Parameter: Treatment Value: Drought vs. No Drought
  misc_feature: MA Experiment ID: 20001904 Result: Up-regulated in Transcription
  misc_feature: MA Experiment 20001904 PARAMETER Experiment Name: At_Drought_Reproduction_P Parameter: Age (day) Value: 37
  misc_feature: MA Experiment 20001904 PARAMETER Experiment Name: At_Drought_Reproduction_P Parameter: Organism Value: A. thaliana
  misc_feature: MA Experiment 20001904 PARAMETER Experiment Name: At_Drought_Reproduction_P Parameter: Plant Line Value: WS
  misc_feature: MA Experiment 20001904 PARAMETER Experiment Name: At_Drought_Reproduction_P Parameter: Timepoint (day) Value: 7
  misc_feature: MA Experiment 20001904 PARAMETER Experiment Name: At_Drought_Reproduction_P Parameter: Tissue Value: Rosettes
  misc_feature: MA Experiment 20001904 PARAMETER Experiment Name: At_Drought_Reproduction_P Parameter: Treatment Value: Drought vs. No Drought
  misc_feature: MA Experiment ID: 20001905 Result: Up-regulated in Transcription
  misc_feature: MA Experiment 20001905 PARAMETER Experiment Name: At_Drought_Reproduction_P Parameter: Age (day) Value: 40
  misc_feature: MA Experiment 20001905 PARAMETER Experiment Name: At_Drought_Reproduction_P Parameter: Organism Value: A. thaliana
  misc_feature: MA Experiment 20001905 PARAMETER Experiment Name: At_Drought_Reproduction_P Parameter: Plant Line Value: WS
  misc_feature: MA Experiment 20001905 PARAMETER Experiment Name: At_Drought_Reproduction_P Parameter: Timepoint (day) Value: 10
  misc_feature: MA Experiment 20001905 PARAMETER Experiment Name: At_Drought_Reproduction_P Parameter: Tissue Value: Rosettes
  misc_feature: MA Experiment 20001905 PARAMETER Experiment Name: At_Drought_Reproduction_P Parameter: Treatment Value: Drought vs. No Drought
  misc_feature: MA Experiment ID: 20001906 Result: Up-regulated in Transcription
  misc_feature: MA Experiment 20001906 PARAMETER Experiment Name: At_Drought_Reproduction_P Parameter: Age (day) Value: 35
  misc_feature: MA Experiment 20001906 PARAMETER Experiment Name: At_Drought_Reproduction_P Parameter: Organism Value: A. thaliana
  misc_feature: MA Experiment 20001906 PARAMETER Experiment Name: At_Drought_Reproduction_P Parameter: Plant Line Value: WS
  misc_feature: MA Experiment 20001906 PARAMETER Experiment Name: At_Drought_Reproduction_P Parameter: Timepoint (day) Value: 5
  misc_feature: MA Experiment 20001906 PARAMETER Experiment Name: At_Drought_Reproduction_P Parameter: Tissue Value: Siliques
  misc_feature: MA Experiment 20001906 PARAMETER Experiment Name: At_Drought_Reproduction_P Parameter: Treatment Value: Drought vs. No Drought
  misc_feature: MA Experiment ID: 20001908 Result: Up-regulated in Transcription
  misc_feature: MA Experiment 20001908 PARAMETER Experiment Name: At_Drought_Reproduction_P Parameter: Age (day) Value: 40
  misc_feature: MA Experiment 20001908 PARAMETER Experiment Name: At_Drought_Reproduction_P Parameter: Organism Value: A. thaliana
  misc_feature: MA Experiment 20001908 PARAMETER Experiment Name: At_Drought_Reproduction_P Parameter: Plant Line Value: WS
  misc_feature: MA Experiment 20001908 PARAMETER Experiment Name: At_Drought_Reproduction_P Parameter: Timepoint (day) Value: 10
  misc_feature: MA Experiment 20001908 PARAMETER Experiment Name: At_Drought_Reproduction_P Parameter: Tissue Value: Siliques
  misc_feature: MA Experiment 20001908 PARAMETER Experiment Name: At_Drought_Reproduction_P Parameter: Treatment Value: Drought vs. No Drought
tttctcttctctgtctttttcagcttctgaagttacttgtttcagttcccgatgatcaattcttagtttttttggcttgttttcttcgtctctctttcatcaggcctttggagttttgtgttaccattttcgctcgcgtcattactggtgttagggttttcttcaaaagcttcttaatccgtcgaaattgctcttttctctccctcattacagagataaatggcttcaaagattattgctggcaagccggatgataccgagtatgaaatcattgaaggtgagtctgagagcgctttagcagcggggacaagcccttggatgaattcatcaacgttgaagcttcgacatcgaattggaagaggtcccttcggtgatgtttggctggctactcatcatcagtcaactgaggactatgatgagcatcatgaagtggccatcaaaatgctttatcccatcaaggaagatcaaagaagggttgtggtagataagtttgaagatctcttctctaaatgtcaaggactagagaatgtctgtctgctcaggggagtctctagtatcaatggaaagatatgtgtcgtcatgaaattctacgagggctctcttggtgacaagatggctcggcttaaaggaggaaagctttcactgccagatgttttgagatacggggttgatctggctacagggatcctggagttgcactcaaaagggtttctcattctcaatctcaagccctctaactttcttctcagtgataacgacaaggccatcctcggggatgttgggatcccttatctccttcttagtatccctttaccaagttctgatatgacagagagacttggaactccaaactatatggcaccagaacagtggcaaccggatgtcagaggtcccatgtcctttgagactgattcttggggatttggttgcagcattgttgaaatgctgactggtgtacaaccttggtctgggagatctgccgatgaaatatatgatttggtggtgagaaagcaagaaaagcttagtatccccagtagcataccgcctcctctcgagaacctacttcggggttgctttatgtatgatcttcgaagccgaccttcgatgactgacatcttactcgtcttaaagagcttgcagaactcggaggaggaacaggtcaggagaggcattgatagtagagaaatcaggaagagctcggctactcttggttatacagaatggtttctttcaaaggatcatctgcaagtgcgcgacaccgtgcgttcaagaaagcctgccaattcgtgtaagcatgagaacatggatgtgccagaaggaatggtggttggtttagaacgtgactccacagacccagatggatttgtgctagttaaagtccatggtgtacatgatccattaagggttcacgtatctgttcttgaacgggtaactaacggcttagcttctggagattgggtgcgtctgaaggtcaggaaagacaagaggcactctccggttggtgttctccattcaattgaccgtgagggaaatgtagctgttggatttattgggttgccaactctctggaaagggacatcatcgcagcttcagatggctaaagtatacagtgtgggtcaatttgtgaaactcaaagccaatgttgtcatcccgagattcaaatggatgcgtaaaggtagaggtatttgggcaactggcaggatctctcaggttctaccaaacggttgccttgaagtggacttccctggaatgttaccttttggagaggaacatggaagctatcttgcagatccggctgaagtagagattgtgaatttcaatacatgtcaaggagctgtggaaaaatatcaacatctggaggattttcattgggctgtgagacctttgcttattgctatgggtctattgacagcgatgaagttagggatctgtgtcaggaagaaaataggaaggtcaaaggatgggaaacaacgcgatggctcgactggacaaggtgactgtaagattccggatggtaagggctctgacaaatctaaatggcttgtgttcttttaggtctgctatgagacacagaccttgtctggtccatatattatactgttctagtcataataacgtttcatgtacataatgacgtttttcttttttgctctttaaaattaccaaaaagctttcacgc

SEQ ID NO: 89269 - protein, 611 aa, Arabidopsis thaliana; identical to SEQ ID NO: 45166
  peptide (1)..(611): Ceres Seq. ID no. 12716984
  misc_feature (29)..(331): Homolog of NCBI NO: 18420244 NR Description: protein kinase like protein; protein id:
  misc_feature (5)..(309): Homolog of NCBI NO: 34393850 NR Description: putative serine/threonine protein kinase [Oryza
  misc_feature (45)..(300): Homolog of NCBI NO: 34334393 NR Description: NIMA-related kinase 2 [Chlamydomonas reinhardtii]
  misc_feature (5)..(311): Homolog of NCBI NO: 34901608 NR Description: P0571D04.18 [Oryza sativa (japonica
  misc_feature (41)..(308): Homolog of NCBI NO: 25146954 NR Description: Protein kinase [Caenorhabditis elegans] Hypothetical protein F19H6.1 [Caenorhabditis elegans]
  misc_feature (33)..(309): Homolog of NCBI NO: 38345798 NR Description: OSJNBa0085I10.15 [Oryza sativa (japonica
  misc_feature (40)..(302): Homolog of NCBI NO: 39588025 NR Description: Hypothetical protein CBG00136 [Caenorhabditis
  misc_feature (47)..(316): Homolog of NCBI NO: 27085282 NR Description: serine/threonine protein kinase [Oryza sativa
  misc_feature (24)..(300): Homolog of NCBI NO: 34334391 NR Description: NIMA-related kinase 1 [Chlamydomonas reinhardtii]
  misc_feature (47)..(316): Homolog of NCBI NO: 28864539 NR Description: serine/threonine protein kinase [Oryza sativa

SEQ ID NO: 89270 - protein, 578 aa, Arabidopsis thaliana; identical to SEQ ID NO: 45167
  peptide (1)..(578): Ceres Seq. ID no. 12716985
  misc_feature (1)..(298): Homolog of NCBI NO: 18420244 NR Description: protein kinase like protein; protein id:
  misc_feature (1)..(276): Homolog of NCBI NO: 34393850 NR Description: putative serine/threonine protein kinase [Oryza
  misc_feature (12)..(267): Homolog of NCBI NO: 34334393 NR Description: NIMA-related kinase 2 [Chlamydomonas reinhardtii]
  misc_feature (1)..(278): Homolog of NCBI NO: 34901608 NR Description: P0571D04.18 [Oryza sativa (japonica
  misc_feature (8)..(275): Homolog of NCBI NO: 25146954 NR Description: Protein kinase [Caenorhabditis elegans] Hypothetical protein F19H6.1 [Caenorhabditis elegans]
  misc_feature (1)..(276): Homolog of NCBI NO: 38345798 NR Description: OSJNBa0085I10.15 [Oryza sativa (japonica
  misc_feature (7)..(269): Homolog of NCBI NO: 39588025 NR Description: Hypothetical protein CBG00136 [Caenorhabditis
  misc_feature (14)..(283): Homolog of NCBI NO: 27085282 NR Description: serine/threonine protein kinase [Oryza sativa
  misc_feature (1)..(267): Homolog of NCBI NO: 34334391 NR Description: NIMA-related kinase 1 [Chlamydomonas reinhardtii]
  misc_feature (14)..(283): Homolog of NCBI NO: 28864539 NR Description: serine/threonine protein kinase [Oryza sativa

SEQ ID NO: 89271 - protein, 537 aa, Arabidopsis thaliana; identical to SEQ ID NO: 45168
  peptide (1)..(537): Ceres Seq. ID no. 12716986
  misc_feature (1)..(257): Homolog of NCBI NO: 18420244 NR Description: protein kinase like protein; protein id:
  misc_feature (1)..(235): Homolog of NCBI NO: 34393850 NR Description: putative serine/threonine protein kinase [Oryza
  misc_feature (1)..(226): Homolog of NCBI NO: 34334393 NR Description: NIMA-related kinase 2 [Chlamydomonas reinhardtii]
  misc_feature (1)..(237): Homolog of NCBI NO: 34901608 NR Description: P0571D04.18 [Oryza sativa (japonica
  misc_feature (1)..(234): Homolog of NCBI NO: 25146954 NR Description: Protein kinase [Caenorhabditis elegans] Hypothetical protein F19H6.1 [Caenorhabditis elegans]
  misc_feature (1)..(235): Homolog of NCBI NO: 38345798 NR Description: OSJNBa0085I10.15 [Oryza sativa (japonica
  misc_feature (1)..(228): Homolog of NCBI NO: 39588025 NR Description: Hypothetical protein CBG00136 [Caenorhabditis
  misc_feature (1)..(242): Homolog of NCBI NO: 27085282 NR Description: serine/threonine protein kinase [Oryza sativa
  misc_feature (1)..(226): Homolog of NCBI NO: 34334391 NR Description: NIMA-related kinase 1 [Chlamydomonas reinhardtii]
  misc_feature (1)..(242): Homolog of NCBI NO: 28864539 NR Description: serine/threonine protein kinase [Oryza sativa

SEQ ID NO: 89272 - DNA, 948 bp, Arabidopsis thaliana
  misc_feature (1)..(948): Ceres Seq. ID no. 12717108
  misc_feature: MA Experiment ID: 20000171 Result: Up-regulated in Transcription
  misc_feature: MA Experiment 20000171 PARAMETER Experiment Name: At_42deg_Heat_P Parameter: Age (day) Value: 14
  misc_feature: MA Experiment 20000171 PARAMETER Experiment Name: At_42deg_Heat_P Parameter: Organism Value: A. thaliana
  misc_feature: MA Experiment 20000171 PARAMETER Experiment Name: At_42deg_Heat_P Parameter: Plant Line Value: WS
  misc_feature: MA Experiment 20000171 PARAMETER Experiment Name: At_42deg_Heat_P Parameter: Temperature (deg C) Value: 42 vs. 22
  misc_feature: MA Experiment 20000171 PARAMETER Experiment Name: At_42deg_Heat_P Parameter: Timepoint (hr) Value: 1
  misc_feature: MA Experiment 20000171 PARAMETER Experiment Name: At_42deg_Heat_P Parameter: Tissue Value: Aerial
  misc_feature: MA Experiment ID: 20000173 Result: Up-regulated in Transcription
  misc_feature: MA Experiment 20000173 PARAMETER Experiment Name: At_42deg_Heat_P Parameter: Age (day) Value: 14
  misc_feature: MA Experiment 20000173 PARAMETER Experiment Name: At_42deg_Heat_P Parameter: Organism Value: A. thaliana
  misc_feature: MA Experiment 20000173 PARAMETER Experiment Name: At_42deg_Heat_P Parameter: Plant Line Value: WS
  misc_feature: MA Experiment 20000173 PARAMETER Experiment Name: At_42deg_Heat_P Parameter: Temperature (deg C) Value: 42 vs. 22
  misc_feature: MA Experiment 20000173 PARAMETER Experiment Name: At_42deg_Heat_P Parameter: Timepoint (hr) Value: 6
  misc_feature: MA Experiment 20000173 PARAMETER Experiment Name: At_42deg_Heat_P Parameter: Tissue Value: Aerial
  misc_feature: MA Experiment ID: 20000184 Result: Down-regulated in Transcription
  misc_feature: MA Experiment 20000184 PARAMETER Experiment Name: At_Shoots__P Parameter: Age (day) Value: 7
  misc_feature: MA Experiment 20000184 PARAMETER Experiment Name: At_Shoots__P Parameter: Tissue Value: Shoots vs. Whole Plant
  misc_feature: MA Experiment ID: 20001451 Result: Up-regulated in Transcription
  misc_feature: MA Experiment 20001451 PARAMETER Experiment Name: At_Far-red-induction_P Parameter: Age (day) Value: 7
  misc_feature: MA Experiment 20001451 PARAMETER Experiment Name: At_Far-red-induction_P Parameter: Light Value: Far-red vs. White
  misc_feature: MA Experiment 20001451 PARAMETER Experiment Name: At_Far-red-induction_P Parameter: Organism Value: A. thaliana
  misc_feature: MA Experiment 20001451 PARAMETER Experiment Name: At_Far-red-induction_P Parameter: Plant Line Value: Columbia
  misc_feature: MA Experiment 20001451 PARAMETER Experiment Name: At_Far-red-induction_P Parameter: Timepoint (hr) Value: 24
  misc_feature: MA Experiment 20001451 PARAMETER Experiment Name: At_Far-red-induction_P Parameter: Tissue Value: Whole Plant
atggttggtggtggaaacaggagagatgagggatcgatgccgattcagaacaccaacttgtttgctgctttggatacttcgaggaagaagaagaagtctgataaggctggtaagagcaaagcttcctctaagagagaagattcacagaaggagcctgagccacaggttttctgggcacctacgcctctcaaagcaaaggcttgggctgatatcgatagcgatgatgaagatgatgattattacgctaccactgctccacctcagtccctgtggagcacttctgaagcctcccattcagatgctaaagacgttcccgctgaggaaattgaaagcgaagaagacactcttgatgatggagatgatgatgatgtggaggaagatcacgagcagggaacagagacacaagttcatccagaagcagagcctgaggtgaaaaaggctcctgaagttcgtgctcctcctaaggaggcagagaggcaactttccaagaaagagaggaaaaagaaggaacttgctgagcttgaggctttgctagcagattttggagttgcaaccaaagatgagaatggtcaacaagactctcaagataagggggagaagaaagaagtgaatgatgagggagagaagaaggagaacacaaccggagaatcaaaggcctcaaagaagaagaaaaagaaggacaaacagaaggagctaaaagaatcccagagtgaagtgaagagcaactcggatgctgcaagtgagtccgctgagcaggaggagtcttcttcttccatcgacgtcaaagaacggctaaagaagattgcatcaatgaagaagaagaaatcaagcaaggaggttgatggtgcttcaacagctgctgcaaaggaagcagctgcgaggaaggcaaagttggccgcagcgaagaaaaaagaaaagaaaaactacaatcagcaacctgtgaggtga

SEQ ID NO: 89273 - protein, 315 aa, Arabidopsis thaliana
  peptide (1)..(315): Ceres Seq. ID no. 12717109
  misc_feature (10)..(313): Pfam Name: Caldesmon Pfam Description: Caldesmon
  misc_feature (1)..(315): Homolog of NCBI NO: 15233865 NR Description: putative protein; protein id: At4g32610.1
  misc_feature (1)..(315): Homolog of NCBI NO: 18400901 NR Description: expressed protein; protein id: At2g25670.1, by cDNA: 12261., supported by cDNA: gi_17529065 [Arabidopsis >gi|25412339|pir||C84651 hypothetical protein At2g25670
  misc_feature (1)..(315): Homolog of NCBI NO: 21537167 NR Description: unknown [Arabidopsis thaliana]
  misc_feature (1)..(315): Homolog of NCBI NO: 17529066 NR Description: unknown protein [Arabidopsis thaliana]
  misc_feature (105)..(315): Homolog of NCBI NO: 34906156 NR Description: P0509B06.15 [Oryza sativa (japonica
  misc_feature (1)..(114): Homolog of NCBI NO: 34906156 NR Description: P0509B06.15 [Oryza sativa (japonica
  misc_feature (1)..(315): Homolog of NCBI NO: 33620414 NR Description: M355 [Lilium longiflorum]
  misc_feature (107)..(315): Homolog of NCBI NO: 7522210 NR Description: hypothetical protein pAFD103 - apple tree
  misc_feature (30)..(308): Homolog of NCBI NO: 39593039 NR Description: Hypothetical protein CBG09238 [Caenorhabditis
  misc_feature (28)..(297): Homolog of NCBI NO: 8096269 NR Description: KED [Nicotiana tabacum]
MVGGGNRRDEGSMPIQNTNLFAALDTSRKKKKSDKAGKSKASSKREDSQKEPEPQVFWAPTPLKAKAWADIDSDDEDDDYYATTAPPQSLWSTSEASHSDAKDVPAEEIESEEDTLDDGDDDDVEEDHEQGTETQVHPEAEPEVKKAPEVRAPPKEAERQLSKKERKKKELAELEALLADFGVATKDENGQQDSQDKGEKKEVNDEGEKKENTTGESKASKKKKKKDKQKELKESQSEVKSNSDAASESAEQEESSSSIDVKERLKKIASMKKKKSSKEVDGASTAAAKEAAARKAKLAAAKKKEKKNYNQQPVR

SEQ ID NO: 89274 - protein, 303 aa, Arabidopsis thaliana
  peptide (1)..(303): Ceres Seq. ID no. 12717110
  misc_feature (1)..(301): Pfam Name: Caldesmon Pfam Description: Caldesmon
  misc_feature (1)..(303): Homolog of NCBI NO: 15233865 NR Description: putative protein; protein id: At4g32610.1
  misc_feature (1)..(303): Homolog of NCBI NO: 18400901 NR Description: expressed protein; protein id: At2g25670.1, by cDNA: 12261., supported by cDNA: gi_17529065 [Arabidopsis >gi|25412339|pir||C84651 hypothetical protein At2g25670
  misc_feature (1)..(303): Homolog of NCBI NO: 21537167 NR Description: unknown [Arabidopsis thaliana]
  misc_feature (1)..(303): Homolog of NCBI NO: 17529066 NR Description: unknown protein [Arabidopsis thaliana]
  misc_feature (93)..(303): Homolog of NCBI NO: 34906156 NR Description: P0509B06.15 [Oryza sativa (japonica
  misc_feature (1)..(102): Homolog of NCBI NO: 34906156 NR Description: P0509B06.15 [Oryza sativa (japonica
  misc_feature (1)..(303): Homolog of NCBI NO: 33620414 NR Description: M355 [Lilium longiflorum]
  misc_feature (95)..(303): Homolog of NCBI NO: 7522210 NR Description: hypothetical protein pAFD103 - apple tree
  misc_feature (18)..(296): Homolog of NCBI NO: 39593039 NR Description: Hypothetical protein CBG09238 [Caenorhabditis
  misc_feature (16)..(285): Homolog of NCBI NO: 8096269 NR Description: KED [Nicotiana tabacum]
MPIQNTNLFAALDTSRKKKKSDKAGKSKASSKREDSQKEPEPQVFWAPTPLKAKAWADIDSDDEDDDYYATTAPPQSLWSTSEASHSDAKDVPAEEIESEEDTLDDGDDDDVEEDHEQGTETQVHPEAEPEVKKAPEVRAPPKEAERQLSKKERKKKELAELEALLADFGVATKDENGQQDSQDKGEKKEVNDEGEKKENTTGESKASKKKKKKDKQKELKESQSEVKSNSDAASESAEQEESSSSIDVKERLKKIASMKKKKSSKEVDGASTAAAKEAAARKAKLAAAKKKEKKNYNQQPVR

SEQ ID NO: 89275 - DNA, 1881 bp, Arabidopsis thaliana
  misc_feature (1)..(1881): Ceres Seq. ID no. 12717111
  misc_feature: MA Experiment ID: 20000264 Result: Up-regulated in Transcription
  misc_feature: MA Experiment 20000264 PARAMETER Experiment Name: At_Open_Flower_P Parameter: Age (day) Value: 21
  misc_feature: MA Experiment 20000264 PARAMETER Experiment Name: At_Open_Flower_P Parameter: Plant Line Value: WS
  misc_feature: MA Experiment 20000264 PARAMETER Experiment Name: At_Open_Flower_P Parameter: Tissue Value: Open Flower vs. Whole Plant
  misc_feature: MA Experiment ID: 20001910 Result: Up-regulated in Transcription
  misc_feature: MA Experiment 20001910 PARAMETER Experiment Name: At_Drought_Reproduction_P Parameter: Age (day) Value: 37
  misc_feature: MA Experiment 20001910 PARAMETER Experiment Name: At_Drought_Reproduction_P Parameter: Organism Value: A. thaliana
  misc_feature: MA Experiment 20001910 PARAMETER Experiment Name: At_Drought_Reproduction_P Parameter: Plant Line Value: WS
  misc_feature: MA Experiment 20001910 PARAMETER Experiment Name: At_Drought_Reproduction_P Parameter: Timepoint (day) Value: 7
  misc_feature: MA Experiment 20001910 PARAMETER Experiment Name: At_Drought_Reproduction_P Parameter: Tissue Value: Flowers
  misc_feature: MA Experiment 20001910 PARAMETER Experiment Name: At_Drought_Reproduction_P Parameter: Treatment Value: Drought vs. No Drought
atgaaggaagacgagcgaaccgaaaaggctatccggagtttattgaagcttcctgagaaccggagatgcatcaattgcaatagtctgggtccacaatatgtatgctcaactttctggacttttgtctgcgttaactgcagcggaatccaccgagaattcacacatcgtgttaaatctgtatcaatggccaagttcacagcagacgaagttagtgcacttcgcgcaggaggaaacgagcgagccagacaaatttattttaaagaatgggatgctcaccgtgatggttaccccgatcgcagtaatattttcaagctccgagatttcatcaggagtgtttatgtggacaaaagatacagtagcagtgacaagatctcacagcagaaatcggatgtcacagaagattacagggaaagtaagaagaccagtgcacatgttctcggatctagaagtttacactctgtggataaatctgacatcgaaagatctagtgctgctgggaggagtggaagtgaatctctaaggttttattttgatgacaagaaccataaacaacaacatgttacgcataatccaaggtctagaggtttaccaaagagtcctattcgctttgagatagtcgatgataggtttagagacgatgggagtgttaagagatatgatgcacgtaaagattcaagaggaagctccaaatcacttgacctctcaagtaacaaagacatgccaagctttcccattgtacgccataccagcgaactcaatattgtaaaagttgagaaaaagaaggatccagtgaataatcagatgactgcatcatctgagaaaatggaaattcctagaagtttaattgatgatgtaccagtttcagaactatctgatgaaggcattattaagaattcaagtgaaattcctgcatctctaaagaccactgaggagccagctcctaattctttggaagctttgttgtttggatcctctgttccttctgttgtccctggaacaaacaactatgaactatggaacacaagtgatatttcctctactgaaaactataccgcagttaacctcgggacccagacaatgccaggaataccagacagtgttacctcttttgccacatcaccaacaactgcacatgctcattccggttcttcaggtccagtggtacctgttgctcctgataacttaaatacaaaagagacggctacacttgcaaataaccagacaacactggctatcacagattatgctcatggagttggatctgagcatcatcaagatgatgagacacaatctagcataagaaaggcgcttcctgaggaccttttcactggaggcttctcatttgcccctcagcaagttcatggtcaacatcatggcatgggatatggcatgcaatattatcaatatcctgtggctatgggagccttaacatatacagcaaaagcagcaaatccctttgatcttagctatgatgatacagctccaaaccaaacaccacaatttcctactatggcatatgtgcaaggaggaggcttacctcacgtgtcatctccaatagggtattcagattcttcaagtccagctgcagattccattggactgatgacctctcagtcaccttttcatgcaaccgctttatccccaaactctccagctcttgcatcccatctttcccctggtgcactaatggggcagcaatcacaggtgaatatgtccccatcattcaggcaagagtatagtggtcttggtacagaaggaaatacgttcaacggagtacatacatttcatcaagcaaacaatggatatccttctgcaaacccaaatgcttatagcttgttctattggccatttgacaatcagattttagtgtgcatgtgttaa

SEQ ID NO: 89276 - protein, 626 aa, Arabidopsis thaliana
  peptide (1)..(626): Ceres Seq. ID no. 12717112
  misc_feature (8)..(120): Pfam Name: Putative GTPase activating protein for Arf Pfam Description: Putative GTPase activating protein for Arf
  misc_feature (1)..(439): Homolog of NCBI NO: 15233867 NR Description: hypothetical protein; protein id: At4g32630.1
  misc_feature (470)..(560): Homolog of NCBI NO: 15233867 NR Description: hypothetical protein; protein id: At4g32630.1
  misc_feature (1)..(584): Homolog of NCBI NO: 22328591 NR Description: putative protein; protein id: At4g13350.1, by cDNA: gi_17064857 [Arabidopsis thaliana]
  misc_feature (1)..(584): Homolog of NCBI NO: 7487869 NR Description: hypothetical protein T9E8.90 - Arabidopsis >gi|4584540|emb|CAB40770.1| putative protein [Arabidopsis >gi|7268038|emb|CAB78377.1| putative protein [Arabidopsis
  misc_feature (2)..(236): Homolog of NCBI NO: 30680768 NR Description: ARF GAP-like zinc finger-containing protein
  misc_feature (2)..(236): Homolog of NCBI NO: 30680774 NR Description: ARF GAP-like zinc finger-containing protein [Arabidopsis thaliana] >gi|19698913|gb|AAL91192.1| unknown [Arabidopsis thaliana] >gi|30725470|gb|AAP37757.1| At1g08690
  misc_feature (49)..(130): Homolog of NCBI NO: 9802557 NR Description: F22O13.16 [Arabidopsis thaliana]
  misc_feature (2)..(49): Homolog of NCBI NO: 9802557 NR Description: F22O13.16 [Arabidopsis thaliana]
  misc_feature (2)..(104): Homolog of NCBI NO: 7485983 NR Description: hypothetical protein F22O13.17 - Arabidopsis
  misc_feature (2)..(118): Homolog of NCBI NO: 29245305 NR Description: GLP_333_15386_14190 [Giardia lamblia ATCC 50803]
MKEDERTEKAIRSLLKLPENRRCINCNSLGPQYVCSTFWTFVCVNCSGIHREFTHRVKSVSMAKFTADEVSALRAGGNERARQIYFKEWDAHRDGYPDRSNIFKLRDFIRSVYVDKRYSSSDKISQQKSDVTEDYRESKKTSAHVLGSRSLHSVDKSDIERSSAAGRSGSESLRFYFDDKNHKQQHVTHNPRSRGLPKSPIRFEIVDDRFRDDGSVKRYDARKDSRGSSKSLDLSSNKDMPSFPIVRHTSELNIVKVEKKKDPVNNQMTASSEKMEIPRSLIDDVPVSELSDEGIIKNSSEIPASLKTTEEPAPNSLEALLFGSSVPSVVPGTNNYELWNTSDISSTENYTAVNLGTQTMPGIPDSVTSFATSPTTAHAHSGSSGPVVPVAPDNLNTKETATLANNQTTLAITDYAHGVGSEHHQDDETQSSIRKALPEDLFTGGFSFAPQQVHGQHHGMGYGMQYYQYPVAMGALTYTAKAANPFDLSYDDTAPNQTPQFPTMAYVQGGGLPHVSSPIGYSDSSSPAADSIGLMTSQSPFHATALSPNSPALASHLSPGALMGQQSQVNMSPSFRQEYSGLGTEGNTFNGVHTFHQANNGYPSANPNAYSLFYWPFDNQILVCMC

SEQ ID NO: 89277 - protein, 565 aa, Arabidopsis thaliana
  peptide (1)..(565): Ceres Seq. ID no. 12717113
  misc_feature (1)..(59): Pfam Name: Putative GTPase activating protein for Arf Pfam Description: Putative GTPase activating protein for Arf
  misc_feature (1)..(378): Homolog of NCBI NO: 15233867 NR Description: hypothetical protein; protein id: At4g32630.1
  misc_feature (409)..(499): Homolog of NCBI NO: 15233867 NR Description: hypothetical protein; protein id: At4g32630.1
  misc_feature (1)..(523): Homolog of NCBI NO: 22328591 NR Description: putative protein; protein id: At4g13350.1, by cDNA: gi_17064857 [Arabidopsis thaliana]
  misc_feature (1)..(523): Homolog of NCBI NO: 7487869 NR Description: hypothetical protein T9E8.90 - Arabidopsis >gi|4584540|emb|CAB40770.1| putative protein [Arabidopsis >gi|7268038|emb|CAB78377.1| putative protein [Arabidopsis
  misc_feature (1)..(175): Homolog of NCBI NO: 30680768 NR Description: ARF GAP-like zinc finger-containing protein
  misc_feature (1)..(175): Homolog of NCBI NO: 30680774 NR Description: ARF GAP-like zinc finger-containing protein [Arabidopsis thaliana] >gi|19698913|gb|AAL91192.1| unknown [Arabidopsis thaliana] >gi|30725470|gb|AAP37757.1| At1g08690
  misc_feature (1)..(69): Homolog of NCBI NO: 9802557 NR Description: F22O13.16 [Arabidopsis thaliana]
  misc_feature (1)..(43): Homolog of NCBI NO: 7485983 NR Description: hypothetical protein F22O13.17 - Arabidopsis
  misc_feature (1)..(57): Homolog of NCBI NO: 29245305 NR Description: GLP_333_15386_14190 [Giardia lamblia ATCC 50803]
  misc_feature (1)..(341): Homolog of NCBI NO: 26325842 NR Description: unnamed protein product [Mus musculus]
MAKFTADEVSALRAGGNERARQIYFKEWDAHRDGYPDRSNIFKLRDFIRSVYVDKRYSSSDKISQQKSDVTEDYRESKKTSAHVLGSRSLHSVDKSDIERSSAAGRSGSESLRFYFDDKNHKQQHVTHNPRSRGLPKSPIRFEIVDDRFRDDGSVKRYDARKDSRGSSKSLDLSSNKDMPSFPIVRHTSELNIVKVEKKKDPVNNQMTASSEKMEIPRSLIDDVPVSELSDEGIIKNSSEIPASLKTTEEPAPNSLEALLFGSSVPSVVPGTNNYELWNTSDISSTENYTAVNLGTQTMPGIPDSVTSFATSPTTAHAHSGSSGPVVPVAPDNLNTKETATLANNQTTLAITDYAHGVGSEHHQDDETQSSIRKALPEDLFTGGFSFAPQQVHGQHHGMGYGMQYYQYPVAMGALTYTAKAANPFDLSYDDTAPNQTPQFPTMAYVQGGGLPHVSSPIGYSDSSSPAADSIGLMTSQSPFHATALSPNSPALASHLSPGALMGQQSQVNMSPSFRQEYSGLGTEGNTFNGVHTFHQANNGYPSANPNAYSLFYWPFDNQILVCMC

SEQ ID NO: 89278 - protein, 387 aa, Arabidopsis thaliana
  peptide (1)..(387): Ceres Seq. ID no. 12717114
  misc_feature (1)..(200): Homolog of NCBI NO: 15233867 NR Description: hypothetical protein; protein id: At4g32630.1
  misc_feature (231)..(321): Homolog of NCBI NO: 15233867 NR Description: hypothetical protein; protein id: At4g32630.1
  misc_feature (1)..(345): Homolog of NCBI NO: 22328591 NR Description: putative protein; protein id: At4g13350.1, by cDNA: gi_17064857 [Arabidopsis thaliana]
  misc_feature (1)..(345): Homolog of NCBI NO: 7487869 NR Description: hypothetical protein T9E8.90 - Arabidopsis >gi|4584540|emb|CAB40770.1| putative protein [Arabidopsis >gi|7268038|emb|CAB78377.1| putative protein [Arabidopsis
  misc_feature (1)..(163): Homolog of NCBI NO: 26325842 NR Description: unnamed protein product [Mus musculus]
  misc_feature (1)..(169): Homolog of NCBI NO: 39591833 NR Description: Hypothetical protein CBG18321 [Caenorhabditis
  misc_feature (1)..(145): Homolog of NCBI NO: 28850371 NR Description: similar to Plasmodium falciparum (isolate 3D7).
MPSFPIVRHTSELNIVKVEKKKDPVNNQMTASSEKMEIPRSLIDDVPVSELSDEGIIKNSSEIPASLKTTEEPAPNSLEALLFGSSVPSVVPGTNNYELWNTSDISSTENYTAVNLGTQTMPGIPDSVTSFATSPTTAHAHSGSSGPVVPVAPDNLNTKETATLANNQTTLAITDYAHGVGSEHHQDDETQSSIRKALPEDLFTGGFSFAPQQVHGQHHGMGYGMQYYQYPVAMGALTYTAKAANPFDLSYDDTAPNQTPQFPTMAYVQGGGLPHVSSPIGYSDSSSPAADSIGLMTSQSPFHATALSPNSPALASHLSPGALMGQQSQVNMSPSFRQEYSGLGTEGNTFNGVHTFHQANNGYPSANPNAYSLFYWPFDNQILVCMC

SEQ ID NO: 89279 - DNA, 1656 bp, Arabidopsis thaliana
  misc_feature (1)..(1656): Ceres Seq. ID no. 12717172
  misc_feature: MA Experiment ID: 20000438 Result: Up-regulated in Transcription
  misc_feature: MA Experiment 20000438 PARAMETER Experiment Name: At_Shoots__P Parameter: Age (day) Value: 14
  misc_feature: MA Experiment 20000438 PARAMETER Experiment Name: At_Shoots__P Parameter: Tissue Value: Shoots vs. Whole Plant
  misc_feature: MA Experiment ID: 20000527 Result: Down-regulated in Transcription
  misc_feature: MA Experiment 20000527 PARAMETER Experiment Name: At_10percent_PEG_P Parameter: Age (day) Value: 20
  misc_feature: MA Experiment 20000527 PARAMETER Experiment Name: At_10percent_PEG_P Parameter: Organism Value: A. thaliana
  misc_feature: MA Experiment 20000527 PARAMETER Experiment Name: At_10percent_PEG_P Parameter: Plant Line Value: WS
  misc_feature: MA Experiment 20000527 PARAMETER Experiment Name: At_10percent_PEG_P Parameter: Timepoint (day) Value: 20
  misc_feature: MA Experiment 20000527 PARAMETER Experiment Name: At_10percent_PEG_P Parameter: Tissue Value: Whole Plant
  misc_feature: MA Experiment 20000527 PARAMETER Experiment Name: At_10percent_PEG_P Parameter: Treatment Value: 10percent PEG vs. No Treatment
  misc_feature: MA Experiment ID: 20000794 Result: Up-regulated in Transcription
  misc_feature: MA Experiment 20000794 PARAMETER Experiment Name: At_Petals_P Parameter: Age (day) Value: 23-25 days
  misc_feature: MA Experiment 20000794 PARAMETER Experiment Name: At_Petals_P Parameter: Plant Line Value: WS
  misc_feature: MA Experiment 20000794 PARAMETER Experiment Name: At_Petals_P Parameter: Tissue Value: Petals vs. Whole plant
  misc_feature: MA Experiment ID: 20001247 Result: Up-regulated in Transcription
  misc_feature: MA Experiment 20001247 PARAMETER Experiment Name: At_Far-red-induction_P Parameter: Age (day) Value: 7
  misc_feature: MA Experiment 20001247 PARAMETER Experiment Name: At_Far-red-induction_P Parameter: Light Value: Far-red vs. White
  misc_feature: MA Experiment 20001247 PARAMETER Experiment Name: At_Far-red-induction_P Parameter: Organism Value: A. thaliana
  misc_feature: MA Experiment 20001247 PARAMETER Experiment Name: At_Far-red-induction_P Parameter: Plant Line Value: Columbia
  misc_feature: MA Experiment 20001247 PARAMETER Experiment Name: At_Far-red-induction_P Parameter: Timepoint (hr) Value: 1
  misc_feature: MA Experiment 20001247 PARAMETER Experiment Name: At_Far-red-induction_P Parameter: Tissue Value: Whole Plant
  misc_feature: MA Experiment ID: 20001248 Result: Up-regulated in Transcription
  misc_feature: MA Experiment 20001248 PARAMETER Experiment Name: At_Far-red-induction_P Parameter: Age (day) Value: 7
  misc_feature: MA Experiment 20001248 PARAMETER Experiment Name: At_Far-red-induction_P Parameter: Light Value: Far-red vs. White
  misc_feature: MA Experiment 20001248 PARAMETER Experiment Name: At_Far-red-induction_P Parameter: Organism Value: A. thaliana
  misc_feature: MA Experiment 20001248 PARAMETER Experiment Name: At_Far-red-induction_P Parameter: Plant Line Value: Columbia
  misc_feature: MA Experiment 20001248 PARAMETER Experiment Name: At_Far-red-induction_P Parameter: Timepoint (hr) Value: 4
  misc_feature: MA Experiment 20001248 PARAMETER Experiment Name: At_Far-red-induction_P Parameter: Tissue Value: Whole Plant
  misc_feature: MA Experiment ID: 20001450 Result: Up-regulated in Transcription
  misc_feature: MA Experiment 20001450 PARAMETER Experiment Name: At_Far-red-induction_P Parameter: Age (day) Value: 7
  misc_feature: MA Experiment 20001450 PARAMETER Experiment Name: At_Far-red-induction_P Parameter: Light Value: Far-red vs. White
  misc_feature: MA Experiment 20001450 PARAMETER Experiment Name: At_Far-red-induction_P Parameter: Organism Value: A. thaliana
  misc_feature: MA Experiment 20001450 PARAMETER Experiment Name: At_Far-red-induction_P Parameter: Plant Line Value: Columbia
  misc_feature: MA Experiment 20001450 PARAMETER Experiment Name: At_Far-red-induction_P Parameter: Timepoint (hr) Value: 8
  misc_feature: MA Experiment 20001450 PARAMETER Experiment Name: At_Far-red-induction_P Parameter: Tissue Value: Whole Plant
  misc_feature: MA Experiment ID: 20001554 Result: Down-regulated in Transcription
  misc_feature: MA Experiment 20001554 PARAMETER Experiment Name: At_Drought_Soil_Dry_P Parameter: Age (day) Value: 21
  misc_feature: MA Experiment 20001554 PARAMETER Experiment Name: At_Drought_Soil_Dry_P Parameter: Organism Value: A. thaliana
  misc_feature: MA Experiment 20001554 PARAMETER Experiment Name: At_Drought_Soil_Dry_P Parameter: Plant Line Value: WS
  misc_feature: MA Experiment 20001554 PARAMETER Experiment Name: At_Drought_Soil_Dry_P Parameter: Post Timepoint (hr) Value: None
  misc_feature: MA Experiment 20001554 PARAMETER Experiment Name: At_Drought_Soil_Dry_P Parameter: Post-Treatment Value: None
  misc_feature: MA Experiment 20001554 PARAMETER Experiment Name: At_Drought_Soil_Dry_P Parameter: Timepoint (day) Value: 7
  misc_feature: MA Experiment 20001554 PARAMETER Experiment Name: At_Drought_Soil_Dry_P Parameter: Treatment Value: Drought vs. No Drought
  misc_feature: MA Experiment ID: 20001770 Result: Up-regulated in Transcription
  misc_feature: MA Experiment 20001770 PARAMETER Experiment Name: At_Far-red-enriched-adult_P Parameter: Age (day) Value: 28
  misc_feature: MA Experiment 20001770 PARAMETER Experiment Name: At_Far-red-enriched-adult_P Parameter: Light Value: Far-red enriched vs. White
  misc_feature: MA Experiment 20001770 PARAMETER Experiment Name: At_Far-red-enriched-adult_P Parameter: Organism Value: A. thaliana
  misc_feature: MA Experiment 20001770 PARAMETER Experiment Name: At_Far-red-enriched-adult_P Parameter: Plant Line Value: Columbia
  misc_feature: MA Experiment 20001770 PARAMETER Experiment Name: At_Far-red-enriched-adult_P Parameter: Timepoint (hr) Value: 8
  misc_feature: MA Experiment 20001770 PARAMETER Experiment Name: At_Far-red-enriched-adult_P Parameter: Tissue Value: Aerial
atggagaatatgtttcgtttgatggatcaagatcaggatttaactaataaccggtgcatttgggtcaacggaccggtcatcgtcggagctggaccgtcggggttagcgacggcggcttgtctccatgaacaaaacgttcctttcgttgttctcgagagagcagattgtattgcttctctatggcaaaaacgtacttacgatcgtctcaagcttcaccttcctaagcagttttgtcaattaccgaaaatgcccttccctgaggacttcccggagtacccgacgaagcgtcagttcatcgactaccttgagtcttacgctacccggttcgagatcaaccctaagttcaacgagtgtgtgcagactgctcggttcgatgagaccagtggcttgtggcgagtcaagaccgtgtcgaagagtgagtcgactcagaccgaggtcgagtatatttgccggtggcttgtggtggctacgggagaaaatgcggagagagtgatgccggagattgatggtctttctgagttttccggtgaggtgattcacgcttgtgattacaagtccggcgagaaattcgccgggaaaaaagttctcgtcgttggttgtggaaactccggcatggaagtttctcttgacctagcaaaccatttcgctaagccttccatggtcgtgagaagctctcttcacgtgatgccgagggaagtaatgggtaaatcaacgtttgagcttgcaatgaagatgttaagatggtttcctctatggttagtcgacaagatattgttggttttaagttggatggttcttggaaacatcgagaaatacggtttgaaacgaccagagatgggtccaatggagctaaaaagcgtgaaaggcaagacaccggtgcttgacatcggagctatagagaagatccggttaggaaagatcaacgtggttccagggatcaaaaggtttaacggaaacaaagtcgaacttgtcaatggagaacaactagacgtagactcagttgttctagctactggttaccgcagcaacgtcccatattggctacaagagaatgagttctttgcaaagaatggtttcccaaagacagtagctgacaacaatggttggaaaggaaggacaggattgtatgcggttgggtttacgaggaaagggctctcaggtgcgtcaatggacgcggttaagatcgcacaagacataggctctgtttggcaacttgaaacaaaacaacccacgaaacgctcaaggggttctcttcgaaggaaaaaaaagattagagttttaggacagagatcactgacaaaagagaagagccctctcctgaagacccaaagcgaatcaaagggtgttgtgcgtgtttttttgttacctcctccacttagtgttttgggcgttttgtgtaaacagaggaagatgtggccttttgttttctacttttttacaatctttttttttacatacatttttaacaattattttttgggggtgggttctttgatttttttgtacaagtttatgttaacatctatattgtatacacttttctatttttttttaagccaaatatattttgatttcaatttaccatctttctatagtcttgccaacctctcttactttccacttactgaacaaatcaccatgttttttagacagtag

SEQ ID NO: 89280 - protein, 551 aa, Arabidopsis thaliana
  peptide (1)..(551): Ceres Seq. ID no. 12717173
  misc_feature (24)..(376): Pfam Name: Pyridine nucleotide-disulphide oxidoreductase Pfam Description: Pyridine nucleotide-disulphide oxidoreductase
  misc_feature (1)..(420): Homolog of NCBI NO: 15235409 NR Description: putative protein; protein id: At4g28720.1
  misc_feature (1)..(420): Homolog of NCBI NO: 15240026 NR Description: dimethylaniline monooxygenase-like; protein id: [Arabidopsis thaliana] >gi|8953750|dbj|BAA98069.1|
  misc_feature (1)..(419): Homolog of NCBI NO: 15219671 NR Description: putative dimethylaniline monooxygenase; protein At1g04180.1 [Arabidopsis thaliana] >gi|7485875|pir||T00955
  misc_feature (3)..(420): Homolog of NCBI NO: 15219767 NR Description: putative dimethylaniline monooxygenase; protein At1g04610.1 [Arabidopsis thaliana] >gi|25406796|pir||G86178
  misc_feature (8)..(412): Homolog of NCBI NO: 15225816 NR Description: putative flavin-containing monooxygenase; protein
  misc_feature (9)..(420): Homolog of NCBI NO: 38346518 NR Description: OSJNBa0027H09.13 [Oryza sativa (japonica
  misc_feature (18)..(407): Homolog of NCBI NO: 33147034 NR Description: putative dimethylaniline monooxygenase [Oryza
  misc_feature (20)..(403): Homolog of NCBI NO: 15239020 NR Description: putative protein; protein id: At5g11320.1 thaliana] >gi|8953394|emb|CAB96667.1| putative protein
  misc_feature (6)..(404): Homolog of NCBI NO: 22327064 NR Description: putative protein; protein id: At5g25620.1, by cDNA: gi_17528989, supported by cDNA: gi_21280978 [Arabidopsis >gi|17528990|gb|AAL38705.1| unknown protein [Arabidopsis
  misc_feature (10)..(404): Homolog of NCBI NO: 15010541 NR Description: flavin monoxygenase-like protein floozy [Petunia
MENMFRLMDQDQDLTNNRCIWVNGPVIVGAGPSGLATAACLHEQNVPFVVLERADCIASLWQKRTYDRLKLHLPKQFCQLPKMPFPEDFPEYPTKRQFIDYLESYATRFEINPKFNECVQTARFDETSGLWRVKTVSKSESTQTEVEYICRWLVVATGENAERVMPEIDGLSEFSGEVIHACDYKSGEKFAGKKVLVVGCGNSGMEVSLDLANHFAKPSMVVRSSLHVMPREVMGKSTFELAMKMLRWFPLWLVDKILLVLSWMVLGNIEKYGLKRPEMGPMELKSVKGKTPVLDIGAIEKIRLGKINVVPGIKRFNGNKVELVNGEQLDVDSVVLATGYRSNVPYWLQENEFFAKNGFPKTVADNNGWKGRTGLYAVGFTRKGLSGASMDAVKIAQDIGSVWQLETKQPTKRSRGSLRRKKKIRVLGQRSLTKEKSPLLKTQSESKGVVRVFLLPPPLSVLGVLCKQRKMWPFVFYFFTIFFFTYIFNNYFLGVGSLIFLYKFMLTSILYTLFYFFLSQIYFDFNLPSFYSLANLSYFPLTEQITMFFRQ

SEQ ID NO: 89281 - protein, 548 aa, Arabidopsis thaliana
  peptide (1)..(548): Ceres Seq. ID no. 12717174
  misc_feature (21)..(373): Pfam Name: Pyridine nucleotide-disulphide oxidoreductase Pfam Description: Pyridine nucleotide-disulphide oxidoreductase
  misc_feature (1)..(417): Homolog of NCBI NO: 15235409 NR Description: putative protein; protein id: At4g28720.1
  misc_feature (1)..(417): Homolog of NCBI NO: 15240026 NR Description: dimethylaniline monooxygenase-like; protein id: [Arabidopsis thaliana] >gi|8953750|dbj|BAA98069.1|
  misc_feature (1)..(416): Homolog of NCBI NO: 15219671 NR Description: putative dimethylaniline monooxygenase; protein At1g04180.1 [Arabidopsis thaliana] >gi|7485875|pir||T00955
  misc_feature (1)..(417): Homolog of NCBI NO: 15219767 NR Description: putative dimethylaniline monooxygenase; protein At1g04610.1 [Arabidopsis thaliana] >gi|25406796|pir||G86178
  misc_feature (5)..(409): Homolog of NCBI NO: 15225816 NR Description: putative flavin-containing monooxygenase; protein
  misc_feature (6)..(417): Homolog of NCBI NO: 38346518 NR Description: OSJNBa0027H09.13 [Oryza sativa (japonica
  misc_feature (15)..(404): Homolog of NCBI NO: 33147034 NR Description: putative dimethylaniline monooxygenase [Oryza
  misc_feature (17)..(400): Homolog of NCBI NO: 15239020 NR Description: putative protein; protein id: At5g11320.1 thaliana] >gi|8953394|emb|CAB96667.1| putative protein
  misc_feature (3)..(401): Homolog of NCBI NO: 22327064 NR Description: putative protein; protein id: At5g25620.1, by cDNA: gi_17528989, supported by cDNA: gi_21280978 [Arabidopsis >gi|17528990|gb|AAL38705.1| unknown protein [Arabidopsis
  misc_feature (7)..(401): Homolog of NCBI NO: 15010541 NR Description: flavin monoxygenase-like protein floozy [Petunia
MFRLMDQDQDLTNNRCIWVNGPVIVGAGPSGLATAACLHEQNVPFVVLERADCIASLWQKRTYDRLKLHLPKQFCQLPKMPFPEDFPEYPTKRQFIDYLESYATRFEINPKFNECVQTARFDETSGLWRVKTVSKSESTQTEVEYICRWLVVATGENAERVMPEIDGLSEFSGEVIHACDYKSGEKFAGKKVLVVGCGNSGMEVSLDLANHFAKPSMVVRSSLHVMPREVMGKSTFELAMKMLRWFPLWLVDKILLVLSWMVLGNIEKYGLKRPEMGPMELKSVKGKTPVLDIGAIEKIRLGKINVVPGIKRFNGNKVELVNGEQLDVDSVVLATGYRSNVPYWLQENEFFAKNGFPKTVADNNGWKGRTGLYAVGFTRKGLSGASMDAVKIAQDIGSVWQLETKQPTKRSRGSLRRKKKIRVLGQRSLTKEKSPLLKTQSESKGVVRVFLLPPPLSVLGVLCKQRKMWPFVFYFFTIFFFTYIFNNYFLGVGSLIFLYKFMLTSILYTLFYFFLSQIYFDFNLPSFYSLANLSYFPLTEQITMFFRQ

SEQ ID NO: 89282 - protein, 544 aa, Arabidopsis thaliana
  peptide (1)..(544): Ceres Seq. ID no. 12717175
  misc_feature (17)..(369): Pfam Name: Pyridine nucleotide-disulphide oxidoreductase Pfam Description: Pyridine nucleotide-disulphide oxidoreductase
  misc_feature (1)..(413): Homolog of NCBI NO: 15235409 NR Description: putative protein; protein id: At4g28720.1
  misc_feature (1)..(413): Homolog of NCBI NO: 15240026 NR Description: dimethylaniline monooxygenase-like; protein id: [Arabidopsis thaliana] >gi|8953750|dbj|BAA98069.1|
  misc_feature (1)..(412): Homolog of NCBI NO: 15219671 NR Description: putative dimethylaniline monooxygenase; protein At1g04180.1 [Arabidopsis thaliana] >gi|7485875|pir||T00955
  misc_feature (1)..(413): Homolog of NCBI NO: 15219767 NR Description: putative dimethylaniline monooxygenase; protein At1g04610.1 [Arabidopsis thaliana] >gi|25406796|pir||G86178
  misc_feature (1)..(405): Homolog of NCBI NO: 15225816 NR Description: putative flavin-containing monooxygenase; protein
  misc_feature (2)..(413): Homolog of NCBI NO: 38346518 NR Description: OSJNBa0027H09.13 [Oryza sativa (japonica
  misc_feature (11)..(400): Homolog of NCBI NO: 33147034 NR Description: putative dimethylaniline monooxygenase [Oryza
  misc_feature (13)..(396): Homolog of NCBI NO: 15239020 NR Description: putative protein; protein id: At5g11320.1 thaliana] >gi|8953394|emb|CAB96667.1| putative protein
  misc_feature (1)..(397): Homolog of NCBI NO: 22327064 NR Description: putative protein; protein id: At5g25620.1, by cDNA: gi_17528989, supported by cDNA: gi_21280978 [Arabidopsis >gi|17528990|gb|AAL38705.1| unknown protein [Arabidopsis
  misc_feature (3)..(397): Homolog of NCBI NO: 15010541 NR Description: flavin monoxygenase-like protein floozy [Petunia
MDQDQDLTNNRCIWVNGPVIVGAGPSGLATAACLHEQNVPFVVLERADCIASLWQKRTYDRLKLHLPKQFCQLPKMPFPEDFPEYPTKRQFIDYLESYATRFEINPKFNECVQTARFDETSGLWRVKTVSKSESTQTEVEYICRWLVVATGENAERVMPEIDGLSEFSGEVIHACDYKSGEKFAGKKVLVVGCGNSGMEVSLDLANHFAKPSMVVRSSLHVMPREVMGKSTFELAMKMLRWFPLWLVDKILLVLSWMVLGNIEKYGLKRPEMGPMELKSVKGKTPVLDIGAIEKIRLGKINVVPGIKRFNGNKVELVNGEQLDVDSVVLATGYRSNVPYWLQENEFFAKNGFPKTVADNNGWKGRTGLYAVGFTRKGLSGASMDAVKIAQDIGSVWQLETKQPTKRSRGSLRRKKKIRVLGQRSLTKEKSPLLKTQSESKGVVRVFLLPPPLSVLGVLCKQRKMWPFVFYFFTIFFFTYIFNNYFLGVGSLIFLYKFMLTSILYTLFYFFLSQIYFDFNLPSFYSLANLSYFPLTEQITMFFRQ

SEQ ID NO: 89283 - DNA, 1209 bp, Arabidopsis thaliana
  misc_feature (1)..(1209): Ceres Seq. ID no. 12717180
  misc_feature: MA Experiment ID: 108461 Result: Up-regulated in Transcription
  misc_feature: MA Experiment 108461 PARAMETER Experiment Name: At_Germinating_Seeds_cDNA_P Parameter: Age (day) Value: 1 vs. 0
  misc_feature: MA Experiment 108461 PARAMETER Experiment Name: At_Germinating_Seeds_cDNA_P Parameter: Tissue Value: Germinating Seeds
  misc_feature: MA Experiment ID: 108462 Result: Up-regulated in Transcription
  misc_feature: MA Experiment 108462 PARAMETER Experiment Name: At_Germinating_Seeds_cDNA_P Parameter: Age (day) Value: 2 vs. 0
  misc_feature: MA Experiment 108462 PARAMETER Experiment Name: At_Germinating_Seeds_cDNA_P Parameter: Tissue Value: Germinating Seeds
  misc_feature: MA Experiment ID: 108463 Result: Up-regulated in Transcription
  misc_feature: MA Experiment 108463 PARAMETER Experiment Name: At_Germinating_Seeds_cDNA_P Parameter: Age (day) Value: 3 vs. 0
  misc_feature: MA Experiment 108463 PARAMETER Experiment Name: At_Germinating_Seeds_cDNA_P Parameter: Tissue Value: Germinating Seeds
  misc_feature: MA Experiment ID: 108464 Result: Up-regulated in Transcription
  misc_feature: MA Experiment 108464 PARAMETER Experiment Name: At_Germinating_Seeds_cDNA_P Parameter: Age (day) Value: 4 vs. 0
  misc_feature: MA Experiment 108464 PARAMETER Experiment Name: At_Germinating_Seeds_cDNA_P Parameter: Tissue Value: Germinating Seeds
  misc_feature: MA Experiment ID: 108488 Result: Up-regulated in Transcription
  misc_feature: MA Experiment ID: 108579 Result: Up-regulated in Transcription
  misc_feature: MA Experiment 108579 PARAMETER Experiment Name: At_4deg_Cold_cDNA_P Parameter: Temperature (deg C) Value: 4 vs. 22
  misc_feature: MA Experiment 108579 PARAMETER Experiment Name: At_4deg_Cold_cDNA_P Parameter: Timepoint (hr) Value: 6
  misc_feature: MA Experiment 108579 PARAMETER Experiment Name: At_4deg_Cold_cDNA_P Parameter: Tissue Value: Aerial
  misc_feature: MA Experiment ID: 108585 Result: Down-regulated in Transcription
  misc_feature: MA Experiment 108585 PARAMETER Experiment Name: At_5mM_NaNP_cDNA_P Parameter: Timepoint (hr) Value: 6
  misc_feature: MA Experiment 108585 PARAMETER Experiment Name: At_5mM_NaNP_cDNA_P Parameter: Tissue Value: Aerial
  misc_feature: MA Experiment 108585 PARAMETER Experiment Name: At_5mM_NaNP_cDNA_P Parameter: Treatment Value: null
  misc_feature: MA Experiment ID: 108595 Result: Down-regulated in Transcription
  misc_feature: MA Experiment 108595 PARAMETER Experiment Name: At_Ler-pi_Ovule_cDNA_P Parameter: Plant Line Value: null
  misc_feature: MA Experiment ID: 20000179 Result: Up-regulated in Transcription
  misc_feature: MA Experiment 20000179 PARAMETER Experiment Name: At_Germinating_Seeds_P Parameter: Age (hr) Value: 6 vs. 0
  misc_feature: MA Experiment 20000179 PARAMETER Experiment Name: At_Germinating_Seeds_P Parameter: Tissue Value: Germinating Seeds
  misc_feature: MA Experiment ID: 20000180 Result: Up-regulated in Transcription
  misc_feature: MA Experiment 20000180 PARAMETER Experiment Name: At_Germinating_Seeds_P Parameter: Age (hr) Value: 24 vs. 0
  misc_feature: MA Experiment 20000180 PARAMETER Experiment Name: At_Germinating_Seeds_P Parameter: Tissue Value: Germinating Seeds
  misc_feature: MA Experiment ID: 20000184 Result: Up-regulated in Transcription
  misc_feature: MA Experiment 20000184 PARAMETER Experiment Name: At_Shoots__P Parameter: Age (day) Value: 7
  misc_feature: MA Experiment 20000184 PARAMETER Experiment Name: At_Shoots__P Parameter: Tissue Value: Shoots vs. Whole Plant
  misc_feature: MA Experiment ID: 20000185 Result: Down-regulated in Transcription
  misc_feature: MA Experiment 20000185 PARAMETER Experiment Name: At_Roots__P Parameter: Age (day) Value: 7 vs. 21
  misc_feature: MA Experiment 20000185 PARAMETER Experiment Name: At_Roots__P Parameter: Organism Value: A. thaliana
  misc_feature: MA Experiment 20000185 PARAMETER Experiment Name: At_Roots__P Parameter: Tissue Value: Roots vs. Whole Plant
  misc_feature: MA Experiment ID: 20000438 Result: Up-regulated in Transcription
  misc_feature: MA Experiment 20000438 PARAMETER Experiment Name: At_Shoots__P Parameter: Age (day) Value: 14
  misc_feature: MA Experiment 20000438 PARAMETER Experiment Name: At_Shoots__P Parameter: Tissue Value: Shoots vs. Whole Plant
  misc_feature: MA Experiment ID: 20000527 Result: Up-regulated in Transcription
  misc_feature: MA Experiment 20000527 PARAMETER Experiment Name: At_10percent_PEG_P Parameter: Age (day) Value: 20
  misc_feature: MA Experiment 20000527 PARAMETER Experiment Name: At_10percent_PEG_P Parameter: Organism Value: A. thaliana
  misc_feature: MA Experiment 20000527 PARAMETER Experiment Name: At_10percent_PEG_P Parameter: Plant Line Value: WS
  misc_feature: MA Experiment 20000527 PARAMETER Experiment Name: At_10percent_PEG_P Parameter: Timepoint (day) Value: 20
  misc_feature: MA Experiment 20000527 PARAMETER Experiment Name: At_10percent_PEG_P Parameter: Tissue Value: Whole Plant
  misc_feature: MA Experiment 20000527 PARAMETER Experiment Name: At_10percent_PEG_P Parameter: Treatment Value: 10percent PEG vs. No Treatment
  misc_feature: MA Experiment ID: 20001248 Result: Down-regulated in Transcription
  misc_feature: MA Experiment 20001248 PARAMETER Experiment Name: At_Far-red-induction_P Parameter: Age (day) Value: 7
  misc_feature: MA Experiment 20001248 PARAMETER Experiment Name: At_Far-red-induction_P Parameter: Light Value: Far-red vs. White
  misc_feature: MA Experiment 20001248 PARAMETER Experiment Name: At_Far-red-induction_P Parameter: Organism Value: A. thaliana
  misc_feature: MA Experiment 20001248 PARAMETER Experiment Name: At_Far-red-induction_P Parameter: Plant Line Value: Columbia
  misc_feature: MA Experiment 20001248 PARAMETER Experiment Name: At_Far-red-induction_P Parameter: Timepoint (hr) Value: 4
  misc_feature: MA Experiment 20001248 PARAMETER Experiment Name: At_Far-red-induction_P Parameter: Tissue Value: Whole Plant
  misc_feature: MA Experiment ID: 20001450 Result: Down-regulated in Transcription
  misc_feature: MA Experiment 20001450 PARAMETER Experiment Name: At_Far-red-induction_P Parameter: Age (day) Value: 7
  misc_feature: MA Experiment 20001450 PARAMETER Experiment Name: At_Far-red-induction_P Parameter: Light Value: Far-red vs. White
  misc_feature: MA Experiment 20001450 PARAMETER Experiment Name: At_Far-red-induction_P Parameter: Organism Value: A. thaliana
  misc_feature: MA Experiment 20001450 PARAMETER Experiment Name: At_Far-red-induction_P Parameter: Plant Line Value: Columbia
  misc_feature: MA Experiment 20001450 PARAMETER Experiment Name: At_Far-red-induction_P Parameter: Timepoint (hr) Value: 8
  misc_feature: MA Experiment 20001450 PARAMETER Experiment Name: At_Far-red-induction_P Parameter: Tissue Value: Whole Plant
aagcgtggcaagtttaggatcacaggtcaatagagtgaaaaatgatcccaaactgaaaagagatgtcatcttctgaaacaggggaagttgcagagaatctagcgagaccaatggctactctggtctcgtctcaaacttacatctaccattgtcatattagtaaacaagctctttatcaggcaaaagaatcatactctcatcgtagaatttcccgtcataatcacagagaaagactcgatttttctcatagaaaccatagattgacaataactagaaagcagcaacctttgtctttcaacaccgtgtgttttgccgcagacgagccctccgaaatcagtgctgatgctagaatccgtagtgaggttctgtctccgttcagatcagtccgtatgttcttctacctcgcctttatagcaagcggttcattaggaggactaatagccacttctaggctcataggtgccctggcgaatccggctagatcaggtgaagttcttgagatcgttaagggtttgggagttgacattggtgctgcttctctctttgcgttcctatacttcaacgaaaacaagaccaagaacgcgcaaatggctaggctctcgagggaagagaatcttggcaaactcaaaatgagagtcgaagagaacaataaggtaatctccgtaggtgatctgagaggggttgctaggcttgtgatctgtgctggtcctgcggagtttattgaagaagcgtttaagagaagtaaagagtatacacaagggctcgtggagagaggtgtggttgtggtggcttatgctacggatgggaattcaccggttttggagtttgatgaaactgacattgcggatgaagaaatgagccagagaaggaagaaactgtggcgggtgactccggtttttgtcccggaatgggaaaagtggttaaatgagcagaagaagcttgccaatgtttcctcagactctccagtgtatttgtctctgcgtttggatgggcgtgtaagggcaagtggagtgggttatcctccatggcaagccttcgttgcacagcttcctccggttaagggaatgtggaccggtcttcttgacggtatggatggtagagtgtaaatactctaatacttagggataaagtcatatgttttttagtctcctataaattttataaaatgtatagttatgaaaagattttgacttcaaaattattattttc

SEQ ID NO: 89284 - protein, 347 aa, Arabidopsis thaliana
  peptide (1)..(347): Ceres Seq. ID no. 12717181
  misc_feature (1)..(347): Homolog of NCBI NO: 18417257 NR Description: expressed protein; protein id: At4g28740.1, by cDNA: 36080., supported by cDNA: gi_15081661, supported by
  misc_feature (1)..(347): Homolog of NCBI NO: 15081662 NR Description: AT4g28740/F16A16_150 [Arabidopsis thaliana]
  misc_feature (17)..(347): Homolog of NCBI NO: 7485530 NR Description: hypothetical protein F16A16.150 - Arabidopsis >gi|4218124|emb|CAA22978.1| hypothetical protein [Arabidopsis >gi|7269729|emb|CAB81462.1| hypothetical protein [Arabidopsis
  misc_feature (82)..(347): Homolog of NCBI NO: 32489514 NR Description: OSJNBa0043L24.5 [Oryza sativa (japonica
  misc_feature (94)..(242): Homolog of NCBI NO: 15218638 NR Description: hypothetical protein; protein id: At1g02910.1
  misc_feature (282)..(332): Homolog of NCBI NO: 15218638 NR Description: hypothetical protein; protein id: At1g02910.1
MSSSETGEVAENLARPMATLVSSQTYIYHCHISKQALYQAKESYSHRRISRHNHRERLDFSHRNHRLTITRKQQPLSFNTVCFAADEPSEISADARIRSEVLSPFRSVRMFFYLAFIASGSLGGLIATSRLIGALANPARSGEVLEIVKGLGVDIGAASLFAFLYFNENKTKNAQMARLSREENLGKLKMRVEENNKVISVGDLRGVARLVICAGPAEFIEEAFKRSKEYTQGLVERGVVVVAYATDGNSPVLEFDETDIADEEMSQRRKKLWRVTPVFVPEWEKWLNEQKKLANVSSDSPVYLSLRLDGRVRASGVGYPPWQAFVAQLPPVKGMWTGLLDGMDGRV

SEQ ID NO: 89285 - protein, 331 aa, Arabidopsis thaliana
  peptide (1)..(331): Ceres Seq. ID no. 12717182
  misc_feature (1)..(331): Homolog of NCBI NO: 18417257 NR Description: expressed protein; protein id: At4g28740.1, by cDNA: 36080., supported by cDNA: gi_15081661, supported by
  misc_feature (1)..(331): Homolog of NCBI NO: 15081662 NR Description: AT4g28740/F16A16_150 [Arabidopsis thaliana]
  misc_feature (1)..(331): Homolog of NCBI NO: 7485530 NR Description: hypothetical protein F16A16.150 - Arabidopsis >gi|4218124|emb|CAA22978.1| hypothetical protein [Arabidopsis >gi|7269729|emb|CAB81462.1| hypothetical protein [Arabidopsis
  misc_feature (66)..(331): Homolog of NCBI NO: 32489514 NR Description: OSJNBa0043L24.5 [Oryza sativa (japonica
  misc_feature (78)..(226): Homolog of NCBI NO: 15218638 NR Description: hypothetical protein; protein id: At1g02910.1
  misc_feature (266)..(316): Homolog of NCBI NO: 15218638 NR Description: hypothetical protein; protein id: At1g02910.1
MATLVSSQTYIYHCHISKQALYQAKESYSHRRISRHNHRERLDFSHRNHRLTITRKQQPLSFNTVCFAADEPSEISADARIRSEVLSPFRSVRMFFYLAFIASGSLGGLIATSRLIGALANPARSGEVLEIVKGLGVDIGAASLFAFLYFNENKTKNAQMARLSREENLGKLKMRVEENNKVISVGDLRGVARLVICAGPAEFIEEAFKRSKEYTQGLVERGVVVVAYATDGNSPVLEFDETDIADEEMSQRRKKLWRVTPVFVPEWEKWLNEQKKLANVSSDSPVYLSLRLDGRVRASGVGYPPWQAFVAQLPPVKGMWTGLLDGMDGRV

SEQ ID NO: 89286 - protein, 238 aa, Arabidopsis thaliana
  peptide (1)..(238): Ceres Seq. ID no. 12717183
  misc_feature (1)..(238): Homolog of NCBI NO: 18417257 NR Description: expressed protein; protein id: At4g28740.1, by cDNA: 36080., supported by cDNA: gi_15081661, supported by
  misc_feature (1)..(238): Homolog of NCBI NO: 15081662 NR Description: AT4g28740/F16A16_150 [Arabidopsis thaliana]
  misc_feature (1)..(238): Homolog of NCBI NO: 7485530 NR Description: hypothetical protein F16A16.150 - Arabidopsis >gi|4218124|emb|CAA22978.1| hypothetical protein [Arabidopsis >gi|7269729|emb|CAB81462.1| hypothetical protein [Arabidopsis
  misc_feature (1)..(238): Homolog of NCBI NO: 32489514 NR Description: OSJNBa0043L24.5 [Oryza sativa (japonica
  misc_feature (1)..(133): Homolog of NCBI NO: 15218638 NR Description: hypothetical protein; protein id: At1g02910.1
  misc_feature (173)..(223): Homolog of NCBI NO: 15218638 NR Description: hypothetical protein; protein id: At1g02910.1
MFFYLAFIASGSLGGLIATSRLIGALANPARSGEVLEIVKGLGVDIGAASLFAFLYFNENKTKNAQMARLSREENLGKLKMRVEENNKVISVGDLRGVARLVICAGPAEFIEEAFKRSKEYTQGLVERGVVVVAYATDGNSPVLEFDETDIADEEMSQRRKKLWRVTPVFVPEWEKWLNEQKKLANVSSDSPVYLSLRLDGRVRASGVGYPPWQAFVAQLPPVKGMWTGLLDGMDGRV

SEQ ID NO: 89287 - DNA, 2748 bp, Arabidopsis thaliana
  misc_feature (1)..(2748): Ceres Seq. ID no. 12717220
  misc_feature: MA Experiment ID: 20000185 Result: Up-regulated in Transcription
  misc_feature: MA Experiment 20000185 PARAMETER Experiment Name: At_Roots__P Parameter: Age (day) Value: 7 vs. 21
  misc_feature: MA Experiment 20000185 PARAMETER Experiment Name: At_Roots__P Parameter: Organism Value: A. thaliana
  misc_feature: MA Experiment 20000185 PARAMETER Experiment Name: At_Roots__P Parameter: Tissue Value: Roots vs. Whole Plant
  misc_feature: MA Experiment ID: 20000227 Result: Up-regulated in Transcription
  misc_feature: MA Experiment 20000227 PARAMETER Experiment Name: At_Root-Tips-vs-Tops_P Parameter: Tissue Value: Root Tips vs. Root Tops
  misc_feature: MA Experiment ID: 20000439 Result: Up-regulated in Transcription
  misc_feature: MA Experiment 20000439 PARAMETER Experiment Name: At_Roots__P Parameter: Age (day) Value: 14 vs. 21
  misc_feature: MA Experiment 20000439 PARAMETER Experiment Name: At_Roots__P Parameter: Organism Value: A. thaliana
  misc_feature: MA Experiment 20000439 PARAMETER Experiment Name: At_Roots__P Parameter: Tissue Value: Roots vs. Whole Plant
  misc_feature: MA Experiment ID: 20000527 Result: Down-regulated in Transcription
  misc_feature: MA Experiment 20000527 PARAMETER Experiment Name: At_10percent_PEG_P Parameter: Age (day) Value: 20
  misc_feature: MA Experiment 20000527 PARAMETER Experiment Name: At_10percent_PEG_P Parameter: Organism Value: A. thaliana
  misc_feature: MA Experiment 20000527 PARAMETER Experiment Name: At_10percent_PEG_P Parameter: Plant Line Value: WS
  misc_feature: MA Experiment 20000527 PARAMETER Experiment Name: At_10percent_PEG_P Parameter: Timepoint (day) Value: 20
  misc_feature: MA Experiment 20000527 PARAMETER Experiment Name: At_10percent_PEG_P Parameter: Tissue Value: Whole Plant
  misc_feature: MA Experiment 20000527 PARAMETER Experiment Name: At_10percent_PEG_P Parameter: Treatment Value: 10percent PEG vs. No Treatment
atgggagctcactctgtttttctcatccttttttccgtcattgccattgccattgtagtacatggccaaggccaagcaggtttcatcagcatagattgtgggtcaccccctaatattaactatgtagacactgatactggtatcagttacacctgggatgcacctttcatcaacgctggagtaaatctgaacgtctctgaagaatacggttacccgaaaaacccggttttgcctttcccgcttgctgatgtaagatcttttcctcaaggaaacaggaactgttacaccttaaccccctccgatggaaaagggaatctttatctcatcagagcttcgtttatgtatggaaactacgatggtaaaaatgctttacctgagtttgatctctacgtaaacgtgaatttctggacctcggtgaaactcagaaatgcttctgagaacgtcatcaaggagatcctcagctttgcagagtcagatacaatatatgtttgccttgtgaacaaaggtaaaggaactccttttatttcagcgttggagcttcgaccaatgaacagctccatctatggaactgagtttggaagaaatgtctcattggtactctatcaaagatgggatacaggatatttgaatggaacaggacggtaccaaaaggatacatatgatcgtatttggtctccgtactctccagtgtcttggaatacaactatgactactgggtatatcgatatttttcagtctggttataggccaccagatgaagttattaagacagctgcttcgcctaaaagtgacgatgaaccattggaactgtcttggacatcaagcgatccagatactcggttttatgcgtacctttattttgcagaacttgaaaatctcaagaggaatgagagcagagaaatcaagatattctggaatgggtcgcctgtttcaggagcttttaacccctctcctgagtattcaatgacagtgtctaactcacgagctttcactggtaaagatcactggatttctgttcagaagaccgcagagtcaacgcgtccaccaatactcaatgctattgagattttttcagcacaatctctggatgaattttacaccagaattgacgatgttcaagccatagaaagcataaaatcaacgtataaagtgaataagatttggactggtgatccttgctctcccagactcttcccttgggaagctacaacacttctagttatcaaatcaagtccctttttgctgatgagcttgtttctgtattttgctgcgagaagaaatcttagttcaagtggattacatggaccaatagcgttcgcatttagaaatctctcccttcttgagtcattggatttatcaaacaacaacctcaaaggaattgtgccggaatttttggctgatctaaaatatctgaagtccctgaatttgaaaggaaataacttgactgggtttatcccaagatctcttaggaaaagagcaacggctaatggacttgcactcagtgtcgatgaacaaaacatttgtcactcacgttcatgtcgggacgggaacagaatcatggtgccaatagttgtatccacattagtgattattctcattgccgccttggctatcatatgcatcatgcgaagggaaagcaaaataagagcatattcaggaccacttctgccttcgggaaagagaaggttcacatatagtgaagtctctagtattacaaacaacttcaataaagtgattggtaaaggagggtttggtattgtgtaccttggttcccttgaagatggaactgaaattgctgtaaagatgatcaacgattcttcttttggaaaatctaaaggatcttcatcatcatcatcatcatcccaggtctccaaagaattccaagtcgaggcggagcttcttttgacagtccatcaccggaacttagcttcgtttgttggatactgcgatgatggtcgcagtatggctctcatctacgagtacatggccaatggcaacttgcaagattatctttcaaaggatcttagttgggaaaagagactccatatagccatagactctgcacaagggttggagtatcttcatcatggctgcaggccaccaatagtacacagagacgttaaaacagcaaacattcttttaaacgataacttggaagccaagatcgctgatttcgggctttctaaggtcttccctgaggatgatctcagccacgttgtgactgctgtcatgggcactcctggctatgtcgatcctgagtactacaacacgtttaagctaaacgagaagagcgacgtgtacagctttgggatcgtcctccttgaactcataaccggcaagagatccataatgaaaactgacgacggagaaaaaatgaacgttgttcactacgtcgagcctttcctcaaaatgggagacatagatggtgtcgtggatccacggcttcacggcgacttctcctcaaactcggcttggaaatttgtggaagtggcaatgtcttgcgtcagagacagaggaaccaacagaccaaacacaaaccagatcgtgtctgacttgaaacagtgcttagctgccgagctagctcgtgagccaaaaagcaatcatgagaagaaggaagtagtgaaagagaagtacacgaagaccaagtcgacggttcagaattatagcagcaatgaatataatagctcatctggatcggtttcactttcttttggagattactccacgtttggcccaatggcaaggtag

SEQ ID NO: 89288 - protein, 915 aa, Arabidopsis thaliana
  peptide (1)..(915): Ceres Seq. ID no. 12717221
  misc_feature (12)..(869): Homolog of NCBI NO: 2129635 NR Description: serine/threonine-specific receptor protein kinase
  misc_feature (12)..(869): Homolog of NCBI NO: 15233796 NR Description: serine threonine-specific receptor protein kinase protein id: At4g29990.1 [Arabidopsis thaliana]
  misc_feature (6)..(857): Homolog of NCBI NO: 15224738 NR Description: putative receptor-like protein kinase; protein id:
  misc_feature (1)..(862): Homolog of NCBI NO: 25387148 NR Description: probable protein kinase [imported] - Arabidopsis >gi|9802795|gb|AAF99864.1|AC015448_14 Putative protein kinase
  misc_feature (8)..(872): Homolog of NCBI NO: 15232537 NR Description: serine/threonine-specific protein kinase,
  misc_feature (8)..(856): Homolog of NCBI NO: 15224743 NR Description: putative receptor-like protein kinase; protein id:
  misc_feature (7)..(493): Homolog of NCBI NO: 25405503 NR Description: probable protein kinase [imported] - Arabidopsis >gi|9802787|gb|AAF99856.1|AC015448_6 Putative protein kinase
  misc_feature (427)..(866): Homolog of NCBI NO: 25405503 NR Description: probable protein kinase [imported] - Arabidopsis >gi|9802787|gb|AAF99856.1|AC015448_6 Putative protein kinase
  misc_feature (4)..(868): Homolog of NCBI NO: 15222042 NR Description: light repressible receptor protein kinase,
  misc_feature (80)..(859): Homolog of NCBI NO: 25387154 NR Description: protein F22G5.6 [imported] - Arabidopsis thaliana
MGAHSVFLILFSVIAIAIVVHGQGQAGFISIDCGSPPNINYVDTDTGISYTWDAPFINAGVNLNVSEEYGYPKNPVLPFPLADVRSFPQGNRNCYTLTPSDGKGNLYLIRASFMYGNYDGKNALPEFDLYVNVNFWTSVKLRNASENVIKEILSFAESDTIYVCLVNKGKGTPFISALELRPMNSSIYGTEFGRNVSLVLYQRWDTGYLNGTGRYQKDTYDRIWSPYSPVSWNTTMTTGYIDIFQSGYRPPDEVIKTAASPKSDDEPLELSWTSSDPDTRFYAYLYFAELENLKRNESREIKIFWNGSPVSGAFNPSPEYSMTVSNSRAFTGKDHWISVQKTAESTRPPILNAIEIFSAQSLDEFYTRIDDVQAIESIKSTYKVNKIWTGDPCSPRLFPWEATTLLVIKSSPFLLMSLFLYFAARRNLSSSGLHGPIAFAFRNLSLLESLDLSNNNLKGIVPEFLADLKYLKSLNLKGNNLTGFIPRSLRKRATANGLALSVDEQNICHSRSCRDGNRIMVPIVVSTLVIILIAALAIICIMRRESKIRAYSGPLLPSGKRRFTYSEVSSITNNFNKVIGKGGFGIVYLGSLEDGTEIAVKMINDSSFGKSKGSSSSSSSSQVSKEFQVEAELLLTVHHRNLASFVGYCDDGRSMALIYEYMANGNLQDYLSKDLSWEKRLHIAIDSAQGLEYLHHGCRPPIVHRDVKTANILLNDNLEAKIADFGLSKVFPEDDLSHVVTAVMGTPGYVDPEYYNTFKLNEKSDVYSFGIVLLELITGKRSIMKTDDGEKMNVVHYVEPFLKMGDIDGVVDPRLHGDFSSNSAWKFVEVAMSCVRDRGTNRPNTNQIVSDLKQCLAAELAREPKSNHEKKEVVKEKYTKTKSTVQNYSSNEYNSSSGSVSLSFGDYSTFGPMAR

SEQ ID NO: 89289 - protein, 802 aa, Arabidopsis thaliana
  peptide (1)..(802): Ceres Seq. ID no. 12717222
  misc_feature (1)..(756): Homolog of NCBI NO: 2129635 NR Description: serine/threonine-specific receptor protein kinase
  misc_feature (1)..(756): Homolog of NCBI NO: 15233796 NR Description: serine threonine-specific receptor protein kinase protein id: At4g29990.1 [Arabidopsis thaliana]
  misc_feature (1)..(744): Homolog of NCBI NO: 15224738 NR Description: putative receptor-like protein kinase; protein id:
  misc_feature (1)..(749): Homolog of NCBI NO: 25387148 NR Description: probable protein kinase [imported] - Arabidopsis >gi|9802795|gb|AAF99864.1|AC015448_14 Putative protein kinase
  misc_feature (1)..(759): Homolog of NCBI NO: 15232537 NR Description: serine/threonine-specific protein kinase,
  misc_feature (1)..(743): Homolog of NCBI NO: 15224743 NR Description: putative receptor-like protein kinase; protein id:
  misc_feature (1)..(380): Homolog of NCBI NO: 25405503 NR Description: probable protein kinase [imported] - Arabidopsis >gi|9802787|gb|AAF99856.1|AC015448_6 Putative protein kinase
  misc_feature (314)..(753): Homolog of NCBI NO: 25405503 NR Description: probable protein kinase [imported] - Arabidopsis >gi|9802787|gb|AAF99856.1|AC015448_6 Putative protein kinase
  misc_feature (1)..(755): Homolog of NCBI NO: 15222042 NR Description: light repressible receptor protein kinase,
  misc_feature (1)..(746): Homolog of NCBI NO: 25387154 NR Description: protein F22G5.6 [imported] - Arabidopsis thaliana
MYGNYDGKNALPEFDLYVNVNFWTSVKLRNASENVIKEILSFAESDTIYVCLVNKGKGTPFISALELRPMNSSIYGTEFGRNVSLVLYQRWDTGYLNGTGRYQKDTYDRIWSPYSPVSWNTTMTTGYIDIFQSGYRPPDEVIKTAASPKSDDEPLELSWTSSDPDTRFYAYLYFAELENLKRNESREIKIFWNGSPVSGAFNPSPEYSMTVSNSRAFTGKDHWISVQKTAESTRPPILNAIEIFSAQSLDEFYTRIDDVQAIESIKSTYKVNKIWTGDPCSPRLFPWEATTLLVIKSSPFLLMSLFLYFAARRNLSSSGLHGPIAFAFRNLSLLESLDLSNNNLKGIVPEFLADLKYLKSLNLKGNNLTGFIPRSLRKRATANGLALSVDEQNICHSRSCRDGNRIMVPIVVSTLVIILIAALAIICIMRRESKIRAYSGPLLPSGKRRFTYSEVSSITNNFNKVIGKGGFGIVYLGSLEDGTEIAVKMINDSSFGKSKGSSSSSSSSQVSKEFQVEAELLLTVHHRNLASFVGYCDDGRSMALIYEYMANGNLQDYLSKDLSWEKRLHIAIDSAQGLEYLHHGCRPPIVHRDVKTANILLNDNLEAKIADFGLSKVFPEDDLSHVVTAVMGTPGYVDPEYYNTFKLNEKSDVYSFGIVLLELITGKRSIMKTDDGEKMNVVHYVEPFLKMGDIDGVVDPRLHGDFSSNSAWKFVEVAMSCVRDRGTNRPNTNQIVSDLKQCLAAELAREPKSNHEKKEVVKEKYTKTKSTVQNYSSNEYNSSSGSVSLSFGDYSTFGPMAR

SEQ ID NO: 89290 - protein, 733 aa, Arabidopsis thaliana
  peptide (1)..(733): Ceres Seq. ID no. 12717223
  misc_feature (1)..(687): Homolog of NCBI NO: 2129635 NR Description: serine/threonine-specific receptor protein kinase
  misc_feature (1)..(687): Homolog of NCBI NO: 15233796 NR Description: serine threonine-specific receptor protein kinase protein id: At4g29990.1 [Arabidopsis thaliana]
  misc_feature (1)..(675): Homolog of NCBI NO: 15224738 NR Description: putative receptor-like protein kinase; protein id:
  misc_feature (1)..(680): Homolog of NCBI NO: 25387148 NR Description: probable protein kinase [imported] - Arabidopsis >gi|9802795|gb|AAF99864.1|AC015448_14 Putative protein kinase
  misc_feature (1)..(690): Homolog of NCBI NO: 15232537 NR Description: serine/threonine-specific protein kinase,
  misc_feature (1)..(674): Homolog of NCBI NO: 15224743 NR Description: putative receptor-like protein kinase; protein id:
  misc_feature (1)..(311): Homolog of NCBI NO: 25405503 NR Description: probable protein kinase [imported] - Arabidopsis >gi|9802787|gb|AAF99856.1|AC015448_6 Putative protein kinase
  misc_feature (245)..(684): Homolog of NCBI NO: 25405503 NR Description: probable protein kinase [imported] - Arabidopsis >gi|9802787|gb|AAF99856.1|AC015448_6 Putative protein kinase
  misc_feature (1)..(686): Homolog of NCBI NO: 15222042 NR Description: light repressible receptor protein kinase,
  misc_feature (1)..(677): Homolog of NCBI NO: 25387154 NR Description: protein F22G5.6 [imported] - Arabidopsis thaliana
MNSSIYGTEFGRNVSLVLYQRWDTGYLNGTGRYQKDTYDRIWSPYSPVSWNTTMTTGYIDIFQSGYRPPDEVIKTAASPKSDDEPLELSWTSSDPDTRFYAYLYFAELENLKRNESREIKIFWNGSPVSGAFNPSPEYSMTVSNSRAFTGKDHWISVQKTAESTRPPILNAIEIFSAQSLDEFYTRIDDVQAIESIKSTYKVNKIWTGDPCSPRLFPWEATTLLVIKSSPFLLMSLFLYFAARRNLSSSGLHGPIAFAFRNLSLLESLDLSNNNLKGIVPEFLADLKYLKSLNLKGNNLTGFIPRSLRKRATANGLALSVDEQNICHSRSCRDGNRIMVPIVVSTLVIILIAALAIICIMRRESKIRAYSGPLLPSGKRRFTYSEVSSITNNFNKVIGKGGFGIVYLGSLEDGTEIAVKMINDSSFGKSKGSSSSSSSSQVSKEFQVEAELLLTVHHRNLASFVGYCDDGRSMALIYEYMANGNLQDYLSKDLSWEKRLHIAIDSAQGLEYLHHGCRPPIVHRDVKTANILLNDNLEAKIADFGLSKVFPEDDLSHVVTAVMGTPGYVDPEYYNTFKLNEKSDVYSFGIVLLELITGKRSIMKTDDGEKMNVVHYVEPFLKMGDIDGVVDPRLHGDFSSNSAWKFVEVAMSCVRDRGTNRPNTNQIVSDLKQCLAAELAREPKSNHEKKEVVKEKYTKTKSTVQNYSSNEYNSSSGSVSLSFGDYSTFGPMAR

SEQ ID NO: 89291 - DNA, 1494 bp, Arabidopsis thaliana
  misc_feature (1)..(1494): Ceres Seq. ID no. 12717228
  misc_feature: MA Experiment ID: 20000184 Result: Down-regulated in Transcription
  misc_feature: MA Experiment 20000184 PARAMETER Experiment Name: At_Shoots__P Parameter: Age (day) Value: 7
  misc_feature: MA Experiment 20000184 PARAMETER Experiment Name: At_Shoots__P Parameter: Tissue Value: Shoots vs. Whole Plant
  misc_feature: MA Experiment ID: 20000264 Result: Down-regulated in Transcription
  misc_feature: MA Experiment 20000264 PARAMETER Experiment Name: At_Open_Flower_P Parameter: Age (day) Value: 21
  misc_feature: MA Experiment 20000264 PARAMETER Experiment Name: At_Open_Flower_P Parameter: Plant Line Value: WS
  misc_feature: MA Experiment 20000264 PARAMETER Experiment Name: At_Open_Flower_P Parameter: Tissue Value: Open Flower vs. Whole Plant
  misc_feature: MA Experiment ID: 20000265 Result: Down-regulated in Transcription
  misc_feature: MA Experiment 20000265 PARAMETER Experiment Name: At_Open_Flower_P Parameter: Age (day) Value: 21
  misc_feature: MA Experiment 20000265 PARAMETER Experiment Name: At_Open_Flower_P Parameter: Plant Line Value: WS
  misc_feature: MA Experiment 20000265 PARAMETER Experiment Name: At_Open_Flower_P Parameter: Tissue Value: Closed Flower vs. Whole Plant
  misc_feature: MA Experiment ID: 20000438 Result: Down-regulated in Transcription
  misc_feature: MA Experiment 20000438 PARAMETER Experiment Name: At_Shoots__P Parameter: Age (day) Value: 14
  misc_feature: MA Experiment 20000438 PARAMETER Experiment Name: At_Shoots__P Parameter: Tissue Value: Shoots vs. Whole Plant
atgaacaagagtaatcctgctggttcggtgactggttcggatataatagacgccaagatcgaagaacatcaactttgtggatccaagaagtgtcctagctgcggccacaagctcgaaggcaaaccagattgggttggtttaccagcaggagtgaaatttgacccaacggatcaagaattgatagaacatttagaagcgaaagtgttagctaaagacttcaaatctcaccctctcattgacgaattcatcccaaccattgaaggcgaagacggcatttgctacactcatcccgagaaacttcctggagtgactagagatggtttaagccgacacttctttcatagaccatcaaaggcgtacacgacgggaacaagaaagcgaagaaagattcaaacagaatgtgacaataatttgcaaggaagtagtagctccggtgagacgaggtggcataagaccggtaagacaagaccggttatggtaaacggtaagcaaaaaggttgtaagaagattttggttttgtataccaattttggtaagaatcgaaaaccggagaaaaccaattgggtaatgcatcaatatcatttggggacacatgaggaagagaaagaaggagaacttgttgtgtctaagatcttttatcaaactcagcctaggcaatgcaactggtcgtcttctacatcgagcttgaacgctataggtggtggcggcggtgaagcgagtagcggcggaggcggcggagagtatcatatgaggagagatagtgggactactagtggtgggagttgttcttcgtctagagaaattattaatgttaatcctccgaatcgatccgatgaaataggcggcgttggtggtggcgttatggccgtagcagctgcggctgcggcggttgcagctgggcttccgagttatgcaatggatcagctcagctttgttccgtttatgaaaagctttgatgaggtggcgaggagggaaactcctcagactgggcacgctacatgtgaggatgtaatggcagaacaacatcgtcatcgtcatcaaccatcatcatcaacatcacatcatatggctcatgatcatcaccatcatcatcatcaacaacaacaacaacggcatcatgcattcaacataagccagcctacacatccgatatcaaccattatttctccatctacttcgcttcaccatgcctccattaatattcttgacgataatccttatcatgttcatagaatcttgctccccaatgaaaattaccagacacaacagcaactacgtcaagaaggagaagaagaacataatgatgggaagatgggaggaaggtcagcttccggattggaagaactcataatgggctgcacttcttctaccactcatcatgatgtaaaagatgggtcatcatcaatggggaaccaacaagaagcagaatggttgaagtactcaacgttttggccagcccctgactcttctgacaaccaagatcatcatgggtaa

SEQ ID NO: 89292 - protein, 497 aa, Arabidopsis thaliana
  peptide (1)..(497): Ceres Seq. ID no. 12717229
  misc_feature (47)..(196): Pfam Name: No apical meristem (NAM) protein Pfam Description: No apical meristem (NAM) protein
  misc_feature (1)..(497): Homolog of NCBI NO: 15233497 NR Description: putative protein; protein id: At4g29230.1
  misc_feature (14)..(241): Homolog of NCBI NO: 15241889 NR Description: putative protein; protein id: At5g56620.1 thaliana] >gi|10176766|dbj|BAB09880.1|
  misc_feature (278)..(398): Homolog of NCBI NO: 15241889 NR Description: putative protein; protein id: At5g56620.1 thaliana] >gi|10176766|dbj|BAB09880.1|
  misc_feature (50)..(353): Homolog of NCBI NO: 34906416 NR Description: P0710E05.22 [Oryza sativa (japonica
  misc_feature (29)..(261): Homolog of NCBI NO: 15235314 NR Description: similar to NAM protein, putative; protein id:
  misc_feature (29)..(260): Homolog of NCBI NO: 34911014 NR Description: OJ1125_C04.12 [Oryza sativa (japonica
  misc_feature (17)..(220): Homolog of NCBI NO: 21554371 NR Description: NAM protein, putative [Arabidopsis thaliana]
  misc_feature (31)..(220): Homolog of NCBI NO: 18396807 NR Description: NAM protein, putative; protein id: At1g28470.1,
  misc_feature (43)..(220): Homolog of NCBI NO: 6560767 NR Description: F3M18.9 [Arabidopsis thaliana]
  misc_feature (28)..(219): Homolog of NCBI NO: 25518116 NR Description: hypothetical protein F2J7.1 - Arabidopsis >gi|12321499|gb|AAG50802.1|AC079281_4 hypothetical protein
MNKSNPAGSVTGSDIIDAKIEEHQLCGSKKCPSCGHKLEGKPDWVGLPAGVKFDPTDQELIEHLEAKVLAKDFKSHPLIDEFIPTIEGEDGICYTHPEKLPGVTRDGLSRHFFHRPSKAYTTGTRKRRKIQTECDNNLQGSSSSGETRWHKTGKTRPVMVNGKQKGCKKILVLYTNFGKNRKPEKTNWVMHQYHLGTHEEEKEGELVVSKIFYQTQPRQCNWSSSTSSLNAIGGGGGEASSGGGGGEYHMRRDSGTTSGGSCSSSREIINVNPPNRSDEIGGVGGGVMAVAAAAAAVAAGLPSYAMDQLSFVPFMKSFDEVARRETPQTGHATCEDVMAEQHRHRHQPSSSTSHHMAHDHHHHHHQQQQQRHHAFNISQPTHPISTIISPSTSLHHASINILDDNPYHVHRILLPNENYQTQQQLRQEGEEEHNDGKMGGRSASGLEELIMGCTSSTTHHDVKDGSSSMGNQQEAEWLKYSTFWPAPDSSDNQDHHG

SEQ ID NO: 89293 - protein, 339 aa, Arabidopsis thaliana; identical to SEQ ID NO: 71328
  peptide (1)..(339): Ceres Seq. ID no. 12717230
  misc_feature (1)..(339): Homolog of NCBI NO: 15233497 NR Description: putative protein; protein id: At4g29230.1
  misc_feature (1)..(83): Homolog of NCBI NO: 15241889 NR Description: putative protein; protein id: At5g56620.1 thaliana] >gi|10176766|dbj|BAB09880.1|
  misc_feature (120)..(240): Homolog of NCBI NO: 15241889 NR Description: putative protein; protein id: At5g56620.1 thaliana] >gi|10176766|dbj|BAB09880.1|
  misc_feature (1)..(195): Homolog of NCBI NO: 34906416 NR Description: P0710E05.22 [Oryza sativa (japonica
  misc_feature (1)..(103): Homolog of NCBI NO: 15235314 NR Description: similar to NAM protein, putative; protein id:
  misc_feature (1)..(102): Homolog of NCBI NO: 34911014 NR Description: OJ1125_C04.12 [Oryza sativa (japonica
  misc_feature (1)..(62): Homolog of NCBI NO: 21554371 NR Description: NAM protein, putative [Arabidopsis thaliana]
  misc_feature (1)..(62): Homolog of NCBI NO: 18396807 NR Description: NAM protein, putative; protein id: At1g28470.1,
  misc_feature (1)..(62): Homolog of NCBI NO: 6560767 NR Description: F3M18.9 [Arabidopsis thaliana]
  misc_feature (1)..(61): Homolog of NCBI NO: 25518116 NR Description: hypothetical protein F2J7.1 - Arabidopsis >gi|12321499|gb|AAG50802.1|AC079281_4 hypothetical protein

SEQ ID NO: 89294 - protein, 308 aa, Arabidopsis thaliana; identical to SEQ ID NO: 71329
  peptide (1)..(308): Ceres Seq. ID no. 12717231
  misc_feature (1)..(308): Homolog of NCBI NO: 15233497 NR Description: putative protein; protein id: At4g29230.1
  misc_feature (1)..(52): Homolog of NCBI NO: 15241889 NR Description: putative protein; protein id: At5g56620.1 thaliana] >gi|10176766|dbj|BAB09880.1|
  misc_feature (89)..(209): Homolog of NCBI NO: 15241889 NR Description: putative protein; protein id: At5g56620.1 thaliana] >gi|10176766|dbj|BAB09880.1|
  misc_feature (1)..(164): Homolog of NCBI NO: 34906416 NR Description: P0710E05.22 [Oryza sativa (japonica
  misc_feature (1)..(72): Homolog of NCBI NO: 15235314 NR Description: similar to NAM protein, putative; protein id:
  misc_feature (1)..(71): Homolog of NCBI NO: 34911014 NR Description: OJ1125_C04.12 [Oryza sativa (japonica
  misc_feature (1)..(31): Homolog of NCBI NO: 21554371 NR Description: NAM protein, putative [Arabidopsis thaliana]
  misc_feature (1)..(31): Homolog of NCBI NO: 18396807 NR Description: NAM protein, putative; protein id: At1g28470.1,
  misc_feature (1)..(31): Homolog of NCBI NO: 6560767 NR Description: F3M18.9 [Arabidopsis thaliana]
  misc_feature (1)..(30): Homolog of NCBI NO: 25518116 NR Description: hypothetical protein F2J7.1 - Arabidopsis >gi|12321499|gb|AAG50802.1|AC079281_4 hypothetical protein

SEQ ID NO: 89295 - DNA, 979 bp, Arabidopsis thaliana
  misc_feature (1)..(979): Ceres Seq. ID no. 12717396
  misc_feature: MA Experiment ID: 108434 Result: Down-regulated in Transcription
  misc_feature: MA Experiment 108434 PARAMETER Experiment Name: At_Root_Tips_cDNA_P Parameter: Tissue Value: Root Tips
  misc_feature: MA Experiment ID: 108462 Result: Down-regulated in Transcription
  misc_feature: MA Experiment 108462 PARAMETER Experiment Name: At_Germinating_Seeds_cDNA_P Parameter: Age (day) Value: 2 vs. 0
  misc_feature: MA Experiment 108462 PARAMETER Experiment Name: At_Germinating_Seeds_cDNA_P Parameter: Tissue Value: Germinating Seeds
  misc_feature: MA Experiment ID: 108464 Result: Down-regulated in Transcription
  misc_feature: MA Experiment 108464 PARAMETER Experiment Name: At_Germinating_Seeds_cDNA_P Parameter: Age (day) Value: 4 vs. 0
  misc_feature: MA Experiment 108464 PARAMETER Experiment Name: At_Germinating_Seeds_cDNA_P Parameter: Tissue Value: Germinating Seeds
  misc_feature: MA Experiment ID: 108574 Result: Down-regulated in Transcription
  misc_feature: MA Experiment 108574 PARAMETER Experiment Name: At_Wounding__cDNA_P Parameter: Timepoint (hr) Value: 1
  misc_feature: MA Experiment 108574 PARAMETER Experiment Name: At_Wounding__cDNA_P Parameter: Tissue Value: Aerial
  misc_feature: MA Experiment 108574 PARAMETER Experiment Name: At_Wounding__cDNA_P Parameter: Treatment Value: Wounding vs. No Wounding
  misc_feature: MA Experiment ID: 108595 Result: Down-regulated in Transcription
  misc_feature: MA Experiment 108595 PARAMETER Experiment Name: At_Ler-pi_Ovule_cDNA_P Parameter: Plant Line Value: null
  misc_feature: MA Experiment ID: 20000069 Result: Up-regulated in Transcription
  misc_feature: MA Experiment 20000069 PARAMETER Experiment Name: At_100uM_ABA_Mutants_cDNA_P Parameter: Plant Line Value: CS23
  misc_feature: MA Experiment 20000069 PARAMETER Experiment Name: At_100uM_ABA_Mutants_cDNA_P Parameter: Timepoint (hr) Value: 6
  misc_feature: MA Experiment 20000069 PARAMETER Experiment Name: At_100uM_ABA_Mutants_cDNA_P Parameter: Tissue Value: Aerial
  misc_feature: MA Experiment 20000069 PARAMETER Experiment Name: At_100uM_ABA_Mutants_cDNA_P Parameter: Treatment Value: 100uM ABA vs. No Treatment
  misc_feature: MA Experiment ID: 20000071 Result: Up-regulated in Transcription
  misc_feature: MA Experiment 20000071 PARAMETER Experiment Name: At_100uM_ABA_Mutants_cDNA_P Parameter: Plant Line Value: CS8104
  misc_feature: MA Experiment 20000071 PARAMETER Experiment Name: At_100uM_ABA_Mutants_cDNA_P Parameter: Timepoint (hr) Value: 6
  misc_feature: MA Experiment 20000071 PARAMETER Experiment Name: At_100uM_ABA_Mutants_cDNA_P Parameter: Tissue Value: Aerial
  misc_feature: MA Experiment 20000071 PARAMETER Experiment Name: At_100uM_ABA_Mutants_cDNA_P Parameter: Treatment Value: 100uM ABA vs. No Treatment
  misc_feature: MA Experiment ID: 20000072 Result: Up-regulated in Transcription
  misc_feature: MA Experiment 20000072 PARAMETER Experiment Name: At_100uM_ABA_Mutants_cDNA_P Parameter: Plant Line Value: CS8105
  misc_feature: MA Experiment 20000072 PARAMETER Experiment Name: At_100uM_ABA_Mutants_cDNA_P Parameter: Timepoint (hr) Value: 6
  misc_feature: MA Experiment 20000072 PARAMETER Experiment Name: At_100uM_ABA_Mutants_cDNA_P Parameter: Tissue Value: Aerial
  misc_feature: MA Experiment 20000072 PARAMETER Experiment Name: At_100uM_ABA_Mutants_cDNA_P Parameter: Treatment Value: 100uM ABA vs. No Treatment
  misc_feature: MA Experiment ID: 20000117 Result: Up-regulated in Transcription
  misc_feature: MA Experiment 20000117 PARAMETER Experiment Name: At_100uM_ABA_Mutants_cDNA_P Parameter: Plant Line Value: Columbia
  misc_feature: MA Experiment 20000117 PARAMETER Experiment Name: At_100uM_ABA_Mutants_cDNA_P Parameter: Timepoint (hr) Value: 6
  misc_feature: MA Experiment 20000117 PARAMETER Experiment Name: At_100uM_ABA_Mutants_cDNA_P Parameter: Tissue Value: Aerial
  misc_feature: MA Experiment 20000117 PARAMETER Experiment Name: At_100uM_ABA_Mutants_cDNA_P Parameter: Treatment Value: 100uM ABA vs. No Treatment
  misc_feature: MA Experiment ID: 20000214 Result: Down-regulated in Transcription
  misc_feature: MA Experiment 20000214 PARAMETER Experiment Name: At_4deg_Cold_P Parameter: Timepoint (hr) Value: 6
  misc_feature: MA Experiment ID: 20000224 Result: Down-regulated in Transcription
  misc_feature: MA Experiment ID: 20000234 Result: Down-regulated in Transcription
  misc_feature: MA Experiment 20000234 PARAMETER Experiment Name: At_Siliques_P Parameter: Age (day) Value: 21
  misc_feature: MA Experiment 20000234 PARAMETER Experiment Name: At_Siliques_P Parameter: Organism Value: A. thaliana
  misc_feature: MA Experiment 20000234 PARAMETER Experiment Name: At_Siliques_P Parameter: Plant Line Value: WS
  misc_feature: MA Experiment 20000234 PARAMETER Experiment Name: At_Siliques_P Parameter: Tissue Value: Less Than 5mm Siliques vs. Whole Plant
  misc_feature: MA Experiment ID: 20000265 Result: Down-regulated in Transcription
  misc_feature: MA Experiment 20000265 PARAMETER Experiment Name: At_Open_Flower_P Parameter: Age (day) Value: 21
  misc_feature: MA Experiment 20000265 PARAMETER Experiment Name: At_Open_Flower_P Parameter: Plant Line Value: WS
  misc_feature: MA Experiment 20000265 PARAMETER Experiment Name: At_Open_Flower_P Parameter: Tissue Value: Closed Flower vs. Whole Plant
  misc_feature: MA Experiment ID: 20000441 Result: Up-regulated in Transcription
  misc_feature: MA Experiment 20000441 PARAMETER Experiment Name: At_1uM_BR-BRZ__P Parameter: Tissue Value: Shoot Apices
  misc_feature: MA Experiment 20000441 PARAMETER Experiment Name: At_1uM_BR-BRZ__P Parameter: Treatment Value: 1uM BR vs. No Treatment
  misc_feature: MA Experiment ID: 20000443 Result: Up-regulated in Transcription
  misc_feature: MA Experiment 20000443 PARAMETER Experiment Name: At_1uM_BR-BRZ__P Parameter: Tissue Value: Shoot Apices
  misc_feature: MA Experiment 20000443 PARAMETER Experiment Name: At_1uM_BR-BRZ__P Parameter: Treatment Value: 1uM BRZ vs. No Treatment
  misc_feature: MA Experiment ID: 20000527 Result: Up-regulated in Transcription
  misc_feature: MA Experiment 20000527 PARAMETER Experiment Name: At_10percent_PEG_P Parameter: Age (day) Value: 20
  misc_feature: MA Experiment 20000527 PARAMETER Experiment Name: At_10percent_PEG_P Parameter: Organism Value: A. thaliana
  misc_feature: MA Experiment 20000527 PARAMETER Experiment Name: At_10percent_PEG_P Parameter: Plant Line Value: WS
  misc_feature: MA Experiment 20000527 PARAMETER Experiment Name: At_10percent_PEG_P Parameter: Timepoint (day) Value: 20
  misc_feature: MA Experiment 20000527 PARAMETER Experiment Name: At_10percent_PEG_P Parameter: Tissue Value: Whole Plant
  misc_feature: MA Experiment 20000527 PARAMETER Experiment Name: At_10percent_PEG_P Parameter: Treatment Value: 10percent PEG vs. No Treatment
  misc_feature: MA Experiment ID: 20001247 Result: Up-regulated in Transcription
  misc_feature: MA Experiment 20001247 PARAMETER Experiment Name: At_Far-red-induction_P Parameter: Age (day) Value: 7
  misc_feature: MA Experiment 20001247 PARAMETER Experiment Name: At_Far-red-induction_P Parameter: Light Value: Far-red vs. White
  misc_feature: MA Experiment 20001247 PARAMETER Experiment Name: At_Far-red-induction_P Parameter: Organism Value: A. thaliana
  misc_feature: MA Experiment 20001247 PARAMETER Experiment Name: At_Far-red-induction_P Parameter: Plant Line Value: Columbia
  misc_feature: MA Experiment 20001247 PARAMETER Experiment Name: At_Far-red-induction_P Parameter: Timepoint (hr) Value: 1
  misc_feature: MA Experiment 20001247 PARAMETER Experiment Name: At_Far-red-induction_P Parameter: Tissue Value: Whole Plant
  misc_feature: MA Experiment ID: 20001248 Result: Up-regulated in Transcription
  misc_feature: MA Experiment 20001248 PARAMETER Experiment Name: At_Far-red-induction_P Parameter: Age (day) Value: 7
  misc_feature: MA Experiment 20001248 PARAMETER Experiment Name: At_Far-red-induction_P Parameter: Light Value: Far-red vs. White
  misc_feature: MA Experiment 20001248 PARAMETER Experiment Name: At_Far-red-induction_P Parameter: Organism Value: A. thaliana
  misc_feature: MA Experiment 20001248 PARAMETER Experiment Name: At_Far-red-induction_P Parameter: Plant Line Value: Columbia
  misc_feature: MA Experiment 20001248 PARAMETER Experiment Name: At_Far-red-induction_P Parameter: Timepoint (hr) Value: 4
  misc_feature: MA Experiment 20001248 PARAMETER Experiment Name: At_Far-red-induction_P Parameter: Tissue Value: Whole Plant
  misc_feature: MA Experiment ID: 20001450 Result: Up-regulated in Transcription
  misc_feature: MA Experiment 20001450 PARAMETER Experiment Name: At_Far-red-induction_P Parameter: Age (day) Value: 7
  misc_feature: MA Experiment 20001450 PARAMETER Experiment Name: At_Far-red-induction_P Parameter: Light Value: Far-red vs. White
  misc_feature: MA Experiment 20001450 PARAMETER Experiment Name: At_Far-red-induction_P Parameter: Organism Value: A. thaliana
  misc_feature: MA Experiment 20001450 PARAMETER Experiment Name: At_Far-red-induction_P Parameter: Plant Line Value: Columbia
  misc_feature: MA Experiment 20001450 PARAMETER Experiment Name: At_Far-red-induction_P Parameter: Timepoint (hr) Value: 8
  misc_feature: MA Experiment 20001450 PARAMETER Experiment Name: At_Far-red-induction_P Parameter: Tissue Value: Whole Plant
  misc_feature: MA Experiment ID: 20001558 Result: Down-regulated in Transcription
  misc_feature: MA Experiment 20001558 PARAMETER Experiment Name: At_Drought_Soil_Dry_P Parameter: Age (day) Value: 27
  misc_feature: MA Experiment 20001558 PARAMETER Experiment Name: At_Drought_Soil_Dry_P Parameter: Organism Value: A. thaliana
  misc_feature: MA Experiment 20001558 PARAMETER Experiment Name: At_Drought_Soil_Dry_P Parameter: Plant Line Value: WS
  misc_feature: MA Experiment 20001558 PARAMETER Experiment Name: At_Drought_Soil_Dry_P Parameter: Post Timepoint (hr) Value: 6
  misc_feature: MA Experiment 20001558 PARAMETER Experiment Name: At_Drought_Soil_Dry_P Parameter: Post-Treatment Value: Re-Water vs. No Drought
  misc_feature: MA Experiment 20001558 PARAMETER Experiment Name: At_Drought_Soil_Dry_P Parameter: Timepoint (day) Value: 13
  misc_feature: MA Experiment 20001558 PARAMETER Experiment Name: At_Drought_Soil_Dry_P Parameter: Treatment Value: Drought vs. No Drought
ctctcgtcgaaagcaaaacagtctcctttctctatcttctgctcatatcagccattgacacagttgctttgggtttccctcaaacggcgccgattgtctggattttgaccactgatggccttagatcaatcttttgaagatgctgctttacttggagaactctatggagaaggtgcattttgtttcaagagcaagaaacctgaacccattacagtctcggttccttctgatgatactgatgattcgaattttgactgcaatatttgcttagactcggtgcaagaacctgttgtgactctctgtggtcacctcttttgctggccttgtattcacaaatggcttgatgtacagagcttctcaacaagtgatgaataccaaagacatagacagtgtcctgtttgtaaatctaaagtttctcattctactttggttcctttgtatggtagaggccgttgtactactcaggaggaaggtaaaaacagtgtgcctaaaagacccgtaggaccggtttatcggcttgaaatgccgaattcaccttatgcaagtactgatctgcggttatcacaacgggttcatttcaatagcccacaggaaggttactaccctgtctcaggggtgatgagctcgaacagtttatcatactctgctgttttggatccggtgatggtgatggttggagaaatggtagctacgaggttgtttggaacacgagtgatggatagatttgcgtatccggacacttacaatctcgcagggactagcgggccgaggatgagaaggcggataatgcaggcagataaatcgctgggaagaatcttcttcttctttatgtgttgtgttgttctgtgtcttctcttgttttaggttttcatagctagcttggttctgctactgttcagtttcttcaggtgtaaggaaaacatagtcaaagaaatgtacatttgtgttggaaacaaatcaaagttgcttaatgttgagg

SEQ ID NO: 89296 - protein, 249 aa, Arabidopsis thaliana; identical to SEQ ID NO: 37218
  peptide (1)..(249): Ceres Seq. ID no. 12717397
  misc_feature (48)..(96): Pfam Name: Zinc finger, C3HC4 type (RING finger) Pfam Description: Zinc finger, C3HC4 type (RING finger)
  misc_feature (1)..(249): Homolog of NCBI NO: 15236326 NR Description: E3 ubiquitin ligase, RMA1; protein id: supported by cDNA: gi_3164221 [Arabidopsis thaliana]
  misc_feature (35)..(249): Homolog of NCBI NO: 22795037 NR Description: putative RING protein [Populus x canescens]
  misc_feature (39)..(169): Homolog of NCBI NO: 15235242 NR Description: putative protein; protein id: At4g28270.1
  misc_feature (181)..(249): Homolog of NCBI NO: 15235242 NR Description: putative protein; protein id: At4g28270.1
  misc_feature (19)..(249): Homolog of NCBI NO: 30687607 NR Description: zinc finger (C3HC4-type RING finger) protein [Arabidopsis thaliana] >gi|27311647|gb|AAO00789.1| putative RING finger protein [Arabidopsis thaliana] >gi|30023720|gb|AAP13393.1|
  misc_feature (19)..(240): Homolog of NCBI NO: 7488309 NR Description: RING zinc finger protein F27G19.70 - Arabidopsis >gi|4972072|emb|CAB43879.1| putative RING zinc finger protein thaliana] >gi|7269601|emb|CAB81397.1| putative RING zinc finger
  misc_feature (46)..(249): Homolog of NCBI NO: 38346627 NR Description: OSJNBa0074L08.21 [Oryza sativa (japonica
  misc_feature (38)..(141): Homolog of NCBI NO: 18394721 NR Description: expressed protein; protein id: At1g19310.1, by cDNA: 1402., supported by cDNA: gi_16323201 [Arabidopsis
  misc_feature (28)..(144): Homolog of NCBI NO: 21912604 NR Description: putative ubiquitin ligase [Taenia solium]
  misc_feature (38)..(247): Homolog of NCBI NO: 15224062 NR Description: putative RING zinc finger protein; protein id: supported by cDNA: 17402. [Arabidopsis thaliana]

SEQ ID NO: 89297 - DNA, 876 bp, Arabidopsis thaliana
  misc_feature (1)..(876): Ceres Seq. ID no. 12717411
  misc_feature: MA Experiment ID: 20000307 Result: Up-regulated in Transcription
  misc_feature: MA Experiment 20000307 PARAMETER Experiment Name: At_Germinating_Seeds_Sub_P Parameter: Age (hr) Value: 24 vs. 0
  misc_feature: MA Experiment 20000307 PARAMETER Experiment Name: At_Germinating_Seeds_Sub_P Parameter: Organism Value: A. thaliana
  misc_feature: MA Experiment 20000307 PARAMETER Experiment Name: At_Germinating_Seeds_Sub_P Parameter: Plant Line Value: WS
  misc_feature: MA Experiment 20000307 PARAMETER Experiment Name: At_Germinating_Seeds_Sub_P Parameter: Tissue Value: Germinating Seeds
  misc_feature: MA Experiment ID: 20000314 Result: Up-regulated in Transcription
  misc_feature: MA Experiment 20000314 PARAMETER Experiment Name: At_14day_Shoots-Roots_Sub_P Parameter: Age (day) Value: 14
  misc_feature: MA Experiment 20000314 PARAMETER Experiment Name: At_14day_Shoots-Roots_Sub_P Parameter: Organism Value: A. thaliana
  misc_feature: MA Experiment 20000314 PARAMETER Experiment Name: At_14day_Shoots-Roots_Sub_P Parameter: Plant Line Value: WS
  misc_feature: MA Experiment 20000314 PARAMETER Experiment Name: At_14day_Shoots-Roots_Sub_P Parameter: Tissue Value: Roots vs. Whole Plant
atggagaagaatcaatctgatgatgatggaacggctctgatctttcttggaacaggctgctccggtgcagttcccgatttcagatgcttactccagccgtcagatcctccttgccatgtctgttctcagtccctctctttacttcctcaccttaaccctaactacagatgcaatacatcgctcttgattgattattgcagcaaggaagaagatggtagacataagtacatacttattgatgttggcaagagttttagagagcaaatcattctaactcatgagcacgcagatgcggttcatggcttagatgaaattcgatctcttcaacctcgtggtgcaactattgttgataccgatccacttcccgtctttctatctcaatttacaatggagagtattgctacaaggtttccttatttggttgaaaagaaggtaaaagaagtacctagacgagtttcacttcttgactggaaaaacatcgaagagaattgtgacgaaccattcgctgcctcgggcttatctttcacgcctcttccggtgatgcatggagaggactacattgctttaggtttcctcttcggcgataaaagtaaagtggcttatatatcagacgtatcacggattccaccgagtaccgagtatgctatttccaaagctggggctggacagttagatcttcttatcctggatacaaatataccgtggaaggctcttgagatcttaaagaggctatgtccaaagagagcgcttttaacgggtatgacacacgagtttgatcaccatgaatacaatgagatacttgcagaatggtctctaagggaaggaatccatgtacagcttgctcatgacggattacggcttccaatagacctatga

SEQ ID NO: 89298 - protein, 291 aa, Arabidopsis thaliana
  peptide (1)..(291): Ceres Seq. ID no. 12717412
  misc_feature (58)..(254): Pfam Name: Metallo-beta-lactamase superfamily Pfam Description: Metallo-beta-lactamase superfamily
  misc_feature (1)..(274): Homolog of NCBI NO: 15236346 NR Description: putative hydrolase; protein id: At4g03610.1
  misc_feature (6)..(291): Homolog of NCBI NO: 25513552 NR Description: 36.3K hypothetical protein F12P21.8 - Arabidopsis >gi|12320859|gb|AAG50569.1|AC073506_11 hypothetical protein
  misc_feature (6)..(291): Homolog of NCBI NO: 30691663 NR Description: expressed protein [Arabidopsis thaliana]
  misc_feature (6)..(291): Homolog of NCBI NO: 9294602 NR Description: hydrolase-like protein [Arabidopsis thaliana]
  misc_feature (6)..(218): Homolog of NCBI NO: 15231379 NR Description: hydrolase, putative; protein id: At3g13800.1
  misc_feature (231)..(291): Homolog of NCBI NO: 15231379 NR Description: hydrolase, putative; protein id: At3g13800.1
  misc_feature (10)..(284): Homolog of NCBI NO: 19075752 NR Description: putative hydrolase [Schizosaccharomyces pombe]
  misc_feature (238)..(291): Homolog of NCBI NO: 12322123 NR Description: hypothetical protein, 5' partial [Arabidopsis
  misc_feature (52)..(287): Homolog of NCBI NO: 27379625 NR Description: bll4514 [Bradyrhizobium japonicum]
  misc_feature (13)..(289): Homolog of NCBI NO: 22964709 NR Description: hypothetical protein [Rhodopseudomonas palustris]
MEKNQSDDDGTALIFLGTGCSGAVPDFRCLLQPSDPPCHVCSQSLSLLPHLNPNYRCNTSLLIDYCSKEEDGRHKYILIDVGKSFREQIILTHEHADAVHGLDEIRSLQPRGATIVDTDPLPVFLSQFTMESIATRFPYLVEKKVKEVPRRVSLLDWKNIEENCDEPFAASGLSFTPLPVMHGEDYIALGFLFGDKSKVAYISDVSRIPPSTEYAISKAGAGQLDLLILDTNIPWKALEILKRLCPKRALLTGMTHEFDHHEYNEILAEWSLREGIHVQLAHDGLRLPIDL

SEQ ID NO: 89299 - protein, 162 aa, Arabidopsis thaliana
  peptide (1)..(162): Ceres Seq. ID no. 12717413
  misc_feature (1)..(125): Pfam Name: Metallo-beta-lactamase superfamily Pfam Description: Metallo-beta-lactamase superfamily
  misc_feature (1)..(145): Homolog of NCBI NO: 15236346 NR Description: putative hydrolase; protein id: At4g03610.1
  misc_feature (1)..(162): Homolog of NCBI NO: 25513552 NR Description: 36.3K hypothetical protein F12P21.8 - Arabidopsis >gi|12320859|gb|AAG50569.1|AC073506_11 hypothetical protein
  misc_feature (1)..(162): Homolog of NCBI NO: 30691663 NR Description: expressed protein [Arabidopsis thaliana]
  misc_feature (1)..(162): Homolog of NCBI NO: 9294602 NR Description: hydrolase-like protein [Arabidopsis thaliana]
  misc_feature (1)..(89): Homolog of NCBI NO: 15231379 NR Description: hydrolase, putative; protein id: At3g13800.1
  misc_feature (102)..(162): Homolog of NCBI NO: 15231379 NR Description: hydrolase, putative; protein id: At3g13800.1
  misc_feature (1)..(155): Homolog of NCBI NO: 19075752 NR Description: putative hydrolase [Schizosaccharomyces pombe]
  misc_feature (109)..(162): Homolog of NCBI NO: 12322123 NR Description: hypothetical protein, 5' partial [Arabidopsis
  misc_feature (1)..(158): Homolog of NCBI NO: 27379625 NR Description: bll4514 [Bradyrhizobium japonicum]
  misc_feature (1)..(160): Homolog of NCBI NO: 22964709 NR Description: hypothetical protein [Rhodopseudomonas palustris]
MESIATRFPYLVEKKVKEVPRRVSLLDWKNIEENCDEPFAASGLSFTPLPVMHGEDYIALGFLFGDKSKVAYISDVSRIPPSTEYAISKAGAGQLDLLILDTNIPWKALEILKRLCPKRALLTGMTHEFDHHEYNEILAEWSLREGIHVQLAHDGLRLPIDL

SEQ ID NO: 89300 - DNA, 1533 bp, Arabidopsis thaliana
  misc_feature (1)..(1533): Ceres Seq. ID no. 12717542
  misc_feature: MA Experiment ID: 20000355 Result: Up-regulated in Transcription
  misc_feature: MA Experiment 20000355 PARAMETER Experiment Name: At_Siliques_Sub_P Parameter: Age (day) Value: 21
  misc_feature: MA Experiment 20000355 PARAMETER Experiment Name: At_Siliques_Sub_P Parameter: Organism Value: A. thaliana
  misc_feature: MA Experiment 20000355 PARAMETER Experiment Name: At_Siliques_Sub_P Parameter: Plant Line Value: WS
  misc_feature: MA Experiment 20000355 PARAMETER Experiment Name: At_Siliques_Sub_P Parameter: Tissue Value: Less Than 5mm Siliques vs. Whole Plant
atggtggttattggtgttagcaaagaatattgtgatgacaaacactcatgtcaaaactttttgttggagcttaagacagcttcctcgtcactctcggagattagacgtcgtgacttattgatcatcgttttgaagaattccgtgcggaagatcgacatggctatgattggtgtgatggaagatacaaaacaacatgaggagatggagaatgataagctatgtttgaaggaggacacaaatctatttgaggagatgatggagtcggcaaaagataggatgatccgttcagtggaggaactcttaggaggagaattcccttatcttggatcttacgaaaacatccacacttggctcagtggcgttcttactagctacatcacatgtatcgacgaaattggtgacggtgcctataaacgtcgggtcgagccacagcttcaagacctcatttctaaggcaaaggtagctttggctctttttatctccatttcgccgagagacaacaccgaacttaactcggtggttcccaatagcccgtcttggttatctcatgttgacaagaaagatctatatctcaatgctgaggctctaaaaaagattgccgatgttgtggtcgcgaaagatgggaccggaaagtacaacacagtgaatgcggccattgcagcagcacctcaacacagccacaagagattcatcatctatataaagacaggcatttatgatgaaatcgtcgccattgagaatacgaaacccaatttaactcttataggtgatggtcaagattcaaccatcatcacgggcaatttaagcgctagcaatgttagaagaacgttctacactgcaacttttgcttctaatggtaaaggattcatcggagtagacatgtgcttccgaaacacggtcgggccggcaaaaggaccagctgttgccctccgtgtgagtggtgatatgtccgtcatttacagatgtcgtgtcgagggatatcaggatgccttgtatcctcacatagaccgccagttttatagggagtgctttattaccggtactgtagatttcatttgtggaaacgcagcggcggtatttcaattctgccagattgtagcaagacagcctaatatggggcaaagcaatttcataaccgctcaatcacgcgagactaaggacgacaaatcgggcttctcaattcaaaactgcaacatcacagcaagttcggatctagatacagcaaccgtaaaaacgtatcttggaaggccttggaggatattttcaacagtcgcggttctgcagtctttcatcggtgatttagttgatcccgcaggctggactccttgggaaggagaaactggtctgtcaactctccactaccgcgaatatcaaaataggggtccgggagctgtgactagcagaagggtgaagtggtcgggctttaaagttatgaaagatcctaaacaggctacagaattcactgtagccaagctcttagatggagaaacttggctaaaagaaagtcgaattccatataaaagtggattgtaa

SEQ ID NO: 89301 - protein, 510 aa, Arabidopsis thaliana
  peptide (1)..(510): Ceres Seq. ID no. 12717543
  misc_feature (201)..(496): Pfam Name: Pectinesterase Pfam Description: Pectinesterase
  misc_feature (1)..(510): Homolog of NCBI NO: 22328305 NR Description: pectin methylesterase, putative; protein id:
  misc_feature (1)..(510): Homolog of NCBI NO: 7447391 NR Description: probable pectinesterase (EC 3.1.1.11) - thaliana >gi|3319371|gb|AAC28220.1| Similar to pectinesterase; [Arabidopsis thaliana] >gi|7267148|emb|CAB80816.1| putative
  misc_feature (1)..(510): Homolog of NCBI NO: 28393148 NR Description: putative pectin methylesterase [Arabidopsis >gi|28827352|gb|AAO50520.1| putative pectin methylesterase
  misc_feature (1)..(285): Homolog of NCBI NO: 6554192 NR Description: T23J18.25 [Arabidopsis thaliana]
  misc_feature (283)..(510): Homolog of NCBI NO: 6554192 NR Description: T23J18.25 [Arabidopsis thaliana]
  misc_feature (1)..(510): Homolog of NCBI NO: 30682309 NR Description: pectin methylesterase, putative [Arabidopsis
  misc_feature (46)..(510): Homolog of NCBI NO: 15232875 NR Description: pectinesterase family; protein id: At3g27980.1
  misc_feature (13)..(510): Homolog of NCBI NO: 14334992 NR Description: At1g11580/T23J18_33 [Arabidopsis thaliana]
  misc_feature (13)..(510): Homolog of NCBI NO: 15220424 NR Description: pectin methylesterase, putative; protein id:
  misc_feature (13)..(510): Homolog of NCBI NO: 6174913 NR Description: Pectinesterase 1 precursor (Pectin methylesterase
MVVIGVSKEYCDDKHSCQNFLLELKTASSSLSEIRRRDLLIIVLKNSVRKIDMAMIGVMEDTKQHEEMENDKLCLKEDTNLFEEMMESAKDRMIRSVEELLGGEFPYLGSYENIHTWLSGVLTSYITCIDEIGDGAYKRRVEPQLQDLISKAKVALALFISISPRDNTELNSVVPNSPSWLSHVDKKDLYLNAEALKKIADVVVAKDGTGKYNTVNAAIAAAPQHSHKRFIIYIKTGIYDEIVAIENTKPNLTLIGDGQDSTIITGNLSASNVRRTFYTATFASNGKGFIGVDMCFRNTVGPAKGPAVALRVSGDMSVIYRCRVEGYQDALYPHIDRQFYRECFITGTVDFICGNAAAVFQFCQIVARQPNMGQSNFITAQSRETKDDKSGFSIQNCNITASSDLDTATVKTYLGRPWRIFSTVAVLQSFIGDLVDPAGWTPWEGETGLSTLHYREYQNRGPGAVTSRRVKWSGFKVMKDPKQATEFTVAKLLDGETWLKESRIPYKSGL

SEQ ID NO: 89302 - protein, 458 aa, Arabidopsis thaliana
  peptide (1)..(458): Ceres Seq. ID no. 12717544
  misc_feature (149)..(444): Pfam Name: Pectinesterase Pfam Description: Pectinesterase
  misc_feature (1)..(458): Homolog of NCBI NO: 22328305 NR Description: pectin methylesterase, putative; protein id:
  misc_feature (1)..(458): Homolog of NCBI NO: 7447391 NR Description: probable pectinesterase (EC 3.1.1.11) - thaliana >gi|3319371|gb|AAC28220.1| Similar to pectinesterase; [Arabidopsis thaliana] >gi|7267148|emb|CAB80816.1| putative
  misc_feature (1)..(458): Homolog of NCBI NO: 28393148 NR Description: putative pectin methylesterase [Arabidopsis >gi|28827352|gb|AAO50520.1| putative pectin methylesterase
  misc_feature (1)..(233): Homolog of NCBI NO: 6554192 NR Description: T23J18.25 [Arabidopsis thaliana]
  misc_feature (231)..(458): Homolog of NCBI NO: 6554192 NR Description: T23J18.25 [Arabidopsis thaliana]
  misc_feature (1)..(458): Homolog of NCBI NO: 30682309 NR Description: pectin methylesterase, putative [Arabidopsis
  misc_feature (1)..(458): Homolog of NCBI NO: 15232875 NR Description: pectinesterase family; protein id: At3g27980.1
  misc_feature (1)..(458): Homolog of NCBI NO: 14334992 NR Description: At1g11580/T23J18_33 [Arabidopsis thaliana]
  misc_feature (1)..(458): Homolog of NCBI NO: 15220424 NR Description: pectin methylesterase, putative; protein id:
  misc_feature (1)..(458): Homolog of NCBI NO: 6174913 NR Description: Pectinesterase 1 precursor (Pectin methylesterase
MAMIGVMEDTKQHEEMENDKLCLKEDTNLFEEMMESAKDRMIRSVEELLGGEFPYLGSYENIHTWLSGVLTSYITCIDEIGDGAYKRRVEPQLQDLISKAKVALALFISISPRDNTELNSVVPNSPSWLSHVDKKDLYLNAEALKKIADVVVAKDGTGKYNTVNAAIAAAPQHSHKRFIIYIKTGIYDEIVAIENTKPNLTLIGDGQDSTIITGNLSASNVRRTFYTATFASNGKGFIGVDMCFRNTVGPAKGPAVALRVSGDMSVIYRCRVEGYQDALYPHIDRQFYRECFITGTVDFICGNAAAVFQFCQIVARQPNMGQSNFITAQSRETKDDKSGFSIQNCNITASSDLDTATVKTYLGRPWRIFSTVAVLQSFIGDLVDPAGWTPWEGETGLSTLHYREYQNRGPGAVTSRRVKWSGFKVMKDPKQATEFTVAKLLDGETWLKESRIPYKSGL

SEQ ID NO: 89303 - protein, 456 aa, Arabidopsis thaliana
  peptide (1)..(456): Ceres Seq. ID no. 12717545
  misc_feature (147)..(442): Pfam Name: Pectinesterase Pfam Description: Pectinesterase
  misc_feature (1)..(456): Homolog of NCBI NO: 22328305 NR Description: pectin methylesterase, putative; protein id:
  misc_feature (1)..(456): Homolog of NCBI NO: 7447391 NR Description: probable pectinesterase (EC 3.1.1.11) - thaliana >gi|3319371|gb|AAC28220.1| Similar to pectinesterase; [Arabidopsis thaliana] >gi|7267148|emb|CAB80816.1| putative
  misc_feature (1)..(456): Homolog of NCBI NO: 28393148 NR Description: putative pectin methylesterase [Arabidopsis >gi|28827352|gb|AAO50520.1| putative pectin methylesterase
  misc_feature (1)..(231): Homolog of NCBI NO: 6554192 NR Description: T23J18.25 [Arabidopsis thaliana]
  misc_feature (229)..(456): Homolog of NCBI NO: 6554192 NR Description: T23J18.25 [Arabidopsis thaliana]
  misc_feature (1)..(456): Homolog of NCBI NO: 30682309 NR Description: pectin methylesterase, putative [Arabidopsis
  misc_feature (1)..(456): Homolog of NCBI NO: 15232875 NR Description: pectinesterase family; protein id: At3g27980.1
  misc_feature (1)..(456): Homolog of NCBI NO: 14334992 NR Description: At1g11580/T23J18_33 [Arabidopsis thaliana]
  misc_feature (1)..(456): Homolog of NCBI NO: 15220424 NR Description: pectin methylesterase, putative; protein id:
  misc_feature (1)..(456): Homolog of NCBI NO: 6174913 NR Description: Pectinesterase 1 precursor (Pectin methylesterase
MIGVMEDTKQHEEMENDKLCLKEDTNLFEEMMESAKDRMIRSVEELLGGEFPYLGSYENIHTWLSGVLTSYITCIDEIGDGAYKRRVEPQLQDLISKAKVALALFISISPRDNTELNSVVPNSPSWLSHVDKKDLYLNAEALKKIADVVVAKDGTGKYNTVNAAIAAAPQHSHKRFIIYIKTGIYDEIVAIENTKPNLTLIGDGQDSTIITGNLSASNVRRTFYTATFASNGKGFIGVDMCFRNTVGPAKGPAVALRVSGDMSVIYRCRVEGYQDALYPHIDRQFYRECFITGTVDFICGNAAAVFQFCQIVARQPNMGQSNFITAQSRETKDDKSGFSIQNCNITASSDLDTATVKTYLGRPWRIFSTVAVLQSFIGDLVDPAGWTPWEGETGLSTLHYREYQNRGPGAVTSRRVKWSGFKVMKDPKQATEFTVAKLLDGETWLKESRIPYKSGL

SEQ ID NO: 89304 - DNA, 3426 bp, Arabidopsis thaliana
  misc_feature (1)..(3426): Ceres Seq. ID no. 12717577
  misc_feature: MA Experiment ID: 20000184 Result: Up-regulated in Transcription
  misc_feature: MA Experiment 20000184 PARAMETER Experiment Name: At_Shoots__P Parameter: Age (day) Value: 7
  misc_feature: MA Experiment 20000184 PARAMETER Experiment Name: At_Shoots__P Parameter: Tissue Value: Shoots vs. Whole Plant
atgggaagactaactaacccctccgtccaacgcctctggtctatgtttccctttttatcaaacagatgtaatctaagaggcaaagccttaggctcagacttgggaaaaggctgtttccagttcaagttcgactatgaagaggatctactgaaagtcttggataacagaccttaccattatgaccagtggatggttattttgcagcgttgggaacctattatctctgagtcattcccttgtaagatccccttctggatagagcttcaaggacttcccaaacacttttggcaacctgaaatgctaaagaccattggagaggaactaggtgaaatcttagacatggaaataacctcttctgcagccaaactcagagtccttgtggatggactccaacccctcacaaaggaaactattgtggattttcgtgatggtagtgaaactacagtcttcttggtctacaaaaacctcaaaaatcactgccaccattgcttccggctgtctcatgaaactaaactctgtcctggcttaacagagtcaagaggaaaagactctgtatctgttcaaccagctgtctcgcaagattctcgaggtggttccagaaactattacacccctaaagataacttcactgctcccagactgagtcaccacgattgtgaaagaactcattattctcaggaagtctccaacagacagcgaaattcccacccttctagtccagtgctctccaatcacttctctgctgatagagggcgcacgcagagagagaggcgcggtccactagtggaagttaccctctggcagttcctaagggtagtaagctggaactgttgtgggctggggaatcccatgacagtccagagaatcaaggaaatccgtaaaaagattttccctgacttactattcctcatggagacaaaaaattcatctgaaacggtcctccaatctctccaatggcttgattacccttctcatcatcttgtaccgccagaatctccagctgcaggaggtcttggtctcttctggaaatcaagtgtagaagtggaaattattcactcttctctgcattatattgacactaaaatcaaggcaaaaggaagaactttctactcaacttttctctatggtgaaccggatagaaccaaaagactccaaatctggaatgcccttcaagagttgagttcctctagagaaggcccttggttcattactggagatttcaatgatattgtcaatagtgctgaaaaatctggaggtcctgatcgcccagaaggctctttcacagacctgagatcctttatgtcttcttgtgatctctatgacctgaaacatacagggaatttcttatcttggcgaggcagaagacattcccatcttgtaaggtgcagattagacagggcaatggccaatagtgactggataatagcctacccttcaggacgcagtgaatacctcagatttgaaggctctgatcaccgtccgctggttacttcctttgaccatgtccagaaaaaaaccaagaatattttcagatatgaccggaccctgaaagataatcctgaaatttcaaagctgatgaatgagacctggaaatctaatcctagtgctaaagtggattatcgactacacctgtgtagggctgctctcttaaactggagtaaagaacatcatttgaacagccaaaaagagatcctatctctccgggtccaactggaagaagctctgacagatgatgctgcaacccaggattctgtggatctcctgaaccaaaatctcttgttggcttatagaaaagaagagactttctggaagcaacgaagcagaaatctctggctggctctcggggataagaattcttgtttctttcatgctgcaacaaacagtcgtcgagcaatcaatactatctctgtaattgaaaactctgcaggcactagtgtctatgaagattctgaaatcattgagaccatatcagattacttccaggatatttttacctctcaagagggagatagaacttctgtggtagctgaggcgctttctccttgcattactactgatatgaacaacacactcatctctttgccaactgttgctgagattaaacaggcgtgcctatcaattcaccctgacaaagccccgggacgtgatggcttctctgcaagttttttccaatctaattggtctacagttagcgaggaaatcactgctgaggttcaggcctttttcatctccgaaatcctgccacagaaaataaatcacacacatgtcaggctcattcccaaaatccctgcccctcaaaaagtatctgattatcgaccaattgctctctgctctgtgtactacaagatcatagctaagctattagcaaagagacttcagcctattctacattcttgtatttctgagaatcaatctgcttttgtcccccagagagcaatatctgacaatgtacttattacacatgaggctctccactacttaaaaaactcaggggctctagttaattgctacatggcagttaaaactgacatgagtaaagcctatgacagaaagaagaaagacctgttcacagccatagtggatcgtattaaacaaagagctctcagttggtcctcaaggtttttatcttctgcaggaaaactcactatgctcaaatcagtcctctcgactatgcctacttacacaatgtcgtgtttccaactcccactatctctgtgcaagcgcatccagtctacattgactcgcttctggtgggattcaaaacctgatcaaagaaaaatgagttggatctcttggcagaaaatgacattatcttttaaaagtggaggattggggtttagagatgttcaaaccttcaataaagctctccttgcaaagctctcttggcgactgctacagaacccttcatgcctgctagctaagctcctactagggaagtactgcaaacactcaacccttttggactgtaaggtttcaaattcagcttcccatggttggagaagcatctgtctaggcagagatgtcctcagtttacagcttggacgtcttattggcaatgcagatcgctgggcttggttgcctacaagctctggcctttatgcagctaattctgggtattttgaagccctcaaggagactgcctccttggaaaaccctcctaaccatgatttagtgaaaaatttcaattggagatctaacatttggggacttcaaacttcaccgaaaactaagctttacctgtgggttccaaccttctccttaggcatatctctgacacggcaaagtgcccacgatgtgagcaagcagaatcgactctccatctgttctttcactgctcctttgcacgcaggatctgggatttggctcccttctcaatcagacccaatttcgatggaatcaggtcatttaaagagggacttgtcctag

SEQ ID NO: 89305 - protein, 1141 aa, Arabidopsis thaliana
  peptide (1)..(1141): Ceres Seq. ID no. 12717578
  misc_feature (273)..(497): Pfam Name: Endonuclease/Exonuclease/phosphatase family Pfam Description: Endonuclease/Exonuclease/phosphatase family
  misc_feature (1)..(255): Homolog of NCBI NO: 15226504 NR Description: putative non-LTR retroelement reverse protein id: At2g15380.1 [Arabidopsis thaliana]
  misc_feature (468)..(713): Homolog of NCBI NO: 15226504 NR Description: putative non-LTR retroelement reverse protein id: At2g15380.1 [Arabidopsis thaliana]
  misc_feature (1007)..(1081): Homolog of NCBI NO: 15226504 NR Description: putative non-LTR retroelement reverse protein id: At2g15380.1 [Arabidopsis thaliana]
  misc_feature (802)..(870): Homolog of NCBI NO: 15226504 NR Description: putative non-LTR retroelement reverse protein id: At2g15380.1 [Arabidopsis thaliana]
  misc_feature (876)..(931): Homolog of NCBI NO: 15226504 NR Description: putative non-LTR retroelement reverse protein id: At2g15380.1 [Arabidopsis thaliana]
  misc_feature (383)..(863): Homolog of NCBI NO: 7485606 NR Description: hypothetical protein F17A8.60 - Arabidopsis
  misc_feature (848)..(1030): Homolog of NCBI NO: 7485606 NR Description: hypothetical protein F17A8.60 - Arabidopsis
  misc_feature (1021)..(1081): Homolog of NCBI NO: 7485606 NR Description: hypothetical protein F17A8.60 - Arabidopsis
  misc_feature (304)..(361): Homolog of NCBI NO: 7485606 NR Description: hypothetical protein F17A8.60 - Arabidopsis
  misc_feature (390)..(863): Homolog of NCBI NO: 15234025 NR Description: RNA-directed DNA polymerase -like protein;
MGRLTNPSVQRLWSMFPFLSNRCNLRGKALGSDLGKGCFQFKFDYEEDLLKVLDNRPYHYDQWMVILQRWEPIISESFPCKIPFWIELQGLPKHFWQPEMLKTIGEELGEILDMEITSSAAKLRVLVDGLQPLTKETIVDFRDGSETTVFLVYKNLKNHCHHCFRLSHETKLCPGLTESRGKDSVSVQPAVSQDSRGGSRNYYTPKDNFTAPRLSHHDCERTHYSQEVSNRQRNSHPSSPVLSNHFSADRGRTQRERRGPLVEVTLWQFLRVVSWNCCGLGNPMTVQRIKEIRKKIFPDLLFLMETKNSSETVLQSLQWLDYPSHHLVPPESPAAGGLGLFWKSSVEVEIIHSSLHYIDTKIKAKGRTFYSTFLYGEPDRTKRLQIWNALQELSSSREGPWFITGDFNDIVNSAEKSGGPDRPEGSFTDLRSFMSSCDLYDLKHTGNFLSWRGRRHSHLVRCRLDRAMANSDWIIAYPSGRSEYLRFEGSDHRPLVTSFDHVQKKTKNIFRYDRTLKDNPEISKLMNETWKSNPSAKVDYRLHLCRAALLNWSKEHHLNSQKEILSLRVQLEEALTDDAATQDSVDLLNQNLLLAYRKEETFWKQRSRNLWLALGDKNSCFFHAATNSRRAINTISVIENSAGTSVYEDSEIIETISDYFQDIFTSQEGDRTSVVAEALSPCITTDMNNTLISLPTVAEIKQACLSIHPDKAPGRDGFSASFFQSNWSTVSEEITAEVQAFFISEILPQKINHTHVRLIPKIPAPQKVSDYRPIALCSVYYKIIAKLLAKRLQPILHSCISENQSAFVPQRAISDNVLITHEALHYLKNSGALVNCYMAVKTDMSKAYDRKKKDLFTAIVDRIKQRALSWSSRFLSSAGKLTMLKSVLSTMPTYTMSCFQLPLSLCKRIQSTLTRFWWDSKPDQRKMSWISWQKMTLSFKSGGLGFRDVQTFNKALLAKLSWRLLQNPSCLLAKLLLGKYCKHSTLLDCKVSNSASHGWRSICLGRDVLSLQLGRLIGNADRWAWLPTSSGLYAANSGYFEALKETASLENPPNHDLVKNFNWRSNIWGLQTSPKTKLYLWVPTFSLGISLTRQSAHDVSKQNRLSICSFTAPLHAGSGIWLPSQSDPISMESGHLKRDLS

SEQ ID NO: 89306 - protein, 1127 aa, Arabidopsis thaliana
  peptide (1)..(1127): Ceres Seq. ID no. 12717579
  misc_feature (259)..(483): Pfam Name: Endonuclease/Exonuclease/phosphatase family Pfam Description: Endonuclease/Exonuclease/phosphatase family
  misc_feature (1)..(241): Homolog of NCBI NO: 15226504 NR Description: putative non-LTR retroelement reverse protein id: At2g15380.1 [Arabidopsis thaliana]
  misc_feature (454)..(699): Homolog of NCBI NO: 15226504 NR Description: putative non-LTR retroelement reverse protein id: At2g15380.1 [Arabidopsis thaliana]
  misc_feature (993)..(1067): Homolog of NCBI NO: 15226504 NR Description: putative non-LTR retroelement reverse protein id: At2g15380.1 [Arabidopsis thaliana]
  misc_feature (788)..(856): Homolog of NCBI NO: 15226504 NR Description: putative non-LTR retroelement reverse protein id: At2g15380.1 [Arabidopsis thaliana]
  misc_feature (862)..(917): Homolog of NCBI NO: 15226504 NR Description: putative non-LTR retroelement reverse protein id: At2g15380.1 [Arabidopsis thaliana]
  misc_feature (369)..(849): Homolog of NCBI NO: 7485606 NR Description: hypothetical protein F17A8.60 - Arabidopsis
  misc_feature (834)..(1016): Homolog of NCBI NO: 7485606 NR Description: hypothetical protein F17A8.60 - Arabidopsis
  misc_feature (1007)..(1067): Homolog of NCBI NO: 7485606 NR Description: hypothetical protein F17A8.60 - Arabidopsis
  misc_feature (290)..(347): Homolog of NCBI NO: 7485606 NR Description: hypothetical protein F17A8.60 - Arabidopsis
  misc_feature (376)..(849): Homolog of NCBI NO: 15234025 NR Description: RNA-directed DNA polymerase -like protein;
MFPFLSNRCNLRGKALGSDLGKGCFQFKFDYEEDLLKVLDNRPYHYDQWMVILQRWEPIISESFPCKIPFWIELQGLPKHFWQPEMLKTIGEELGEILDMEITSSAAKLRVLVDGLQPLTKETIVDFRDGSETTVFLVYKNLKNHCHHCFRLSHETKLCPGLTESRGKDSVSVQPAVSQDSRGGSRNYYTPKDNFTAPRLSHHDCERTHYSQEVSNRQRNSHPSSPVLSNHFSADRGRTQRERRGPLVEVTLWQFLRVVSWNCCGLGNPMTVQRIKEIRKKIFPDLLFLMETKNSSETVLQSLQWLDYPSHHLVPPESPAAGGLGLFWKSSVEVEIIHSSLHYIDTKIKAKGRTFYSTFLYGEPDRTKRLQIWNALQELSSSREGPWFITGDFNDIVNSAEKSGGPDRPEGSFTDLRSFMSSCDLYDLKHTGNFLSWRGRRHSHLVRCRLDRAMANSDWIIAYPSGRSEYLRFEGSDHRPLVTSFDHVQKKTKNIFRYDRTLKDNPEISKLMNETWKSNPSAKVDYRLHLCRAALLNWSKEHHLNSQKEILSLRVQLEEALTDDAATQDSVDLLNQNLLLAYRKEETFWKQRSRNLWLALGDKNSCFFHAATNSRRAINTISVIENSAGTSVYEDSEIIETISDYFQDIFTSQEGDRTSVVAEALSPCITTDMNNTLISLPTVAEIKQACLSIHPDKAPGRDGFSASFFQSNWSTVSEEITAEVQAFFISEILPQKINHTHVRLIPKIPAPQKVSDYRPIALCSVYYKIIAKLLAKRLQPILHSCISENQSAFVPQRAISDNVLITHEALHYLKNSGALVNCYMAVKTDMSKAYDRKKKDLFTAIVDRIKQRALSWSSRFLSSAGKLTMLKSVLSTMPTYTMSCFQLPLSLCKRIQSTLTRFWWDSKPDQRKMSWISWQKMTLSFKSGGLGFRDVQTFNKALLAKLSWRLLQNPSCLLAKLLLGKYCKHSTLLDCKVSNSASHGWRSICLGRDVLSLQLGRLIGNADRWAWLPTSSGLYAANSGYFEALKETASLENPPNHDLVKNFNWRSNIWGLQTSPKTKLYLWVPTFSLGISLTRQSAHDVSKQNRLSICSFTAPLHAGSGIWLPSQSDPISMESGHLKRDLS

SEQ ID NO: 89307 - protein, 1078 aa, Arabidopsis thaliana
  peptide (1)..(1078): Ceres Seq. ID no. 12717580
  misc_feature (210)..(434): Pfam Name: Endonuclease/Exonuclease/phosphatase family Pfam Description: Endonuclease/Exonuclease/phosphatase family
  misc_feature (1)..(192): Homolog of NCBI NO: 15226504 NR Description: putative non-LTR retroelement reverse protein id: At2g15380.1 [Arabidopsis thaliana]
  misc_feature (405)..(650): Homolog of NCBI NO: 15226504 NR Description: putative non-LTR retroelement reverse protein id: At2g15380.1 [Arabidopsis thaliana]
  misc_feature (944)..(1018): Homolog of NCBI NO: 15226504 NR Description: putative non-LTR retroelement reverse protein id: At2g15380.1 [Arabidopsis thaliana]
  misc_feature (739)..(807): Homolog of NCBI NO: 15226504 NR Description: putative non-LTR retroelement reverse protein id: At2g15380.1 [Arabidopsis thaliana]
  misc_feature (813)..(868): Homolog of NCBI NO: 15226504 NR Description: putative non-LTR retroelement reverse protein id: At2g15380.1 [Arabidopsis thaliana]
  misc_feature (320)..(800): Homolog of NCBI NO: 7485606 NR Description: hypothetical protein F17A8.60 - Arabidopsis
  misc_feature (785)..(967): Homolog of NCBI NO: 7485606 NR Description: hypothetical protein F17A8.60 - Arabidopsis
  misc_feature (958)..(1018): Homolog of NCBI NO: 7485606 NR Description: hypothetical protein F17A8.60 - Arabidopsis
  misc_feature (241)..(298): Homolog of NCBI NO: 7485606 NR Description: hypothetical protein F17A8.60 - Arabidopsis
  misc_feature (327)..(800): Homolog of NCBI NO: 15234025 NR Description: RNA-directed DNA polymerase -like protein;
MVILQRWEPIISESFPCKIPFWIELQGLPKHFWQPEMLKTIGEELGEILDMEITSSAAKLRVLVDGLQPLTKETIVDFRDGSETTVFLVYKNLKNHCHHCFRLSHETKLCPGLTESRGKDSVSVQPAVSQDSRGGSRNYYTPKDNFTAPRLSHHDCERTHYSQEVSNRQRNSHPSSPVLSNHFSADRGRTQRERRGPLVEVTLWQFLRVVSWNCCGLGNPMTVQRIKEIRKKIFPDLLFLMETKNSSETVLQSLQWLDYPSHHLVPPESPAAGGLGLFWKSSVEVEIIHSSLHYIDTKIKAKGRTFYSTFLYGEPDRTKRLQIWNALQELSSSREGPWFITGDFNDIVNSAEKSGGPDRPEGSFTDLRSFMSSCDLYDLKHTGNFLSWRGRRHSHLVRCRLDRAMANSDWIIAYPSGRSEYLRFEGSDHRPLVTSFDHVQKKTKNIFRYDRTLKDNPEISKLMNETWKSNPSAKVDYRLHLCRAALLNWSKEHHLNSQKEILSLRVQLEEALTDDAATQDSVDLLNQNLLLAYRKEETFWKQRSRNLWLALGDKNSCFFHAATNSRRAINTISVIENSAGTSVYEDSEIIETISDYFQDIFTSQEGDRTSVVAEALSPCITTDMNNTLISLPTVAEIKQACLSIHPDKAPGRDGFSASFFQSNWSTVSEEITAEVQAFFISEILPQKINHTHVRLIPKIPAPQKVSDYRPIALCSVYYKIIAKLLAKRLQPILHSCISENQSAFVPQRAISDNVLITHEALHYLKNSGALVNCYMAVKTDMSKAYDRKKKDLFTAIVDRIKQRALSWSSRFLSSAGKLTMLKSVLSTMPTYTMSCFQLPLSLCKRIQSTLTRFWWDSKPDQRKMSWISWQKMTLSFKSGGLGFRDVQTFNKALLAKLSWRLLQNPSCLLAKLLLGKYCKHSTLLDCKVSNSASHGWRSICLGRDVLSLQLGRLIGNADRWAWLPTSSGLYAANSGYFEALKETASLENPPNHDLVKNFNWRSNIWGLQTSPKTKLYLWVPTFSLGISLTRQSAHDVSKQNRLSICSFTAPLHAGSGIWLPSQSDPISMESGHLKRDLS

SEQ ID NO: 89308 - DNA, 2607 bp, Arabidopsis thaliana
  misc_feature (1)..(2607): Ceres Seq. ID no. 12717677
  misc_feature: MA Experiment ID: 20000315 Result: Down-regulated in Transcription
  misc_feature: MA Experiment 20000315 PARAMETER Experiment Name: At_14day_Shoots-Roots_Sub_P Parameter: Age (day) Value: 14
  misc_feature: MA Experiment 20000315 PARAMETER Experiment Name: At_14day_Shoots-Roots_Sub_P Parameter: Organism Value: A. thaliana
  misc_feature: MA Experiment 20000315 PARAMETER Experiment Name: At_14day_Shoots-Roots_Sub_P Parameter: Plant Line Value: WS
  misc_feature: MA Experiment 20000315 PARAMETER Experiment Name: At_14day_Shoots-Roots_Sub_P Parameter: Tissue Value: Shoots vs. Whole Plant
  misc_feature: MA Experiment ID: 20000327 Result: Down-regulated in Transcription
  misc_feature: MA Experiment 20000327 PARAMETER Experiment Name: At_42deg_Heat_Sub_P Parameter: Age (day) Value: 14
  misc_feature: MA Experiment 20000327 PARAMETER Experiment Name: At_42deg_Heat_Sub_P Parameter: Organism Value: A. thaliana
  misc_feature: MA Experiment 20000327 PARAMETER Experiment Name: At_42deg_Heat_Sub_P Parameter: Plant Line Value: WS
  misc_feature: MA Experiment 20000327 PARAMETER Experiment Name: At_42deg_Heat_Sub_P Parameter: Temperature (deg C) Value: 42 vs. 22
  misc_feature: MA Experiment 20000327 PARAMETER Experiment Name: At_42deg_Heat_Sub_P Parameter: Timepoint (hr) Value: 1
  misc_feature: MA Experiment 20000327 PARAMETER Experiment Name: At_42deg_Heat_Sub_P Parameter: Tissue Value: Aerial
  misc_feature: MA Experiment ID: 20000328 Result: Down-regulated in Transcription
  misc_feature: MA Experiment 20000328 PARAMETER Experiment Name: At_42deg_Heat_Sub_P Parameter: Age (day) Value: 14
  misc_feature: MA Experiment 20000328 PARAMETER Experiment Name: At_42deg_Heat_Sub_P Parameter: Organism Value: A. thaliana
  misc_feature: MA Experiment 20000328 PARAMETER Experiment Name: At_42deg_Heat_Sub_P Parameter: Plant Line Value: WS
  misc_feature: MA Experiment 20000328 PARAMETER Experiment Name: At_42deg_Heat_Sub_P Parameter: Temperature (deg C) Value: 42 vs. 22
  misc_feature: MA Experiment 20000328 PARAMETER Experiment Name: At_42deg_Heat_Sub_P Parameter: Timepoint (hr) Value: 6
  misc_feature: MA Experiment 20000328 PARAMETER Experiment Name: At_42deg_Heat_Sub_P Parameter: Tissue Value: Aerial
  misc_feature: MA Experiment ID: 20000440 Result: Up-regulated in Transcription
  misc_feature: MA Experiment 20000440 PARAMETER Experiment Name: At_Closed-Flower__Sub_P Parameter: Tissue Value: Closed Flower vs. Whole Plant
atgatcagaacttcgtctgtgttgaactccaccaagtacttcaactctcacattaaccatttatcatctcatggcgatcacaagcaagttctctcaacattctcttccatgctcgccaataaactcttacctgatacttttactttccctagtcttctcaaagcttgtgcttctcttcagcgcctctcttttggtctctcgattcaccagcaggttctcgttaatgggttctcttcagatttctacatatcatcttcattggtcaatctttatgcgaaatttggactcttggctcatgctcggaaagtgttcgaggaaatgcgtgagagagatgtggtgcactggactgcgatgattgggtgttactcacgcgctggaattgttggagaagcttgttcgttggtgaacgagatgagatttcaggggatcaaaccgggtccggttacgttgttggaaatgttgagtggggttttagagattacgcagttacagtgtttacatgactttgctgtgatttatggttttgattgtgatatagctgtgatgaactctatgttgaatttgtattgcaagtgtgatcatgttggagatgctaaggatttatttgatcagatggagcaacgagatatggtttcatggaacacaatgatttcagggtatgcttctgttggtaatatgtctgaaatcttgaagcttttgtacagaatgagaggtgatggtttaagacctgatcagcagacatttggagcatcactttcagtgagtggaacaatgtgtgatcttgaaatgggaagaatgttgcactgccaaattgtaaaaactggttttgatgtagatatgcatctcaagacggcattgataacaatgtacttgaagtgtggaaaggaggaagcttcatatcgggtactcgaaacgattcccaataaggatgttgtttgctggacagtcatgatatcaggacttatgcggttgggtagagcagaaaaggcactgattgttttctcggaaatgttacaatcaggatcagacctgtcgagtgaagcaatagctagtgttgtagcatcttgtgctcaattgggttcctttgatcttggcgcttcagtccatggctatgtactgaggcatggatatacactagacactcctgcgttgaactctttgatcacaatgtatgcaaagtgcggtcatttggataaaagtttagttatctttgaacggatgaatgaaagagacttagtttcgtggaatgcgattatctccggatatgcccagaacgtagatctgtgtaaggccttgttattgtttgaagaaatgaagttcaaaaccgtgcaacaagttgattcatttactgttgtctcacttttacaagcctgttcatctgctggagctctccctgtagggaaactgatccactgtattgtaatcagaagctttatcaggccatgttccttggttgatacagctctagttgatatgtattcgaaatgtggctacttagaagctgcacagaggtgtttcgattcgatctcgtggaaagatgttgtttcatggggcatactcattgcagggtatggttttcatggtaaaggggatattgctttggaaatttactcagagtttcttcactctggaatggagccgaaccacgtgatatttcttgcagttctctcatcttgcagccataatggaatggttcaacaaggtttgaaaatattcagttcaatggtcagagattttggtgttgaaccgaatcacgaacaccttgcttgtgtggttgatcttctatgtagagctaaaagaatagaagacgcattcaagttctacaaagagaactttaccagaccttcgattgatgtcttgggtataatactcgatgcttgccgtgcaaatgggaaaacagaggtcgaagatataatttgtgaggatatgatcgagttgaagccaggggacgctggacattacgtaaaactaggacattcttttgctgcgatgaagagatgggacgatgtgagtgaatcatggaatcagatgaggtctctcggcttgaaaaagctcccgggatggagcaaaatcgagatgaacgggaaaaccacaacatttttcatgaatcatacatcacattcagatgatacagtgtctctattaaaacttcttagcagggaaatgatgcagtttggaccgtctctgtattggcatctcaatgagaccattgcagattctctccactcctcttgtcctccttgtgtatgtgattgttcttctcagcctctcctctccattcccgacgattgcatgaggcacgaggaagggagtgaagagagcgagagtagttttactgaaatggtagctgaagagctgaagctaagagaagcacaagctcaagaagacgaatggcgtgcagataggttgctgctagatgctaagaaagcggcgtctcagtatcagaaagaggctgataaatgcagtatggggatggaaacatgtgagctagcaagagagaaagcagaagcagctctagatgaacagagaagactttcttacatgtgggagcttcgagctcggcaaggaggatggaaagaaggaactgttgcttctgatgttatctaa

SEQ ID NO: 89309 - protein, 868 aa, Arabidopsis thaliana
  peptide (1)..(868): Ceres Seq. ID no. 12717678
  misc_feature (763)..(868): Pfam Name: Protein of unknown function (DUF1068) Pfam Description: Protein of unknown function (DUF1068)
  misc_feature (14)..(726): Homolog of NCBI NO: 34897084 NR Description: hypothetical protein [Oryza sativa (japonica group)] >gi|12957718|gb|AAK09236.1| hypothetical protein [Oryza
  misc_feature (1)..(718): Homolog of NCBI NO: 15228590 NR Description: hypothetical protein; protein id: At3g03580.1 thaliana] >gi|6091764|gb|AAF03474.1|AC009327_13 hypothetical [Arabidopsis thaliana] >gi|28393735|gb|AAO42278.1| unknown
  misc_feature (18)..(726): Homolog of NCBI NO: 15236324 NR Description: putative protein; protein id: At4g13650.1
  misc_feature (5)..(707): Homolog of NCBI NO: 15218216 NR Description: hypothetical protein; protein id: At1g15510.1
  misc_feature (9)..(734): Homolog of NCBI NO: 15233590 NR Description: putative protein; protein id: At4g21300.1
  misc_feature (8)..(691): Homolog of NCBI NO: 15221304 NR Description: hypothetical protein; protein id: At1g74600.1
  misc_feature (40)..(709): Homolog of NCBI NO: 15220337 NR Description: hypothetical protein; protein id: At1g11290.1
  misc_feature (14)..(726): Homolog of NCBI NO: 34903762 NR Description: unnamed protein product [Oryza sativa (japonica group)] >gi|7340873|dbj|BAA92963.1| unnamed protein product
  misc_feature (47)..(700): Homolog of NCBI NO: 18409250 NR Description: PPR-repeat protein, putative; protein id: [Arabidopsis thaliana] >gi|12325094|gb|AAG52503.1|AC018364_21
  misc_feature (14)..(695): Homolog of NCBI NO: 38567725 NR Description: B1358B12.23 [Oryza sativa (japonica
MIRTSSVLNSTKYFNSHINHLSSHGDHKQVLSTFSSMLANKLLPDTFTFPSLLKACASLQRLSFGLSIHQQVLVNGFSSDFYISSSLVNLYAKFGLLAHARKVFEEMRERDVVHWTAMIGCYSRAGIVGEACSLVNEMRFQGIKPGPVTLLEMLSGVLEITQLQCLHDFAVIYGFDCDIAVMNSMLNLYCKCDHVGDAKDLFDQMEQRDMVSWNTMISGYASVGNMSEILKLLYRMRGDGLRPDQQTFGASLSVSGTMCDLEMGRMLHCQIVKTGFDVDMHLKTALITMYLKCGKEEASYRVLETIPNKDVVCWTVMISGLMRLGRAEKALIVFSEMLQSGSDLSSEAIASVVASCAQLGSFDLGASVHGYVLRHGYTLDTPALNSLITMYAKCGHLDKSLVIFERMNERDLVSWNAIISGYAQNVDLCKALLLFEEMKFKTVQQVDSFTVVSLLQACSSAGALPVGKLIHCIVIRSFIRPCSLVDTALVDMYSKCGYLEAAQRCFDSISWKDVVSWGILIAGYGFHGKGDIALEIYSEFLHSGMEPNHVIFLAVLSSCSHNGMVQQGLKIFSSMVRDFGVEPNHEHLACVVDLLCRAKRIEDAFKFYKENFTRPSIDVLGIILDACRANGKTEVEDIICEDMIELKPGDAGHYVKLGHSFAAMKRWDDVSESWNQMRSLGLKKLPGWSKIEMNGKTTTFFMNHTSHSDDTVSLLKLLSREMMQFGPSLYWHLNETIADSLHSSCPPCVCDCSSQPLLSIPDDCMRHEEGSEESESSFTEMVAEELKLREAQAQEDEWRADRLLLDAKKAASQYQKEADKCSMGMETCELAREKAEAALDEQRRLSYMWELRARQGGWKEGTVASDVI

SEQ ID NO: 89310 - protein, 832 aa, Arabidopsis thaliana
  peptide (1)..(832): Ceres Seq. ID no. 12717679
  misc_feature (727)..(832): Pfam Name: Protein of unknown function (DUF1068) Pfam Description: Protein of unknown function (DUF1068)
  misc_feature (1)..(690): Homolog of NCBI NO: 34897084 NR Description: hypothetical protein [Oryza sativa (japonica group)] >gi|12957718|gb|AAK09236.1| hypothetical protein [Oryza
  misc_feature (1)..(682): Homolog of NCBI NO: 15228590 NR Description: hypothetical protein; protein id: At3g03580.1 thaliana] >gi|6091764|gb|AAF03474.1|AC009327_13 hypothetical [Arabidopsis thaliana] >gi|28393735|gb|AAO42278.1| unknown
  misc_feature (1)..(690): Homolog of NCBI NO: 15236324 NR Description: putative protein; protein id: At4g13650.1
  misc_feature (1)..(671): Homolog of NCBI NO: 15218216 NR Description: hypothetical protein; protein id: At1g15510.1
  misc_feature (1)..(698): Homolog of NCBI NO: 15233590 NR Description: putative protein; protein id: At4g21300.1
  misc_feature (1)..(655): Homolog of NCBI NO: 15221304 NR Description: hypothetical protein; protein id: At1g74600.1
  misc_feature (4)..(673): Homolog of NCBI NO: 15220337 NR Description: hypothetical protein; protein id: At1g11290.1
  misc_feature (1)..(690): Homolog of NCBI NO: 34903762 NR Description: unnamed protein product [Oryza sativa (japonica group)] >gi|7340873|dbj|BAA92963.1| unnamed protein product
  misc_feature (11)..(664): Homolog of NCBI NO: 18409250 NR Description: PPR-repeat protein, putative; protein id: [Arabidopsis thaliana] >gi|12325094|gb|AAG52503.1|AC018364_21
  misc_feature (1)..(659): Homolog of NCBI NO: 38567725 NR Description: B1358B12.23 [Oryza sativa (japonica
MLANKLLPDTFTFPSLLKACASLQRLSFGLSIHQQVLVNGFSSDFYISSSLVNLYAKFGLLAHARKVFEEMRERDVVHWTAMIGCYSRAGIVGEACSLVNEMRFQGIKPGPVTLLEMLSGVLEITQLQCLHDFAVIYGFDCDIAVMNSMLNLYCKCDHVGDAKDLFDQMEQRDMVSWNTMISGYASVGNMSEILKLLYRMRGDGLRPDQQTFGASLSVSGTMCDLEMGRMLHCQIVKTGFDVDMHLKTALITMYLKCGKEEASYRVLETIPNKDVVCWTVMISGLMRLGRAEKALIVFSEMLQSGSDLSSEAIASVVASCAQLGSFDLGASVHGYVLRHGYTLDTPALNSLITMYAKCGHLDKSLVIFERMNERDLVSWNAIISGYAQNVDLCKALLLFEEMKFKTVQQVDSFTVVSLLQACSSAGALPVGKLIHCIVIRSFIRPCSLVDTALVDMYSKCGYLEAAQRCFDSISWKDVVSWGILIAGYGFHGKGDIALEIYSEFLHSGMEPNHVIFLAVLSSCSHNGMVQQGLKIFSSMVRDFGVEPNHEHLACVVDLLCRAKRIEDAFKFYKENFTRPSIDVLGIILDACRANGKTEVEDIICEDMIELKPGDAGHYVKLGHSFAAMKRWDDVSESWNQMRSLGLKKLPGWSKIEMNGKTTTFFMNHTSHSDDTVSLLKLLSREMMQFGPSLYWHLNETIADSLHSSCPPCVCDCSSQPLLSIPDDCMRHEEGSEESESSFTEMVAEELKLREAQAQEDEWRADRLLLDAKKAASQYQKEADKCSMGMETCELAREKAEAALDEQRRLSYMWELRARQGGWKEGTVASDVI

SEQ ID NO: 89311 - protein, 762 aa, Arabidopsis thaliana
  peptide (1)..(762): Ceres Seq. ID no. 12717680
  misc_feature (657)..(762): Pfam Name: Protein of unknown function (DUF1068) Pfam Description: Protein of unknown function (DUF1068)
  misc_feature (1)..(620): Homolog of NCBI NO: 34897084 NR Description: hypothetical protein [Oryza sativa (japonica group)] >gi|12957718|gb|AAK09236.1| hypothetical protein [Oryza
  misc_feature (1)..(612): Homolog of NCBI NO: 15228590 NR Description: hypothetical protein; protein id: At3g03580.1 thaliana] >gi|6091764|gb|AAF03474.1|AC009327_13 hypothetical [Arabidopsis thaliana] >gi|28393735|gb|AAO42278.1| unknown
  misc_feature (1)..(620): Homolog of NCBI NO: 15236324 NR Description: putative protein; protein id: At4g13650.1
  misc_feature (1)..(601): Homolog of NCBI NO: 15218216 NR Description: hypothetical protein; protein id: At1g15510.1
  misc_feature (1)..(628): Homolog of NCBI NO: 15233590 NR Description: putative protein; protein id: At4g21300.1
  misc_feature (1)..(585): Homolog of NCBI NO: 15221304 NR Description: hypothetical protein; protein id: At1g74600.1
  misc_feature (1)..(603): Homolog of NCBI NO: 15220337 NR Description: hypothetical protein; protein id: At1g11290.1
  misc_feature (1)..(620): Homolog of NCBI NO: 34903762 NR Description: unnamed protein product [Oryza sativa (japonica group)] >gi|7340873|dbj|BAA92963.1| unnamed protein product
  misc_feature (1)..(594): Homolog of NCBI NO: 18409250 NR Description: PPR-repeat protein, putative; protein id: [Arabidopsis thaliana] >gi|12325094|gb|AAG52503.1|AC018364_21
  misc_feature (1)..(589): Homolog of NCBI NO: 38567725 NR Description: B1358B12.23 [Oryza sativa (japonica
MRERDVVHWTAMIGCYSRAGIVGEACSLVNEMRFQGIKPGPVTLLEMLSGVLEITQLQCLHDFAVIYGFDCDIAVMNSMLNLYCKCDHVGDAKDLFDQMEQRDMVSWNTMISGYASVGNMSEILKLLYRMRGDGLRPDQQTFGASLSVSGTMCDLEMGRMLHCQIVKTGFDVDMHLKTALITMYLKCGKEEASYRVLETIPNKDVVCWTVMISGLMRLGRAEKALIVFSEMLQSGSDLSSEAIASVVASCAQLGSFDLGASVHGYVLRHGYTLDTPALNSLITMYAKCGHLDKSLVIFERMNERDLVSWNAIISGYAQNVDLCKALLLFEEMKFKTVQQVDSFTVVSLLQACSSAGALPVGKLIHCIVIRSFIRPCSLVDTALVDMYSKCGYLEAAQRCFDSISWKDVVSWGILIAGYGFHGKGDIALEIYSEFLHSGMEPNHVIFLAVLSSCSHNGMVQQGLKIFSSMVRDFGVEPNHEHLACVVDLLCRAKRIEDAFKFYKENFTRPSIDVLGIILDACRANGKTEVEDIICEDMIELKPGDAGHYVKLGHSFAAMKRWDDVSESWNQMRSLGLKKLPGWSKIEMNGKTTTFFMNHTSHSDDTVSLLKLLSREMMQFGPSLYWHLNETIADSLHSSCPPCVCDCSSQPLLSIPDDCMRHEEGSEESESSFTEMVAEELKLREAQAQEDEWRADRLLLDAKKAASQYQKEADKCSMGMETCELAREKAEAALDEQRRLSYMWELRARQGGWKEGTVASDVI

SEQ ID NO: 89312 - DNA, 801 bp, Arabidopsis thaliana
  misc_feature (1)..(801): Ceres Seq. ID no. 12717834
  misc_feature: MA Experiment ID: 20000264 Result: Down-regulated in Transcription
  misc_feature: MA Experiment 20000264 PARAMETER Experiment Name: At_Open_Flower_P Parameter: Age (day) Value: 21
  misc_feature: MA Experiment 20000264 PARAMETER Experiment Name: At_Open_Flower_P Parameter: Plant Line Value: WS
  misc_feature: MA Experiment 20000264 PARAMETER Experiment Name: At_Open_Flower_P Parameter: Tissue Value: Open Flower vs. Whole Plant
  misc_feature: MA Experiment ID: 20000286 Result: Down-regulated in Transcription
  misc_feature: MA Experiment 20000286 PARAMETER Experiment Name: At_Open_Flower_P Parameter: Age (day) Value: 21
  misc_feature: MA Experiment 20000286 PARAMETER Experiment Name: At_Open_Flower_P Parameter: Plant Line Value: WS
  misc_feature: MA Experiment 20000286 PARAMETER Experiment Name: At_Open_Flower_P Parameter: Tissue Value: Half Open vs. Whole Plant
atggatcccaagaacctaaatcgtcaccaagtaccaaatttcttgaacccaccaccaccaccgcgaaatcagggtttggtagatgatgatgctgcttctgctgttgtttccgacgagaatcgcaaaccaacaactgagattaaagatttccagatcgtggtctctgcttccgacaaagaaccaaacaagaagagtcagaatcagaaccagcttggtcctaagagaagctctaacaaagacagacacactaaagtcgaaggtagaggtcgacgaattcggatgcctgctctttgtgctgctaggatttttcaattgactagagaattgggtcataaatctgatggtgaaactatccagtggctgcttcaacaagctgagccatcgattattgcagctactggttcaggaactataccggcctctgctttagcttcttcagctgcaacctctaaccatcatcaagctgggtttggttctggtgtgccaaccactggtttaatgagtgaaggagctggttatagaattgggtttcctggttttgattttcctggtgttggtcatatgagttttgcatctattttgggtgggaatcataatcagatgcctggacttgagttaggcttgtctcaagaagggaatgttggtgttttgaatcctcagtcttttactcagatttatcaacagatgggtcaggctcaggctcaagctcaaggtagggttcttcaccatatgcatcataaccatgaagaacatcagcaagagagtggtgagaaagatgattctcaaggctcaggtcgttaa

SEQ ID NO: 89313 - protein, 266 aa, Arabidopsis thaliana
  peptide (1)..(266): Ceres Seq. ID no. 12717835
  misc_feature (62)..(156): Pfam Name: TCP family transcription factor Pfam Description: TCP family transcription factor
  misc_feature (1)..(156): Homolog of NCBI NO: 15232059 NR Description: unknown protein; protein id: At3g27010.1 thaliana] >gi|9279624|dbj|BAB01082.1| gene_id:MOJ10.8~unknown [Arabidopsis thaliana] >gi|11595501|emb|CAC18326.1| putative
  misc_feature (155)..(266): Homolog of NCBI NO: 15232059 NR Description: unknown protein; protein id: At3g27010.1 thaliana] >gi|9279624|dbj|BAB01082.1| gene_id:MOJ10.8~unknown [Arabidopsis thaliana] >gi|11595501|emb|CAC18326.1| putative
  misc_feature (1)..(261): Homolog of NCBI NO: 15237545 NR Description: putative protein; protein id: At5g41030.1 thaliana] >gi|9759149|dbj|BAB09705.1|
  misc_feature (44)..(141): Homolog of NCBI NO: 18409345 NR Description: expressed protein; protein id: At1g69690.1, by cDNA: gi_15912212, supported by cDNA: gi_19547990 [Arabidopsis
  misc_feature (73)..(256): Homolog of NCBI NO: 5731257 NR Description: auxin-induced basic helix-loop-helix
  misc_feature (74)..(265): Homolog of NCBI NO: 11357581 NR Description: hypothetical protein F1P2.170 - Arabidopsis >gi|6522545|emb|CAB61988.1| putative protein [Arabidopsis
  misc_feature (74)..(265): Homolog of NCBI NO: 22331641 NR Description: putative protein; protein id: At3g47620.1, by cDNA: gi_16604510 [Arabidopsis thaliana] AT3g47620/F1P2_170 [Arabidopsis thaliana]
  misc_feature (72)..(155): Homolog of NCBI NO: 20975251 NR Description: transcription factor PCF3 [Oryza sativa (japonica
  misc_feature (63)..(196): Homolog of NCBI NO: 15241596 NR Description: putative protein; protein id: At5g08330.1, by cDNA: gi_15724267, supported by cDNA: gi_18252260 [Arabidopsis >gi|10178275|emb|CAC08333.1| putative protein [Arabidopsis
  misc_feature (74)..(201): Homolog of NCBI NO: 15217857 NR Description: auxin-induced basic helix-loop-helix factor, putative; protein id: At1g58100.1, supported by cDNA:
MDPKNLNRHQVPNFLNPPPPPRNQGLVDDDAASAVVSDENRKPTTEIKDFQIVVSASDKEPNKKSQNQNQLGPKRSSNKDRHTKVEGRGRRIRMPALCAARIFQLTRELGHKSDGETIQWLLQQAEPSIIAATGSGTIPASALASSAATSNHHQAGFGSGVPTTGLMSEGAGYRIGFPGFDFPGVGHMSFASILGGNHNQMPGLELGLSQEGNVGVLNPQSFTQIYQQMGQAQAQAQGRVLHHMHHNHEEHQQESGEKDDSQGSGR

SEQ ID NO: 89314 - protein, 173 aa, Arabidopsis thaliana
  peptide (1)..(173): Ceres Seq. ID no. 12717836
  misc_feature (1)..(63): Pfam Name: TCP family transcription factor Pfam Description: TCP family transcription factor
  misc_feature (1)..(63): Homolog of NCBI NO: 15232059 NR Description: unknown protein; protein id: At3g27010.1 thaliana] >gi|9279624|dbj|BAB01082.1| gene_id:MOJ10.8~unknown [Arabidopsis thaliana] >gi|11595501|emb|CAC18326.1| putative
  misc_feature (62)..(173): Homolog of NCBI NO: 15232059 NR Description: unknown protein; protein id: At3g27010.1 thaliana] >gi|9279624|dbj|BAB01082.1| gene_id:MOJ10.8~unknown [Arabidopsis thaliana] >gi|11595501|emb|CAC18326.1| putative
  misc_feature (1)..(168): Homolog of NCBI NO: 15237545 NR Description: putative protein; protein id: At5g41030.1 thaliana] >gi|9759149|dbj|BAB09705.1|
  misc_feature (1)..(48): Homolog of NCBI NO: 18409345 NR Description: expressed protein; protein id: At1g69690.1, by cDNA: gi_15912212, supported by cDNA: gi_19547990 [Arabidopsis
  misc_feature (1)..(163): Homolog of NCBI NO: 5731257 NR Description: auxin-induced basic helix-loop-helix
  misc_feature (1)..(172): Homolog of NCBI NO: 11357581 NR Description: hypothetical protein F1P2.170 - Arabidopsis >gi|6522545|emb|CAB61988.1| putative protein [Arabidopsis
  misc_feature (1)..(172): Homolog of NCBI NO: 22331641 NR Description: putative protein; protein id: At3g47620.1, by cDNA: gi_16604510 [Arabidopsis thaliana] AT3g47620/F1P2_170 [Arabidopsis thaliana]
  misc_feature (1)..(62): Homolog of NCBI NO: 20975251 NR Description: transcription factor PCF3 [Oryza sativa (japonica
  misc_feature (1)..(103): Homolog of NCBI NO: 15241596 NR Description: putative protein; protein id: At5g08330.1, by cDNA: gi_15724267, supported by cDNA: gi_18252260 [Arabidopsis >gi|10178275|emb|CAC08333.1| putative protein [Arabidopsis
  misc_feature (1)..(108): Homolog of NCBI NO: 15217857 NR Description: auxin-induced basic helix-loop-helix factor, putative; protein id: At1g58100.1, supported by cDNA:
MPALCAARIFQLTRELGHKSDGETIQWLLQQAEPSIIAATGSGTIPASALASSAATSNHHQAGFGSGVPTTGLMSEGAGYRIGFPGFDFPGVGHMSFASILGGNHNQMPGLELGLSQEGNVGVLNPQSFTQIYQQMGQAQAQAQGRVLHHMHHNHEEHQQESGEKDDSQGSGR

SEQ ID NO: 89315 - DNA, 702 bp, Arabidopsis thaliana
  misc_feature (1)..(702): Ceres Seq. ID no. 12717867
  misc_feature: MA Experiment ID: 20000307 Result: Up-regulated in Transcription
  misc_feature: MA Experiment 20000307 PARAMETER Experiment Name: At_Germinating_Seeds_Sub_P Parameter: Age (hr) Value: 24 vs. 0
  misc_feature: MA Experiment 20000307 PARAMETER Experiment Name: At_Germinating_Seeds_Sub_P Parameter: Organism Value: A. thaliana
  misc_feature: MA Experiment 20000307 PARAMETER Experiment Name: At_Germinating_Seeds_Sub_P Parameter: Plant Line Value: WS
  misc_feature: MA Experiment 20000307 PARAMETER Experiment Name: At_Germinating_Seeds_Sub_P Parameter: Tissue Value: Germinating Seeds
  misc_feature: MA Experiment ID: 20000314 Result: Down-regulated in Transcription
  misc_feature: MA Experiment 20000314 PARAMETER Experiment Name: At_14day_Shoots-Roots_Sub_P Parameter: Age (day) Value: 14
  misc_feature: MA Experiment 20000314 PARAMETER Experiment Name: At_14day_Shoots-Roots_Sub_P Parameter: Organism Value: A. thaliana
  misc_feature: MA Experiment 20000314 PARAMETER Experiment Name: At_14day_Shoots-Roots_Sub_P Parameter: Plant Line Value: WS
  misc_feature: MA Experiment 20000314 PARAMETER Experiment Name: At_14day_Shoots-Roots_Sub_P Parameter: Tissue Value: Roots vs. Whole Plant
  misc_feature: MA Experiment ID: 20000315 Result: Down-regulated in Transcription
  misc_feature: MA Experiment 20000315 PARAMETER Experiment Name: At_14day_Shoots-Roots_Sub_P Parameter: Age (day) Value: 14
  misc_feature: MA Experiment 20000315 PARAMETER Experiment Name: At_14day_Shoots-Roots_Sub_P Parameter: Organism Value: A. thaliana
  misc_feature: MA Experiment 20000315 PARAMETER Experiment Name: At_14day_Shoots-Roots_Sub_P Parameter: Plant Line Value: WS
  misc_feature: MA Experiment 20000315 PARAMETER Experiment Name: At_14day_Shoots-Roots_Sub_P Parameter: Tissue Value: Shoots vs. Whole Plant
  misc_feature: MA Experiment ID: 20000327 Result: Down-regulated in Transcription
  misc_feature: MA Experiment 20000327 PARAMETER Experiment Name: At_42deg_Heat_Sub_P Parameter: Age (day) Value: 14
  misc_feature: MA Experiment 20000327 PARAMETER Experiment Name: At_42deg_Heat_Sub_P Parameter: Organism Value: A. thaliana
  misc_feature: MA Experiment 20000327 PARAMETER Experiment Name: At_42deg_Heat_Sub_P Parameter: Plant Line Value: WS
  misc_feature: MA Experiment 20000327 PARAMETER Experiment Name: At_42deg_Heat_Sub_P Parameter: Temperature (deg C) Value: 42 vs. 22
  misc_feature: MA Experiment 20000327 PARAMETER Experiment Name: At_42deg_Heat_Sub_P Parameter: Timepoint (hr) Value: 1
  misc_feature: MA Experiment 20000327 PARAMETER Experiment Name: At_42deg_Heat_Sub_P Parameter: Tissue Value: Aerial
  misc_feature: MA Experiment ID: 20000346 Result: Up-regulated in Transcription
  misc_feature: MA Experiment 20000346 PARAMETER Experiment Name: At_2mM_SA_Sub_P Parameter: Age (day) Value: 14
  misc_feature: MA Experiment 20000346 PARAMETER Experiment Name: At_2mM_SA_Sub_P Parameter: Organism Value: A. thaliana
  misc_feature: MA Experiment 20000346 PARAMETER Experiment Name: At_2mM_SA_Sub_P Parameter: Plant Line Value: WS
  misc_feature: MA Experiment 20000346 PARAMETER Experiment Name: At_2mM_SA_Sub_P Parameter: Timepoint (hr) Value: 1
  misc_feature: MA Experiment 20000346 PARAMETER Experiment Name: At_2mM_SA_Sub_P Parameter: Tissue Value: Aerial
  misc_feature: MA Experiment 20000346 PARAMETER Experiment Name: At_2mM_SA_Sub_P Parameter: Treatment Value: 2mM SA vs. No Treatment
  misc_feature: MA Experiment ID: 20000352 Result: Up-regulated in Transcription
  misc_feature: MA Experiment 20000352 PARAMETER Experiment Name: At_Drought_Sub_P Parameter: Age (day) Value: 7
  misc_feature: MA Experiment 20000352 PARAMETER Experiment Name: At_Drought_Sub_P Parameter: Organism Value: A. thaliana
  misc_feature: MA Experiment 20000352 PARAMETER Experiment Name: At_Drought_Sub_P Parameter: Plant Line Value: WS
  misc_feature: MA Experiment 20000352 PARAMETER Experiment Name: At_Drought_Sub_P Parameter: Timepoint (hr) Value: 6
  misc_feature: MA Experiment 20000352 PARAMETER Experiment Name: At_Drought_Sub_P Parameter: Tissue Value: Whole Plant
  misc_feature: MA Experiment 20000352 PARAMETER Experiment Name: At_Drought_Sub_P Parameter: Treatment Value: Drought vs. No Drought
  misc_feature: MA Experiment ID: 20000355 Result: Down-regulated in Transcription
  misc_feature: MA Experiment 20000355 PARAMETER Experiment Name: At_Siliques_Sub_P Parameter: Age (day) Value: 21
  misc_feature: MA Experiment 20000355 PARAMETER Experiment Name: At_Siliques_Sub_P Parameter: Organism Value: A. thaliana
  misc_feature: MA Experiment 20000355 PARAMETER Experiment Name: At_Siliques_Sub_P Parameter: Plant Line Value: WS
  misc_feature: MA Experiment 20000355 PARAMETER Experiment Name: At_Siliques_Sub_P Parameter: Tissue Value: Less Than 5mm Siliques vs. Whole Plant
  misc_feature: MA Experiment ID: 20000440 Result: Down-regulated in Transcription
  misc_feature: MA Experiment 20000440 PARAMETER Experiment Name: At_Closed-Flower__Sub_P Parameter: Tissue Value: Closed Flower vs. Whole Plant
  misc_feature: MA Experiment ID: 20000634 Result: Up-regulated in Transcription
  misc_feature: MA Experiment 20000634 PARAMETER Experiment Name: At_10percent_PEG_Sub_P Parameter: Age (day) Value: 12
  misc_feature: MA Experiment 20000634 PARAMETER Experiment Name: At_10percent_PEG_Sub_P Parameter: Organism Value: A. thaliana
  misc_feature: MA Experiment 20000634 PARAMETER Experiment Name: At_10percent_PEG_Sub_P Parameter: Plant Line Value: WS
  misc_feature: MA Experiment 20000634 PARAMETER Experiment Name: At_10percent_PEG_Sub_P Parameter: Timepoint (day) Value: 12
  misc_feature: MA Experiment 20000634 PARAMETER Experiment Name: At_10percent_PEG_Sub_P Parameter: Tissue Value: Whole Plant
  misc_feature: MA Experiment 20000634 PARAMETER Experiment Name: At_10percent_PEG_Sub_P Parameter: Treatment Value: 10% PEG vs. No Treatment
  misc_feature: MA Experiment ID: 20001807 Result: Down-regulated in Transcription
  misc_feature: MA Experiment 20001807 PARAMETER Experiment Name: At_50mM_NH4NO3_L-to-H_Sub_P Parameter: Timepoint (hr) Value: 6
  misc_feature: MA Experiment 20001807 PARAMETER Experiment Name: At_50mM_NH4NO3_L-to-H_Sub_P Parameter: Tissue Value: Leaf
  misc_feature: MA Experiment 20001807 PARAMETER Experiment Name: At_50mM_NH4NO3_L-to-H_Sub_P Parameter: Treatment Value: 50mM NH4NO3 vs 100mM Mannitol
atggaggatcggttctccactatcaccaatcttcatggagatcgtaaacaggcaatatttggagtctatgttggtcatggaggagttaaagcggctgagtgtccagctaagaacttagataagaacattgtagaagaagtagttgacacaacgtttcttaaggaggaaggttttaagggtggttcatcctgtgtcacggctttggttagcgaagggagccttgttgtgtcaaacgccggtgactgtcgtgctgttatgagtgtaggaggtgtagctaaagttttattttctgatcattgtccgtctagagatgatgaacggaaaagaattgaaaccacgggaggatatgttgatatgtttcacggatccttagttgtgccaagaggaatcggagatgctcaacttaagaaatgggttatagctgaaccagagacaaagatctcgagagttgagcatgaccatgagttcttaatcttggcatcacatggtttatgggataaggtgagtaaccaagaagcagtagacattgctcgtcccttctgcttacgaaccgagaagccattgttgttagcagcttgtaagaagcttgttgatctctcggcttcacgaggctcgtttgatgatatcagtgtgatgttgatcccattgcggccagttcgtatagaaaagagaggcatcttagaagatatcttatttagctag

SEQ ID NO: 89316 - protein, 233 aa, Arabidopsis thaliana
  peptide (1)..(233): Ceres Seq. ID no. 12717868
  misc_feature (49)..(209): Pfam Name: Protein phosphatase 2C Pfam Description: Protein phosphatase 2C
  misc_feature (1)..(232): Homolog of NCBI NO: 9294079 NR Description: serine/threonine phosphatase type 2c-like protein
  misc_feature (49)..(217): Homolog of NCBI NO: 15227687 NR Description: protein phosphatase 2C (PP2C); protein id: supported by cDNA: gi_13877670 [Arabidopsis thaliana]
  misc_feature (1)..(48): Homolog of NCBI NO: 15227687 NR Description: protein phosphatase 2C (PP2C); protein id: supported by cDNA: gi_13877670 [Arabidopsis thaliana]
  misc_feature (122)..(230): Homolog of NCBI NO: 22331365 NR Description: protein phosphatase 2C (PP2C), putative; protein
  misc_feature (1)..(93): Homolog of NCBI NO: 22331365 NR Description: protein phosphatase 2C (PP2C), putative; protein
  misc_feature (1)..(217): Homolog of NCBI NO: 15236450 NR Description: protein phosphatase 2C (PP2C), putative; protein At4g08260.1 [Arabidopsis thaliana] >gi|7486866|pir||T10553
  misc_feature (49)..(216): Homolog of NCBI NO: 15222312 NR Description: protein phosphatase 2C (PP2C); protein id: supported by cDNA: gi_20258779 [Arabidopsis thaliana]
  misc_feature (1)..(48): Homolog of NCBI NO: 15222312 NR Description: protein phosphatase 2C (PP2C); protein id: supported by cDNA: gi_20258779 [Arabidopsis thaliana]
  misc_feature (114)..(216): Homolog of NCBI NO: 25352225 NR Description: hypothetical protein [imported] - Arabidopsis >gi|8954030|gb|AAF82204.1|AC067971_12 Contains similarity to phosphatase 2C from Arabidopsis thaliana gb|AF085279. It contains
  misc_feature (49)..(113): Homolog of NCBI NO: 25352225 NR Description: hypothetical protein [imported] - Arabidopsis >gi|8954030|gb|AAF82204.1|AC067971_12 Contains similarity to phosphatase 2C from Arabidopsis thaliana gb|AF085279. It contains
MEDRFSTITNLHGDRKQAIFGVYVGHGGVKAAECPAKNLDKNIVEEVVDTTFLKEEGFKGGSSCVTALVSEGSLVVSNAGDCRAVMSVGGVAKVLFSDHCPSRDDERKRIETTGGYVDMFHGSLVVPRGIGDAQLKKWVIAEPETKISRVEHDHEFLILASHGLWDKVSNQEAVDIARPFCLRTEKPLLLAACKKLVDLSASRGSFDDISVMLIPLRPVRIEKRGILEDILFS

SEQ ID NO: 89317 - protein, 148 aa, Arabidopsis thaliana
  peptide (1)..(148): Ceres Seq. ID no. 12717869
  misc_feature (1)..(124): Pfam Name: Protein phosphatase 2C Pfam Description: Protein phosphatase 2C
  misc_feature (1)..(147): Homolog of NCBI NO: 9294079 NR Description: serine/threonine phosphatase type 2c-like protein
  misc_feature (1)..(132): Homolog of NCBI NO: 15227687 NR Description: protein phosphatase 2C (PP2C); protein id: supported by cDNA: gi_13877670 [Arabidopsis thaliana]
  misc_feature (37)..(145): Homolog of NCBI NO: 22331365 NR Description: protein phosphatase 2C (PP2C), putative; protein
  misc_feature (1)..(132): Homolog of NCBI NO: 15236450 NR Description: protein phosphatase 2C (PP2C), putative; protein At4g08260.1 [Arabidopsis thaliana] >gi|7486866|pir||T10553
  misc_feature (1)..(131): Homolog of NCBI NO: 15222312 NR Description: protein phosphatase 2C (PP2C); protein id: supported by cDNA: gi_20258779 [Arabidopsis thaliana]
  misc_feature (29)..(131): Homolog of NCBI NO: 25352225 NR Description: hypothetical protein [imported] - Arabidopsis >gi|8954030|gb|AAF82204.1|AC067971_12 Contains similarity to phosphatase 2C from Arabidopsis thaliana gb|AF085279. It contains
  misc_feature (1)..(28): Homolog of NCBI NO: 25352225 NR Description: hypothetical protein [imported] - Arabidopsis >gi|8954030|gb|AAF82204.1|AC067971_12 Contains similarity to phosphatase 2C from Arabidopsis thaliana gb|AF085279. It contains
  misc_feature (1)..(132): Homolog of NCBI NO: 30013681 NR Description: Avr9/Cf-9 rapidly elicited protein 284 [Nicotiana
  misc_feature (1)..(132): Homolog of NCBI NO: 7488754 NR Description: protein phosphatase 2C - alfalfa
  misc_feature (1)..(132): Homolog of NCBI NO: 15225656 NR Description: protein phosphatase 2C (PP2C); protein id: [Arabidopsis thaliana] >gi|25352216|pir||C84826 protein
MSVGGVAKVLFSDHCPSRDDERKRIETTGGYVDMFHGSLVVPRGIGDAQLKKWVIAEPETKISRVEHDHEFLILASHGLWDKVSNQEAVDIARPFCLRTEKPLLLAACKKLVDLSASRGSFDDISVMLIPLRPVRIEKRGILEDILFS

SEQ ID NO: 89318 - DNA, 411 bp, Arabidopsis thaliana
  misc_feature (1)..(411): Ceres Seq. ID no. 12717908
  misc_feature: MA Experiment ID: 20000355 Result: Up-regulated in Transcription
  misc_feature: MA Experiment 20000355 PARAMETER Experiment Name: At_Siliques_Sub_P Parameter: Age (day) Value: 21
  misc_feature: MA Experiment 20000355 PARAMETER Experiment Name: At_Siliques_Sub_P Parameter: Organism Value: A. thaliana
  misc_feature: MA Experiment 20000355 PARAMETER Experiment Name: At_Siliques_Sub_P Parameter: Plant Line Value: WS
  misc_feature: MA Experiment 20000355 PARAMETER Experiment Name: At_Siliques_Sub_P Parameter: Tissue Value: Less Than 5mm Siliques vs. Whole Plant
atgaaacaattgttagtctttctatttgtttttagcatttgcatgctagaccatgtatcaggcggcggaatcaggatctcgaacgaactcaaaaacaagaaacttctttggatgcggtgttattccaaagatgacgtattaggtccaaagataataccaatcggacaacattatgaaaatctttttgatattaacttttggcatacaacccgttttatgtgtactttgagacaaggtcctaactttagacactatcagaactttacagcattcaagcttttcgctatggcagatgaaggaggtctatgggattggagagcaagagaaaatgggatctatttaaaaaaagaagctggcgagaaagttttaaacccagtttggatgcataaagagtatgattggatttattaa

SEQ ID NO: 89319 - protein, 136 aa, Arabidopsis thaliana
  peptide (1)..(136): Ceres Seq. ID no. 12717909
  misc_feature (23)..(135): Pfam Name: Plant self-incompatibility protein S1 Pfam Description: Plant self-incompatibility protein S1
  misc_feature (1)..(136): Homolog of NCBI NO: 25405865 NR Description: protein F9C16.21 [imported] - Arabidopsis >gi|8778659|gb|AAF79667.1|AC022314_8 F9C16.21 [Arabidopsis
  misc_feature (1)..(135): Homolog of NCBI NO: 15232231 NR Description: hypothetical protein; protein id: At3g27680.1 thaliana] >gi|9294473|dbj|BAB02692.1|
  misc_feature (3)..(124): Homolog of NCBI NO: 15231635 NR Description: putative self-incompatibility protein; protein At3g26860.1 [Arabidopsis thaliana] >gi|9279676|dbj|BAB01233.1| similarity to Drosophila pumilio protein~gene_id:MDJ14.20
  misc_feature (15)..(130): Homolog of NCBI NO: 18400665 NR Description: unknown protein; protein id: At2g24870.1 thaliana] >gi|20197878|gb|AAD23025.2| unknown protein
  misc_feature (15)..(130): Homolog of NCBI NO: 25412258 NR Description: hypothetical protein At2g24870 [imported] -
  misc_feature (1)..(135): Homolog of NCBI NO: 9279785 NR Description: gb|AAC28191.1~gene_id:F21A17.7~similar to unknown
  misc_feature (1)..(135): Homolog of NCBI NO: 15231636 NR Description: putative self-incompatibility protein; protein At3g26870.1 [Arabidopsis thaliana] >gi|9279677|dbj|BAB01234.1| similarity to Drosophila pumilio protein~gene_id:MDJ14.21
  misc_feature (1)..(94): Homolog of NCBI NO: 15236527 NR Description: putative self-incompatability RNA-binding protein id: At4g08560.1 [Arabidopsis thaliana]
  misc_feature (1)..(100): Homolog of NCBI NO: 18400667 NR Description: unknown protein; protein id: At2g24880.1 thaliana] >gi|20197877|gb|AAD23024.2| unknown protein
  misc_feature (1)..(93): Homolog of NCBI NO: 25412260 NR Description: hypothetical protein At2g24880 [imported] -
MKQLLVFLFVFSICMLDHVSGGGIRISNELKNKKLLWMRCYSKDDVLGPKIIPIGQHYENLFDINFWHTTRFMCTLRQGPNFRHYQNFTAFKLFAMADEGGLWDWRARENGIYLKKEAGEKVLNPVWMHKEYDWIY

SEQ ID NO: 89320 - protein, 122 aa, Arabidopsis thaliana
  peptide (1)..(122): Ceres Seq. ID no. 12717910
  misc_feature (9)..(121): Pfam Name: Plant self-incompatibility protein S1 Pfam Description: Plant self-incompatibility protein S1
  misc_feature (1)..(122): Homolog of NCBI NO: 25405865 NR Description: protein F9C16.21 [imported] - Arabidopsis >gi|8778659|gb|AAF79667.1|AC022314_8 F9C16.21 [Arabidopsis
  misc_feature (1)..(121): Homolog of NCBI NO: 15232231 NR Description: hypothetical protein; protein id: At3g27680.1 thaliana] >gi|9294473|dbj|BAB02692.1|
  misc_feature (1)..(110): Homolog of NCBI NO: 15231635 NR Description: putative self-incompatibility protein; protein At3g26860.1 [Arabidopsis thaliana] >gi|9279676|dbj|BAB01233.1| similarity to Drosophila pumilio protein~gene_id:MDJ14.20
  misc_feature (1)..(116): Homolog of NCBI NO: 18400665 NR Description: unknown protein; protein id: At2g24870.1 thaliana] >gi|20197878|gb|AAD23025.2| unknown protein
  misc_feature (1)..(116): Homolog of NCBI NO: 25412258 NR Description: hypothetical protein At2g24870 [imported] -
  misc_feature (1)..(121): Homolog of NCBI NO: 9279785 NR Description: gb|AAC28191.1~gene_id:F21A17.7~similar to unknown
  misc_feature (1)..(121): Homolog of NCBI NO: 15231636 NR Description: putative self-incompatibility protein; protein At3g26870.1 [Arabidopsis thaliana] >gi|9279677|dbj|BAB01234.1| similarity to Drosophila pumilio protein~gene_id:MDJ14.21
  misc_feature (1)..(80): Homolog of NCBI NO: 15236527 NR Description: putative self-incompatability RNA-binding protein id: At4g08560.1 [Arabidopsis thaliana]
  misc_feature (1)..(86): Homolog of NCBI NO: 18400667 NR Description: unknown protein; protein id: At2g24880.1 thaliana] >gi|20197877|gb|AAD23024.2| unknown protein
  misc_feature (1)..(79): Homolog of NCBI NO: 25412260 NR Description: hypothetical protein At2g24880 [imported] -
MLDHVSGGGIRISNELKNKKLLWMRCYSKDDVLGPKIIPIGQHYENLFDINFWHTTRFMCTLRQGPNFRHYQNFTAFKLFAMADEGGLWDWRARENGIYLKKEAGEKVLNPVWMHKEYDWIY

SEQ ID NO: 89321 - protein, 99 aa, Arabidopsis thaliana
  peptide (1)..(99): Ceres Seq. ID no. 12717911
  misc_feature (1)..(98): Pfam Name: Plant self-incompatibility protein S1 Pfam Description: Plant self-incompatibility protein S1
  misc_feature (1)..(99): Homolog of NCBI NO: 25405865 NR Description: protein F9C16.21 [imported] - Arabidopsis >gi|8778659|gb|AAF79667.1|AC022314_8 F9C16.21 [Arabidopsis
  misc_feature (1)..(98): Homolog of NCBI NO: 15232231 NR Description: hypothetical protein; protein id: At3g27680.1 thaliana] >gi|9294473|dbj|BAB02692.1|
  misc_feature (1)..(87): Homolog of NCBI NO: 15231635 NR Description: putative self-incompatibility protein; protein At3g26860.1 [Arabidopsis thaliana] >gi|9279676|dbj|BAB01233.1| similarity to Drosophila pumilio protein~gene_id:MDJ14.20
  misc_feature (1)..(93): Homolog of NCBI NO: 18400665 NR Description: unknown protein; protein id: At2g24870.1 thaliana] >gi|20197878|gb|AAD23025.2| unknown protein
  misc_feature (1)..(93): Homolog of NCBI NO: 25412258 NR Description: hypothetical protein At2g24870 [imported] -
  misc_feature (1)..(98): Homolog of NCBI NO: 9279785 NR Description: gb|AAC28191.1~gene_id:F21A17.7~similar to unknown
  misc_feature (1)..(98): Homolog of NCBI NO: 15231636 NR Description: putative self-incompatibility protein; protein At3g26870.1 [Arabidopsis thaliana] >gi|9279677|dbj|BAB01234.1| similarity to Drosophila pumilio protein~gene_id:MDJ14.21
  misc_feature (1)..(57): Homolog of NCBI NO: 15236527 NR Description: putative self-incompatability RNA-binding protein id: At4g08560.1 [Arabidopsis thaliana]
  misc_feature (1)..(63): Homolog of NCBI NO: 18400667 NR Description: unknown protein; protein id: At2g24880.1 thaliana] >gi|20197877|gb|AAD23024.2| unknown protein
  misc_feature (1)..(56): Homolog of NCBI NO: 25412260 NR Description: hypothetical protein At2g24880 [imported] -
MRCYSKDDVLGPKIIPIGQHYENLFDINFWHTTRFMCTLRQGPNFRHYQNFTAFKLFAMADEGGLWDWRARENGIYLKKEAGEKVLNPVWMHKEYDWIY

SEQ ID NO: 89322 - DNA, 1173 bp, Arabidopsis thaliana
  misc_feature (1)..(1173): Ceres Seq. ID no. 12717958
  misc_feature: MA Experiment ID: 20000315 Result: Down-regulated in Transcription
  misc_feature: MA Experiment 20000315 PARAMETER Experiment Name: At_14day_Shoots-Roots_Sub_P Parameter: Age (day) Value: 14
  misc_feature: MA Experiment 20000315 PARAMETER Experiment Name: At_14day_Shoots-Roots_Sub_P Parameter: Organism Value: A. thaliana
  misc_feature: MA Experiment 20000315 PARAMETER Experiment Name: At_14day_Shoots-Roots_Sub_P Parameter: Plant Line Value: WS
  misc_feature: MA Experiment 20000315 PARAMETER Experiment Name: At_14day_Shoots-Roots_Sub_P Parameter: Tissue Value: Shoots vs. Whole Plant
  misc_feature: MA Experiment ID: 20000328 Result: Down-regulated in Transcription
  misc_feature: MA Experiment 20000328 PARAMETER Experiment Name: At_42deg_Heat_Sub_P Parameter: Age (day) Value: 14
  misc_feature: MA Experiment 20000328 PARAMETER Experiment Name: At_42deg_Heat_Sub_P Parameter: Organism Value: A. thaliana
  misc_feature: MA Experiment 20000328 PARAMETER Experiment Name: At_42deg_Heat_Sub_P Parameter: Plant Line Value: WS
  misc_feature: MA Experiment 20000328 PARAMETER Experiment Name: At_42deg_Heat_Sub_P Parameter: Temperature (deg C) Value: 42 vs. 22
  misc_feature: MA Experiment 20000328 PARAMETER Experiment Name: At_42deg_Heat_Sub_P Parameter: Timepoint (hr) Value: 6
  misc_feature: MA Experiment 20000328 PARAMETER Experiment Name: At_42deg_Heat_Sub_P Parameter: Tissue Value: Aerial
  misc_feature: MA Experiment ID: 20000347 Result: Up-regulated in Transcription
  misc_feature: MA Experiment 20000347 PARAMETER Experiment Name: At_2mM_SA_Sub_P Parameter: Age (day) Value: 14
  misc_feature: MA Experiment 20000347 PARAMETER Experiment Name: At_2mM_SA_Sub_P Parameter: Organism Value: A. thaliana
  misc_feature: MA Experiment 20000347 PARAMETER Experiment Name: At_2mM_SA_Sub_P Parameter: Plant Line Value: WS
  misc_feature: MA Experiment 20000347 PARAMETER Experiment Name: At_2mM_SA_Sub_P Parameter: Timepoint (hr) Value: 6
  misc_feature: MA Experiment 20000347 PARAMETER Experiment Name: At_2mM_SA_Sub_P Parameter: Tissue Value: Aerial
  misc_feature: MA Experiment 20000347 PARAMETER Experiment Name: At_2mM_SA_Sub_P Parameter: Treatment Value: 2mM SA vs. No Treatment
atggcggagtctgcgatccgaaccatcgtcgaatcaattcactcatcgccgacgcaagccgtcgtgtatctctccggcggtgcctctcagtctttaggttggttaatgtcagttcctggagcttcgaacacacttctcgaagccgtggttccgtattccatgatctctatggttcaattactcggcagggttccgaaccaacactgtagccaatcaatggcgaatgaaatggctttgttagcttataatcgtgctcttaagctttctaagccaggatgtgcggttcttggtgttggttttactggaacgttagcaacttctcgtccaaagcgtggggatcataggttctttttgtcgataagagcttccaaccggatatgggaaacttcagttactctaacaaagggaaaacgaagccgagaggaagaagataaagtggcaagctctgtactgattcaggctatggctaaggcatgccaagtttctgagacacttgactctggcttgactgattctgaggtgcttaatgagtctgtaatccagtttagtgaagaagaagaactagaacagcttatagatggacaaatatgctctaagatctatccattttctaaagcagaatcatacgggtcggataaagatagaaagattatactgcctggttcttttaacccattacatgacggtgatctcaagctgttggaagctgctatgagtgtttctgaggaaggagggtatccatgttttgaaatatctgcactgaatgcagacaaaccatcgcttacagttacagagattaaagatcgtgtcaaacaatttgaagtacttgaaaagacggtaatagtttcaaatcagcctttcttctacaagaaagctgaactcttcccaggaagcagttttgtaattggtgctgatactgcagcaaggattgttaatccaaagtactatgaaggaagccacaaaaggatgttggaggtactaggtgattgcaaacgaacaggttgcaagttccttgttggtggccgtaatgtagatagtgtattcaaggttcttgacgatcatgagattccaaaggaaataagtacaatgtttacctcaatttcagcagatacattccgtatggatatatcctctacagagctaagaaagaaccaaggaggtgttatttcataa

SEQ ID NO: 89323 - protein, 390 aa, Arabidopsis thaliana
  peptide (1)..(390): Ceres Seq. ID no. 12717959
  misc_feature (1)..(390): Homolog of NCBI NO: 9294466 NR Description: gb|AAD14522.1~gene_id:MGF10.2~similar to unknown
  misc_feature (1)..(390): Homolog of NCBI NO: 15232221 NR Description: unknown protein; protein id: At3g27610.1
  misc_feature (1)..(387): Homolog of NCBI NO: 30677893 NR Description: expressed protein [Arabidopsis thaliana]
  misc_feature (1)..(387): Homolog of NCBI NO: 26451899 NR Description: unknown protein [Arabidopsis thaliana]
  misc_feature (1)..(387): Homolog of NCBI NO: 30677890 NR Description: expressed protein [Arabidopsis thaliana]
  misc_feature (1)..(387): Homolog of NCBI NO: 21537099 NR Description: unknown [Arabidopsis thaliana]
  misc_feature (151)..(273): Homolog of NCBI NO: 34911372 NR Description: P0034C09.17 [Oryza sativa (japonica
  misc_feature (3)..(96): Homolog of NCBI NO: 34911372 NR Description: P0034C09.17 [Oryza sativa (japonica
  misc_feature (313)..(386): Homolog of NCBI NO: 34911372 NR Description: P0034C09.17 [Oryza sativa (japonica
  misc_feature (1)..(153): Homolog of NCBI NO: 25371182 NR Description: hypothetical protein At2g01220 [imported] - thaliana >gi|4262229|gb|AAD14522.1| unknown protein [Arabidopsis
MAESAIRTIVESIHSSPTQAVVYLSGGASQSLGWLMSVPGASNTLLEAVVPYSMISMVQLLGRVPNQHCSQSMANEMALLAYNRALKLSKPGCAVLGVGFTGTLATSRPKRGDHRFFLSIRASNRIWETSVTLTKGKRSREEEDKVASSVLIQAMAKACQVSETLDSGLTDSEVLNESVIQFSEEEELEQLIDGQICSKIYPFSKAESYGSDKDRKIILPGSFNPLHDGDLKLLEAAMSVSEEGGYPCFEISALNADKPSLTVTEIKDRVKQFEVLEKTVIVSNQPFFYKKAELFPGSSFVIGADTAARIVNPKYYEGSHKRMLEVLGDCKRTGCKFLVGGRNVDSVFKVLDDHEIPKEISTMFTSISADTFRMDISSTELRKNQGGVIS

SEQ ID NO: 89324 - protein, 355 aa, Arabidopsis thaliana
  peptide (1)..(355): Ceres Seq. ID no. 12717960
  misc_feature (1)..(355): Homolog of NCBI NO: 9294466 NR Description: gb|AAD14522.1~gene_id:MGF10.2~similar to unknown
  misc_feature (1)..(355): Homolog of NCBI NO: 15232221 NR Description: unknown protein; protein id: At3g27610.1
  misc_feature (1)..(352): Homolog of NCBI NO: 30677893 NR Description: expressed protein [Arabidopsis thaliana]
  misc_feature (1)..(352): Homolog of NCBI NO: 26451899 NR Description: unknown protein [Arabidopsis thaliana]
  misc_feature (1)..(352): Homolog of NCBI NO: 30677890 NR Description: expressed protein [Arabidopsis thaliana]
  misc_feature (1)..(352): Homolog of NCBI NO: 21537099 NR Description: unknown [Arabidopsis thaliana]
  misc_feature (116)..(238): Homolog of NCBI NO: 34911372 NR Description: P0034C09.17 [Oryza sativa (japonica
  misc_feature (1)..(61): Homolog of NCBI NO: 34911372 NR Description: P0034C09.17 [Oryza sativa (japonica
  misc_feature (278)..(351): Homolog of NCBI NO: 34911372 NR Description: P0034C09.17 [Oryza sativa (japonica
  misc_feature (1)..(118): Homolog of NCBI NO: 25371182 NR Description: hypothetical protein At2g01220 [imported] - thaliana >gi|4262229|gb|AAD14522.1| unknown protein [Arabidopsis
MSVPGASNTLLEAVVPYSMISMVQLLGRVPNQHCSQSMANEMALLAYNRALKLSKPGCAVLGVGFTGTLATSRPKRGDHRFFLSIRASNRIWETSVTLTKGKRSREEEDKVASSVLIQAMAKACQVSETLDSGLTDSEVLNESVIQFSEEEELEQLIDGQICSKIYPFSKAESYGSDKDRKIILPGSFNPLHDGDLKLLEAAMSVSEEGGYPCFEISALNADKPSLTVTEIKDRVKQFEVLEKTVIVSNQPFFYKKAELFPGSSFVIGADTAARIVNPKYYEGSHKRMLEVLGDCKRTGCKFLVGGRNVDSVFKVLDDHEIPKEISTMFTSISADTFRMDISSTELRKNQGGVIS

SEQ ID NO: 89325 - protein, 337 aa, Arabidopsis thaliana
  peptide (1)..(337): Ceres Seq. ID no. 12717961
  misc_feature (1)..(337): Homolog of NCBI NO: 9294466 NR Description: gb|AAD14522.1~gene_id:MGF10.2~similar to unknown
  misc_feature (1)..(337): Homolog of NCBI NO: 15232221 NR Description: unknown protein; protein id: At3g27610.1
  misc_feature (1)..(334): Homolog of NCBI NO: 30677893 NR Description: expressed protein [Arabidopsis thaliana]
  misc_feature (1)..(334): Homolog of NCBI NO: 26451899 NR Description: unknown protein [Arabidopsis thaliana]
  misc_feature (1)..(334): Homolog of NCBI NO: 30677890 NR Description: expressed protein [Arabidopsis thaliana]
  misc_feature (1)..(334): Homolog of NCBI NO: 21537099 NR Description: unknown [Arabidopsis thaliana]
  misc_feature (98)..(220): Homolog of NCBI NO: 34911372 NR Description: P0034C09.17 [Oryza sativa (japonica
  misc_feature (1)..(43): Homolog of NCBI NO: 34911372 NR Description: P0034C09.17 [Oryza sativa (japonica
  misc_feature (260)..(333): Homolog of NCBI NO: 34911372 NR Description: P0034C09.17 [Oryza sativa (japonica
  misc_feature (1)..(100): Homolog of NCBI NO: 25371182 NR Description: hypothetical protein At2g01220 [imported] - thaliana >gi|4262229|gb|AAD14522.1| unknown protein [Arabidopsis
MISMVQLLGRVPNQHCSQSMANEMALLAYNRALKLSKPGCAVLGVGFTGTLATSRPKRGDHRFFLSIRASNRIWETSVTLTKGKRSREEEDKVASSVLIQAMAKACQVSETLDSGLTDSEVLNESVIQFSEEEELEQLIDGQICSKIYPFSKAESYGSDKDRKIILPGSFNPLHDGDLKLLEAAMSVSEEGGYPCFEISALNADKPSLTVTEIKDRVKQFEVLEKTVIVSNQPFFYKKAELFPGSSFVIGADTAARIVNPKYYEGSHKRMLEVLGDCKRTGCKFLVGGRNVDSVFKVLDDHEIPKEISTMFTSISADTFRMDISSTELRKNQGGVIS

SEQ ID NO: 89326 - DNA, 924 bp, Arabidopsis thaliana
  misc_feature (1)..(924): Ceres Seq. ID no. 12717974
  misc_feature: MA Experiment ID: 108462 Result: Up-regulated in Transcription
  misc_feature: MA Experiment 108462 PARAMETER Experiment Name: At_Germinating_Seeds_cDNA_P Parameter: Age (day) Value: 2 vs. 0
  misc_feature: MA Experiment 108462 PARAMETER Experiment Name: At_Germinating_Seeds_cDNA_P Parameter: Tissue Value: Germinating Seeds
  misc_feature: MA Experiment ID: 108463 Result: Up-regulated in Transcription
  misc_feature: MA Experiment 108463 PARAMETER Experiment Name: At_Germinating_Seeds_cDNA_P Parameter: Age (day) Value: 3 vs. 0
  misc_feature: MA Experiment 108463 PARAMETER Experiment Name: At_Germinating_Seeds_cDNA_P Parameter: Tissue Value: Germinating Seeds
  misc_feature: MA Experiment ID: 108609 Result: Down-regulated in Transcription
  misc_feature: MA Experiment 108609 PARAMETER Experiment Name: At_100uM_ABA_cDNA_P Parameter: Timepoint (hr) Value: 24
  misc_feature: MA Experiment 108609 PARAMETER Experiment Name: At_100uM_ABA_cDNA_P Parameter: Tissue Value: Aerial
  misc_feature: MA Experiment 108609 PARAMETER Experiment Name: At_100uM_ABA_cDNA_P Parameter: Treatment Value: 100uM ABA vs. No Treatment
  misc_feature: MA Experiment ID: 20000069 Result: Down-regulated in Transcription
  misc_feature: MA Experiment 20000069 PARAMETER Experiment Name: At_100uM_ABA_Mutants_cDNA_P Parameter: Plant Line Value: CS23
  misc_feature: MA Experiment 20000069 PARAMETER Experiment Name: At_100uM_ABA_Mutants_cDNA_P Parameter: Timepoint (hr) Value: 6
  misc_feature: MA Experiment 20000069 PARAMETER Experiment Name: At_100uM_ABA_Mutants_cDNA_P Parameter: Tissue Value: Aerial
  misc_feature: MA Experiment 20000069 PARAMETER Experiment Name: At_100uM_ABA_Mutants_cDNA_P Parameter: Treatment Value: 100uM ABA vs. No Treatment
  misc_feature: MA Experiment ID: 20000070 Result: Down-regulated in Transcription
  misc_feature: MA Experiment 20000070 PARAMETER Experiment Name: At_100uM_ABA_Mutants_cDNA_P Parameter: Plant Line Value: CS24
  misc_feature: MA Experiment 20000070 PARAMETER Experiment Name: At_100uM_ABA_Mutants_cDNA_P Parameter: Timepoint (hr) Value: 6
  misc_feature: MA Experiment 20000070 PARAMETER Experiment Name: At_100uM_ABA_Mutants_cDNA_P Parameter: Tissue Value: Aerial
  misc_feature: MA Experiment 20000070 PARAMETER Experiment Name: At_100uM_ABA_Mutants_cDNA_P Parameter: Treatment Value: 100uM ABA vs. No Treatment
  misc_feature: MA Experiment ID: 20000071 Result: Down-regulated in Transcription
  misc_feature: MA Experiment 20000071 PARAMETER Experiment Name: At_100uM_ABA_Mutants_cDNA_P Parameter: Plant Line Value: CS8104
  misc_feature: MA Experiment 20000071 PARAMETER Experiment Name: At_100uM_ABA_Mutants_cDNA_P Parameter: Timepoint (hr) Value: 6
  misc_feature: MA Experiment 20000071 PARAMETER Experiment Name: At_100uM_ABA_Mutants_cDNA_P Parameter: Tissue Value: Aerial
  misc_feature: MA Experiment 20000071 PARAMETER Experiment Name: At_100uM_ABA_Mutants_cDNA_P Parameter: Treatment Value: 100uM ABA vs. No Treatment
  misc_feature: MA Experiment ID: 20000086 Result: Down-regulated in Transcription
  misc_feature: MA Experiment 20000086 PARAMETER Experiment Name: At_100uM_ABA_Mutants_cDNA_P Parameter: Plant Line Value: CS22
  misc_feature: MA Experiment 20000086 PARAMETER Experiment Name: At_100uM_ABA_Mutants_cDNA_P Parameter: Timepoint (hr) Value: 6
  misc_feature: MA Experiment 20000086 PARAMETER Experiment Name: At_100uM_ABA_Mutants_cDNA_P Parameter: Tissue Value: Aerial
  misc_feature: MA Experiment 20000086 PARAMETER Experiment Name: At_100uM_ABA_Mutants_cDNA_P Parameter: Treatment Value: 100uM ABA vs. No Treatment
  misc_feature: MA Experiment ID: 20000087 Result: Down-regulated in Transcription
  misc_feature: MA Experiment 20000087 PARAMETER Experiment Name: At_100uM_ABA_Mutants_cDNA_P Parameter: Plant Line Value: WS
  misc_feature: MA Experiment 20000087 PARAMETER Experiment Name: At_100uM_ABA_Mutants_cDNA_P Parameter: Timepoint (hr) Value: 6
  misc_feature: MA Experiment 20000087 PARAMETER Experiment Name: At_100uM_ABA_Mutants_cDNA_P Parameter: Tissue Value: Aerial
  misc_feature: MA Experiment 20000087 PARAMETER Experiment Name: At_100uM_ABA_Mutants_cDNA_P Parameter: Treatment Value: 100uM ABA vs. No Treatment
  misc_feature: MA Experiment ID: 20000307 Result: Up-regulated in Transcription
  misc_feature: MA Experiment 20000307 PARAMETER Experiment Name: At_Germinating_Seeds_Sub_P Parameter: Age (hr) Value: 24 vs. 0
  misc_feature: MA Experiment 20000307 PARAMETER Experiment Name: At_Germinating_Seeds_Sub_P Parameter: Organism Value: A. thaliana
  misc_feature: MA Experiment 20000307 PARAMETER Experiment Name: At_Germinating_Seeds_Sub_P Parameter: Plant Line Value: WS
  misc_feature: MA Experiment 20000307 PARAMETER Experiment Name: At_Germinating_Seeds_Sub_P Parameter: Tissue Value: Germinating Seeds
  misc_feature: MA Experiment ID: 20000314 Result: Down-regulated in Transcription
  misc_feature: MA Experiment 20000314 PARAMETER Experiment Name: At_14day_Shoots-Roots_Sub_P Parameter: Age (day) Value: 14
  misc_feature: MA Experiment 20000314 PARAMETER Experiment Name: At_14day_Shoots-Roots_Sub_P Parameter: Organism Value: A. thaliana
  misc_feature: MA Experiment 20000314 PARAMETER Experiment Name: At_14day_Shoots-Roots_Sub_P Parameter: Plant Line Value: WS
  misc_feature: MA Experiment 20000314 PARAMETER Experiment Name: At_14day_Shoots-Roots_Sub_P Parameter: Tissue Value: Roots vs. Whole Plant
  misc_feature: MA Experiment ID: 20000315 Result: Up-regulated in Transcription
  misc_feature: MA Experiment 20000315 PARAMETER Experiment Name: At_14day_Shoots-Roots_Sub_P Parameter: Age (day) Value: 14
  misc_feature: MA Experiment 20000315 PARAMETER Experiment Name: At_14day_Shoots-Roots_Sub_P Parameter: Organism Value: A. thaliana
  misc_feature: MA Experiment 20000315 PARAMETER Experiment Name: At_14day_Shoots-Roots_Sub_P Parameter: Plant Line Value: WS
  misc_feature: MA Experiment 20000315 PARAMETER Experiment Name: At_14day_Shoots-Roots_Sub_P Parameter: Tissue Value: Shoots vs. Whole Plant
  misc_feature: MA Experiment ID: 20000329 Result: Up-regulated in Transcription
  misc_feature: MA Experiment 20000329 PARAMETER Experiment Name: At_4deg_Cold_Sub_P Parameter: Age (day) Value: 14
  misc_feature: MA Experiment 20000329 PARAMETER Experiment Name: At_4deg_Cold_Sub_P Parameter: Organism Value: A. thaliana
  misc_feature: MA Experiment 20000329 PARAMETER Experiment Name: At_4deg_Cold_Sub_P Parameter: Plant Line Value: WS
  misc_feature: MA Experiment 20000329 PARAMETER Experiment Name: At_4deg_Cold_Sub_P Parameter: Temperature (deg C) Value: 4 vs. 22
  misc_feature: MA Experiment 20000329 PARAMETER Experiment Name: At_4deg_Cold_Sub_P Parameter: Timepoint (hr) Value: 6
  misc_feature: MA Experiment 20000329 PARAMETER Experiment Name: At_4deg_Cold_Sub_P Parameter: Tissue Value: Aerial
  misc_feature: MA Experiment ID: 20000347 Result: Down-regulated in Transcription
  misc_feature: MA Experiment 20000347 PARAMETER Experiment Name: At_2mM_SA_Sub_P Parameter: Age (day) Value: 14
  misc_feature: MA Experiment 20000347 PARAMETER Experiment Name: At_2mM_SA_Sub_P Parameter: Organism Value: A. thaliana
  misc_feature: MA Experiment 20000347 PARAMETER Experiment Name: At_2mM_SA_Sub_P Parameter: Plant Line Value: WS
  misc_feature: MA Experiment 20000347 PARAMETER Experiment Name: At_2mM_SA_Sub_P Parameter: Timepoint (hr) Value: 6
  misc_feature: MA Experiment 20000347 PARAMETER Experiment Name: At_2mM_SA_Sub_P Parameter: Tissue Value: Aerial
  misc_feature: MA Experiment 20000347 PARAMETER Experiment Name: At_2mM_SA_Sub_P Parameter: Treatment Value: 2mM SA vs. No Treatment
  misc_feature: MA Experiment ID: 20000355 Result: Up-regulated in Transcription
  misc_feature: MA Experiment 20000355 PARAMETER Experiment Name: At_Siliques_Sub_P Parameter: Age (day) Value: 21
  misc_feature: MA Experiment 20000355 PARAMETER Experiment Name: At_Siliques_Sub_P Parameter: Organism Value: A. thaliana
  misc_feature: MA Experiment 20000355 PARAMETER Experiment Name: At_Siliques_Sub_P Parameter: Plant Line Value: WS
  misc_feature: MA Experiment 20000355 PARAMETER Experiment Name: At_Siliques_Sub_P Parameter: Tissue Value: Less Than 5mm Siliques vs. Whole Plant
  misc_feature: MA Experiment ID: 20000634 Result: Down-regulated in Transcription
  misc_feature: MA Experiment 20000634 PARAMETER Experiment Name: At_10percent_PEG_Sub_P Parameter: Age (day) Value: 12
  misc_feature: MA Experiment 20000634 PARAMETER Experiment Name: At_10percent_PEG_Sub_P Parameter: Organism Value: A. thaliana
  misc_feature: MA Experiment 20000634 PARAMETER Experiment Name: At_10percent_PEG_Sub_P Parameter: Plant Line Value: WS
  misc_feature: MA Experiment 20000634 PARAMETER Experiment Name: At_10percent_PEG_Sub_P Parameter: Timepoint (day) Value: 12
  misc_feature: MA Experiment 20000634 PARAMETER Experiment Name: At_10percent_PEG_Sub_P Parameter: Tissue Value: Whole Plant
  misc_feature: MA Experiment 20000634 PARAMETER Experiment Name: At_10percent_PEG_Sub_P Parameter: Treatment Value: 10% PEG vs. No Treatment
attctcacttacttcttttctttttttgtgttcttgtttagaagaagcaatggccacttcagcaatccaacactcttctttcgctggccaaacgaccctaaagccatccaacgatctcctccgcaaaatcggagcctccaatggcggtggccgcatcatcatgcgtcgtaccgtcaagtctactcctcagagcatctggtacggaccagaccgtcccaaatacctaggaccattttccgaaaacacaccatcatacctaaccggagaataccctggagactacggttgggacaccgctggtctctcagccgatccagaaacattcgcaaagaatcgtgagctcgaagtgatccacagtagatgggcaatgttgggagctttaggctgcaccttccctgaaattctctcaaaaaacggagtcaaattcggtgaagccgtgtggttcaaggcaggatctcaaatcttctcagaaggagggcttgactacctcggaaaccctaacttgatccacgcgcaaagcatattagctatatgggcgtgtcaagttgtgctaatgggattcattgaagggtacagaatcggaggtggtcctcttggggaagggcttgacccgctttacccgggcggggccttcgacccgttgaacttagcggaggatccagaagcgttttcagagttgaaagtgaaggagcttaaaaacggtcgtcttgctatgttctcaatgtttggattctttgtccaagccatagttaccggtaaaggtccgatcgaaaatctgttcgatcacattgcagaccctgtggctaacaatgcttgggcttacgccaccaacttcgtccccggaaaatagagtttgatcggataatttatgtaaattatatcttttaaacatttatcaatgcattaaagttatccctatatttg

SEQ ID NO: 89327 - protein, 282 aa, Arabidopsis thaliana
  peptide (1)..(282): Ceres Seq. ID no. 12717975
  misc_feature (81)..(249): Pfam Name: Chlorophyll A-B binding protein Pfam Description: Chlorophyll A-B binding protein
  misc_feature (17)..(282): Homolog of NCBI NO: 15232249 NR Description: light harvesting chlorophyll A/B binding protein, protein id: At3g27690.1, supported by cDNA: 7700., supported by
  misc_feature (17)..(282): Homolog of NCBI NO: 25299029 NR Description: chlorophyll a/b-binding protein Lhcb2 [imported] Arabidopsis thaliana >gi|4741948|gb|AAD28771.1|AF134124_1 Lhcb2
  misc_feature (17)..(282): Homolog of NCBI NO: 25299022 NR Description: chlorophyll a/b-binding protein Lhcb2 [imported] Arabidopsis thaliana >gi|4741944|gb|AAD28769.1|AF134122_1 Lhcb2
  misc_feature (17)..(281): Homolog of NCBI NO: 15224471 NR Description: light-harvesting chlorophyll a/b binding protein; id: At2g05100.1, supported by cDNA: gi_15450348, supported by gi_15450493, supported by cDNA: gi_4741943, supported by cDNA:
  misc_feature (17)..(282): Homolog of NCBI NO: 15224465 NR Description: light-harvesting chlorophyll a/b binding protein; id: At2g05070.1, supported by cDNA: gi_15809900, supported by
  misc_feature (17)..(282): Homolog of NCBI NO: 3560529 NR Description: light harvesting chlorophyll A/B binding protein
  misc_feature (17)..(282): Homolog of NCBI NO: 1345698 NR Description: Chlorophyll A-B binding protein 151, chloroplast
  misc_feature (17)..(282): Homolog of NCBI NO: 5714656 NR Description: chlorophyll a/b binding protein [Rumex palustris]
  misc_feature (17)..(282): Homolog of NCBI NO: 99600 NR Description: chlorophyll a/b-binding protein - upland cotton
FSLTSFLFLCSCLEEAMATSAIQHSSFAGQTTLKPSNDLLRKIGASNGGGRIIMRRTVKSTPQSIWYGPDRPKYLGPFSENTPSYLTGEYPGDYGWDTAGLSADPETFAKNRELEVIHSRWAMLGALGCTFPEILSKNGVKFGEAVWFKAGSQIFSEGGLDYLGNPNLIHAQSILAIWACQVVLMGFIEGYRIGGGPLGEGLDPLYPGGAFDPLNLAEDPEAFSELKVKELKNGRLAMFSMFGFFVQAIVTGKGPIENLFDHIADPVANNAWAYATNFVPGK

SEQ ID NO: 89328 - protein, 266 aa, Arabidopsis thaliana
  peptide (1)..(266): Ceres Seq. ID no. 12717976
  misc_feature (65)..(233): Pfam Name: Chlorophyll A-B binding protein Pfam Description: Chlorophyll A-B binding protein
  misc_feature (1)..(266): Homolog of NCBI NO: 15232249 NR Description: light harvesting chlorophyll A/B binding protein, protein id: At3g27690.1, supported by cDNA: 7700., supported by
  misc_feature (1)..(266): Homolog of NCBI NO: 25299029 NR Description: chlorophyll a/b-binding protein Lhcb2 [imported] Arabidopsis thaliana >gi|4741948|gb|AAD28771.1|AF134124_1 Lhcb2
  misc_feature (1)..(266): Homolog of NCBI NO: 25299022 NR Description: chlorophyll a/b-binding protein Lhcb2 [imported] Arabidopsis thaliana >gi|4741944|gb|AAD28769.1|AF134122_1 Lhcb2
  misc_feature (1)..(265): Homolog of NCBI NO: 15224471 NR Description: light-harvesting chlorophyll a/b binding protein; id: At2g05100.1, supported by cDNA: gi_15450348, supported by gi_15450493, supported by cDNA: gi_4741943, supported by cDNA:
  misc_feature (1)..(266): Homolog of NCBI NO: 15224465 NR Description: light-harvesting chlorophyll a/b binding protein; id: At2g05070.1, supported by cDNA: gi_15809900, supported by
  misc_feature (1)..(266): Homolog of NCBI NO: 3560529 NR Description: light harvesting chlorophyll A/B binding protein
  misc_feature (1)..(266): Homolog of NCBI NO: 1345698 NR Description: Chlorophyll A-B binding protein 151, chloroplast
  misc_feature (1)..(266): Homolog of NCBI NO: 5714656 NR Description: chlorophyll a/b binding protein [Rumex palustris]
  misc_feature (1)..(266): Homolog of NCBI NO: 99600 NR Description: chlorophyll a/b-binding protein - upland cotton
MATSAIQHSSFAGQTTLKPSNDLLRKIGASNGGGRIIMRRTVKSTPQSIWYGPDRPKYLGPFSENTPSYLTGEYPGDYGWDTAGLSADPETFAKNRELEVIHSRWAMLGALGCTFPEILSKNGVKFGEAVWFKAGSQIFSEGGLDYLGNPNLIHAQSILAIWACQVVLMGFIEGYRIGGGPLGEGLDPLYPGGAFDPLNLAEDPEAFSELKVKELKNGRLAMFSMFGFFVQAIVTGKGPIENLFDHIADPVANNAWAYATNFVPGK

SEQ ID NO: 89329 - protein, 229 aa, Arabidopsis thaliana
  peptide (1)..(229): Ceres Seq. ID no. 12717977
  misc_feature (28)..(196): Pfam Name: Chlorophyll A-B binding protein Pfam Description: Chlorophyll A-B binding protein
  misc_feature (1)..(229): Homolog of NCBI NO: 15232249 NR Description: light harvesting chlorophyll A/B binding protein, protein id: At3g27690.1, supported by cDNA: 7700., supported by
  misc_feature (1)..(229): Homolog of NCBI NO: 25299029 NR Description: chlorophyll a/b-binding protein Lhcb2 [imported] Arabidopsis thaliana >gi|4741948|gb|AAD28771.1|AF134124_1 Lhcb2
  misc_feature (1)..(229): Homolog of NCBI NO: 25299022 NR Description: chlorophyll a/b-binding protein Lhcb2 [imported] Arabidopsis thaliana >gi|4741944|gb|AAD28769.1|AF134122_1 Lhcb2
  misc_feature (1)..(228): Homolog of NCBI NO: 15224471 NR Description: light-harvesting chlorophyll a/b binding protein; id: At2g05100.1, supported by cDNA: gi_15450348, supported by gi_15450493, supported by cDNA: gi_4741943, supported by cDNA:
  misc_feature (1)..(229): Homolog of NCBI NO: 15224465 NR Description: light-harvesting chlorophyll a/b binding protein; id: At2g05070.1, supported by cDNA: gi_15809900, supported by
  misc_feature (1)..(229): Homolog of NCBI NO: 3560529 NR Description: light harvesting chlorophyll A/B binding protein
  misc_feature (1)..(229): Homolog of NCBI NO: 1345698 NR Description: Chlorophyll A-B binding protein 151, chloroplast
  misc_feature (1)..(229): Homolog of NCBI NO: 5714656 NR Description: chlorophyll a/b binding protein [Rumex palustris]
  misc_feature (1)..(229): Homolog of NCBI NO: 99600 NR Description: chlorophyll a/b-binding protein - upland cotton
MRRTVKSTPQSIWYGPDRPKYLGPFSENTPSYLTGEYPGDYGWDTAGLSADPETFAKNRELEVIHSRWAMLGALGCTFPEILSKNGVKFGEAVWFKAGSQIFSEGGLDYLGNPNLIHAQSILAIWACQVVLMGFIEGYRIGGGPLGEGLDPLYPGGAFDPLNLAEDPEAFSELKVKELKNGRLAMFSMFGFFVQAIVTGKGPIENLFDHIADPVANNAWAYATNFVPGK

SEQ ID NO: 89330 - DNA, 886 bp, Arabidopsis thaliana
  misc_feature (1)..(886): Ceres Seq. ID no. 12718005
  misc_feature: MA Experiment ID: 108461 Result: Up-regulated in Transcription
  misc_feature: MA Experiment 108461 PARAMETER Experiment Name: At_Germinating_Seeds_cDNA_P Parameter: Age (day) Value: 1 vs. 0
  misc_feature: MA Experiment 108461 PARAMETER Experiment Name: At_Germinating_Seeds_cDNA_P Parameter: Tissue Value: Germinating Seeds
  misc_feature: MA Experiment ID: 108462 Result: Up-regulated in Transcription
  misc_feature: MA Experiment 108462 PARAMETER Experiment Name: At_Germinating_Seeds_cDNA_P Parameter: Age (day) Value: 2 vs. 0
  misc_feature: MA Experiment 108462 PARAMETER Experiment Name: At_Germinating_Seeds_cDNA_P Parameter: Tissue Value: Germinating Seeds
  misc_feature: MA Experiment ID: 108488 Result: Up-regulated in Transcription
  misc_feature: MA Experiment ID: 108595 Result: Down-regulated in Transcription
  misc_feature: MA Experiment 108595 PARAMETER Experiment Name: At_Ler-pi_Ovule_cDNA_P Parameter: Plant Line Value: null
  misc_feature: MA Experiment ID: 20000070 Result: Down-regulated in Transcription
  misc_feature: MA Experiment 20000070 PARAMETER Experiment Name: At_100uM_ABA_Mutants_cDNA_P Parameter: Plant Line Value: CS24
  misc_feature: MA Experiment 20000070 PARAMETER Experiment Name: At_100uM_ABA_Mutants_cDNA_P Parameter: Timepoint (hr) Value: 6
  misc_feature: MA Experiment 20000070 PARAMETER Experiment Name: At_100uM_ABA_Mutants_cDNA_P Parameter: Tissue Value: Aerial
  misc_feature: MA Experiment 20000070 PARAMETER Experiment Name: At_100uM_ABA_Mutants_cDNA_P Parameter: Treatment Value: 100uM ABA vs. No Treatment
  misc_feature: MA Experiment ID: 20000071 Result: Down-regulated in Transcription
  misc_feature: MA Experiment 20000071 PARAMETER Experiment Name: At_100uM_ABA_Mutants_cDNA_P Parameter: Plant Line Value: CS8104
  misc_feature: MA Experiment 20000071 PARAMETER Experiment Name: At_100uM_ABA_Mutants_cDNA_P Parameter: Timepoint (hr) Value: 6
  misc_feature: MA Experiment 20000071 PARAMETER Experiment Name: At_100uM_ABA_Mutants_cDNA_P Parameter: Tissue Value: Aerial
  misc_feature: MA Experiment 20000071 PARAMETER Experiment Name: At_100uM_ABA_Mutants_cDNA_P Parameter: Treatment Value: 100uM ABA vs. No Treatment
  misc_feature: MA Experiment ID: 20000072 Result: Down-regulated in Transcription
  misc_feature: MA Experiment 20000072 PARAMETER Experiment Name: At_100uM_ABA_Mutants_cDNA_P Parameter: Plant Line Value: CS8105
  misc_feature: MA Experiment 20000072 PARAMETER Experiment Name: At_100uM_ABA_Mutants_cDNA_P Parameter: Timepoint (hr) Value: 6
  misc_feature: MA Experiment 20000072 PARAMETER Experiment Name: At_100uM_ABA_Mutants_cDNA_P Parameter: Tissue Value: Aerial
  misc_feature: MA Experiment 20000072 PARAMETER Experiment Name: At_100uM_ABA_Mutants_cDNA_P Parameter: Treatment Value: 100uM ABA vs. No Treatment
  misc_feature: MA Experiment ID: 20000086 Result: Down-regulated in Transcription
  misc_feature: MA Experiment 20000086 PARAMETER Experiment Name: At_100uM_ABA_Mutants_cDNA_P Parameter: Plant Line Value: CS22
  misc_feature: MA Experiment 20000086 PARAMETER Experiment Name: At_100uM_ABA_Mutants_cDNA_P Parameter: Timepoint (hr) Value: 6
  misc_feature: MA Experiment 20000086 PARAMETER Experiment Name: At_100uM_ABA_Mutants_cDNA_P Parameter: Tissue Value: Aerial
  misc_feature: MA Experiment 20000086 PARAMETER Experiment Name: At_100uM_ABA_Mutants_cDNA_P Parameter: Treatment Value: 100uM ABA vs. No Treatment
  misc_feature: MA Experiment ID: 20000117 Result: Down-regulated in Transcription
  misc_feature: MA Experiment 20000117 PARAMETER Experiment Name: At_100uM_ABA_Mutants_cDNA_P Parameter: Plant Line Value: Columbia
  misc_feature: MA Experiment 20000117 PARAMETER Experiment Name: At_100uM_ABA_Mutants_cDNA_P Parameter: Timepoint (hr) Value: 6
  misc_feature: MA Experiment 20000117 PARAMETER Experiment Name: At_100uM_ABA_Mutants_cDNA_P Parameter: Tissue Value: Aerial
  misc_feature: MA Experiment 20000117 PARAMETER Experiment Name: At_100uM_ABA_Mutants_cDNA_P Parameter: Treatment Value: 100uM ABA vs. No Treatment
  misc_feature: MA Experiment ID: 20000180 Result: Up-regulated in Transcription
  misc_feature: MA Experiment 20000180 PARAMETER Experiment Name: At_Germinating_Seeds_P Parameter: Age (hr) Value: 24 vs. 0
  misc_feature: MA Experiment 20000180 PARAMETER Experiment Name: At_Germinating_Seeds_P Parameter: Tissue Value: Germinating Seeds
  misc_feature: MA Experiment ID: 20000185 Result: Down-regulated in Transcription
  misc_feature: MA Experiment 20000185 PARAMETER Experiment Name: At_Roots__P Parameter: Age (day) Value: 7 vs. 21
  misc_feature: MA Experiment 20000185 PARAMETER Experiment Name: At_Roots__P Parameter: Organism Value: A. thaliana
  misc_feature: MA Experiment 20000185 PARAMETER Experiment Name: At_Roots__P Parameter: Tissue Value: Roots vs. Whole Plant
  misc_feature: MA Experiment ID: 20000437 Result: Down-regulated in Transcription
  misc_feature: MA Experiment 20000437 PARAMETER Experiment Name: At_Drought_P Parameter: Age (day) Value: 8
  misc_feature: MA Experiment 20000437 PARAMETER Experiment Name: At_Drought_P Parameter: Organism Value: A. thaliana
  misc_feature: MA Experiment 20000437 PARAMETER Experiment Name: At_Drought_P Parameter: Plant Line Value: WS
  misc_feature: MA Experiment 20000437 PARAMETER Experiment Name: At_Drought_P Parameter: Timepoint (hr) Value: 24
  misc_feature: MA Experiment 20000437 PARAMETER Experiment Name: At_Drought_P Parameter: Tissue Value: Whole Plant
  misc_feature: MA Experiment 20000437 PARAMETER Experiment Name: At_Drought_P Parameter: Treatment Value: Drought vs. No Drought
  misc_feature: MA Experiment ID: 20000438 Result: Up-regulated in Transcription
  misc_feature: MA Experiment 20000438 PARAMETER Experiment Name: At_Shoots__P Parameter: Age (day) Value: 14
  misc_feature: MA Experiment 20000438 PARAMETER Experiment Name: At_Shoots__P Parameter: Tissue Value: Shoots vs. Whole Plant
  misc_feature: MA Experiment ID: 20000439 Result: Down-regulated in Transcription
  misc_feature: MA Experiment 20000439 PARAMETER Experiment Name: At_Roots__P Parameter: Age (day) Value: 14 vs. 21
  misc_feature: MA Experiment 20000439 PARAMETER Experiment Name: At_Roots__P Parameter: Organism Value: A. thaliana
  misc_feature: MA Experiment 20000439 PARAMETER Experiment Name: At_Roots__P Parameter: Tissue Value: Roots vs. Whole Plant
  misc_feature: MA Experiment ID: 20001248 Result: Down-regulated in Transcription
  misc_feature: MA Experiment 20001248 PARAMETER Experiment Name: At_Far-red-induction_P Parameter: Age (day) Value: 7
  misc_feature: MA Experiment 20001248 PARAMETER Experiment Name: At_Far-red-induction_P Parameter: Light Value: Far-red vs. White
  misc_feature: MA Experiment 20001248 PARAMETER Experiment Name: At_Far-red-induction_P Parameter: Organism Value: A. thaliana
  misc_feature: MA Experiment 20001248 PARAMETER Experiment Name: At_Far-red-induction_P Parameter: Plant Line Value: Columbia
  misc_feature: MA Experiment 20001248 PARAMETER Experiment Name: At_Far-red-induction_P Parameter: Timepoint (hr) Value: 4
  misc_feature: MA Experiment 20001248 PARAMETER Experiment Name: At_Far-red-induction_P Parameter: Tissue Value: Whole Plant
  misc_feature: MA Experiment ID: 20001450 Result: Down-regulated in Transcription
  misc_feature: MA Experiment 20001450 PARAMETER Experiment Name: At_Far-red-induction_P Parameter: Age (day) Value: 7
  misc_feature: MA Experiment 20001450 PARAMETER Experiment Name: At_Far-red-induction_P Parameter: Light Value: Far-red vs. White
  misc_feature: MA Experiment 20001450 PARAMETER Experiment Name: At_Far-red-induction_P Parameter: Organism Value: A. thaliana
  misc_feature: MA Experiment 20001450 PARAMETER Experiment Name: At_Far-red-induction_P Parameter: Plant Line Value: Columbia
  misc_feature: MA Experiment 20001450 PARAMETER Experiment Name: At_Far-red-induction_P Parameter: Timepoint (hr) Value: 8
  misc_feature: MA Experiment 20001450 PARAMETER Experiment Name: At_Far-red-induction_P Parameter: Tissue Value: Whole Plant
  misc_feature: MA Experiment ID: 20001757 Result: Up-regulated in Transcription
  misc_feature: MA Experiment 20001757 PARAMETER Experiment Name: At_50mM_NH4NO3_L-to-H_P Parameter: Timepoint (hr) Value: 6
  misc_feature: MA Experiment 20001757 PARAMETER Experiment Name: At_50mM_NH4NO3_L-to-H_P Parameter: Tissue Value: Leaf
  misc_feature: MA Experiment 20001757 PARAMETER Experiment Name: At_50mM_NH4NO3_L-to-H_P Parameter: Treatment Value: 50mM NH4NO3 vs 100mM Mannitol
  misc_feature: MA Experiment ID: 20001905 Result: Down-regulated in Transcription
  misc_feature: MA Experiment 20001905 PARAMETER Experiment Name: At_Drought_Reproduction_P Parameter: Age (day) Value: 40
  misc_feature: MA Experiment 20001905 PARAMETER Experiment Name: At_Drought_Reproduction_P Parameter: Organism Value: A. thaliana
  misc_feature: MA Experiment 20001905 PARAMETER Experiment Name: At_Drought_Reproduction_P Parameter: Plant Line Value: WS
  misc_feature: MA Experiment 20001905 PARAMETER Experiment Name: At_Drought_Reproduction_P Parameter: Timepoint (day) Value: 10
  misc_feature: MA Experiment 20001905 PARAMETER Experiment Name: At_Drought_Reproduction_P Parameter: Tissue Value: Rosettes
  misc_feature: MA Experiment 20001905 PARAMETER Experiment Name: At_Drought_Reproduction_P Parameter: Treatment Value: Drought vs. No Drought
acacacaatccaatcaaaacacacagagagaagaaaaactcagaagaaaagccaaagagtgaaacaaaaatggcgtcgacgactctctcaatcgcaacaacaatccgttcctcatcttatcctactctcgcttccatcaatcacttcccttcccgaaccaccaccatcgaattcccctctcgcttcggtggtggttcatcatccacattgacccaccgtgcaacccatctccgtccaatcgccgccgtcgaagctccggagaaaatcgagaagatcggatccgaaatctcatccctaaccctcgaagaagctcgtatcctcgtcgactatctccaagacaaattcggtgtctccccactctctttagcccccgcagcagcggcggttgctgctccagccgacggtggcgcggcggctgtagtggaggagcaaacagagttcgatgtggttatcaatgaagttccgagtagttctcgtattgcagtaattaaagctgttagggctttgactagcttggcgttgaaggaagctaaggagctaatcgaaggattaccaaagaagtttaaagaaggtatcactaaagatgaagctgaagaagctaagaagactcttgaagaagctggtgctaaagtctccattgcttaaggtttttataaaaaaaaaaaaagaagttgttatcttttctggaatttgattggtcttttgtgttgtttagtatagtttgcgtctggaattgttgagaaattgttgtaatttgaatcacatttggtttcccattagctgatttcgccattgatgtgagctttttggtagctgcacataacatgtttgttgaaatgcctaaatgaggcaaatcactcgtagttgcttaacatgaaacagagtt

SEQ ID NO: 89331 - protein, 214 aa, Arabidopsis thaliana; identical to SEQ ID NO: 29117
  peptide (1)..(214): Ceres Seq. ID no. 12718006
  misc_feature (146)..(214): Pfam Name: Ribosomal protein L7/L12 C-terminal domain Pfam Description: Ribosomal protein L7/L12 C-terminal domain
  misc_feature (24)..(214): Homolog of NCBI NO: 15232274 NR Description: 50S ribosomal protein L12-A; protein id: supported by cDNA: gi_15450973, supported by cDNA: gi_15810118
  misc_feature (24)..(214): Homolog of NCBI NO: 541897 NR Description: ribosomal protein L12.C precursor, chloroplast - thaliana >gi|468773|emb|CAA48183.1| ribosomal protein L12
  misc_feature (24)..(214): Homolog of NCBI NO: 15232276 NR Description: 50S ribosomal protein L12-C; protein id: supported by cDNA: 32422., supported by cDNA: gi_14335123 thaliana] >gi|21431811|sp|P36212|R123_ARATH 50S ribosomal protein
  misc_feature (24)..(214): Homolog of NCBI NO: 21592776 NR Description: 50S ribosomal protein L12-C [Arabidopsis thaliana]
  misc_feature (24)..(213): Homolog of NCBI NO: 15232275 NR Description: 50S ribosomal protein L12-B; protein id: [Arabidopsis thaliana] >gi|21431810|sp|P36211|R122_ARATH 50S
  misc_feature (24)..(213): Homolog of NCBI NO: 541896 NR Description: ribosomal protein L12.B precursor, chloroplast - thaliana >gi|468772|emb|CAA48182.1| ribosomal protein L12
  misc_feature (24)..(214): Homolog of NCBI NO: 20020 NR Description: ribosomal protein L12-1a [Nicotiana tabacum]
  misc_feature (24)..(214): Homolog of NCBI NO: 133088 NR Description: 50S RIBOSOMAL PROTEIN L12, CHLOROPLAST PRECURSOR
  misc_feature (24)..(214): Homolog of NCBI NO: 548746 NR Description: 50S RIBOSOMAL PROTEIN L12, CHLOROPLAST PRECURSOR
  misc_feature (24)..(213): Homolog of NCBI NO: 133085 NR Description: 50S RIBOSOMAL PROTEIN L12, CHLOROPLAST PRECURSOR

SEQ ID NO: 89332 - protein, 191 aa, Arabidopsis thaliana; identical to SEQ ID NO: 21067
  peptide (1)..(191): Ceres Seq. ID no. 12718007
  misc_feature (123)..(191): Pfam Name: Ribosomal protein L7/L12 C-terminal domain Pfam Description: Ribosomal protein L7/L12 C-terminal domain
  misc_feature (1)..(191): Homolog of NCBI NO: 15232274 NR Description: 50S ribosomal protein L12-A; protein id: supported by cDNA: gi_15450973, supported by cDNA: gi_15810118
  misc_feature (1)..(191): Homolog of NCBI NO: 541897 NR Description: ribosomal protein L12.C precursor, chloroplast - thaliana >gi|468773|emb|CAA48183.1| ribosomal protein L12
  misc_feature (1)..(191): Homolog of NCBI NO: 15232276 NR Description: 50S ribosomal protein L12-C; protein id: supported by cDNA: 32422., supported by cDNA: gi_14335123 thaliana] >gi|21431811|sp|P36212|R123_ARATH 50S ribosomal protein
  misc_feature (1)..(191): Homolog of NCBI NO: 21592776 NR Description: 50S ribosomal protein L12-C [Arabidopsis thaliana]
  misc_feature (1)..(190): Homolog of NCBI NO: 15232275 NR Description: 50S ribosomal protein L12-B; protein id: [Arabidopsis thaliana] >gi|21431810|sp|P36211|R122_ARATH 50S
  misc_feature (1)..(190): Homolog of NCBI NO: 541896 NR Description: ribosomal protein L12.B precursor, chloroplast - thaliana >gi|468772|emb|CAA48182.1| ribosomal protein L12
  misc_feature (1)..(191): Homolog of NCBI NO: 20020 NR Description: ribosomal protein L12-1a [Nicotiana tabacum]
  misc_feature (1)..(191): Homolog of NCBI NO: 133088 NR Description: 50S RIBOSOMAL PROTEIN L12, CHLOROPLAST PRECURSOR
  misc_feature (1)..(191): Homolog of NCBI NO: 548746 NR Description: 50S RIBOSOMAL PROTEIN L12, CHLOROPLAST PRECURSOR
  misc_feature (1)..(190): Homolog of NCBI NO: 133085 NR Description: 50S RIBOSOMAL PROTEIN L12, CHLOROPLAST PRECURSOR

SEQ ID NO: 89333 - DNA, 1410 bp, Arabidopsis thaliana
  misc_feature (1)..(1410): Ceres Seq. ID no. 12718139
  misc_feature: MA Experiment ID: 108501 Result: Down-regulated in Transcription
  misc_feature: MA Experiment 108501 PARAMETER Experiment Name: At_ap2_floral_buds_cDNA_P Parameter: Plant Line Value: ap2 (Ler.)
  misc_feature: MA Experiment 108501 PARAMETER Experiment Name: At_ap2_floral_buds_cDNA_P Parameter: Tissue Value: Closed Flower
  misc_feature: MA Experiment ID: 108579 Result: Down-regulated in Transcription
  misc_feature: MA Experiment 108579 PARAMETER Experiment Name: At_4deg_Cold_cDNA_P Parameter: Temperature (deg C) Value: 4 vs. 22
  misc_feature: MA Experiment 108579 PARAMETER Experiment Name: At_4deg_Cold_cDNA_P Parameter: Timepoint (hr) Value: 6
  misc_feature: MA Experiment 108579 PARAMETER Experiment Name: At_4deg_Cold_cDNA_P Parameter: Tissue Value: Aerial
  misc_feature: MA Experiment ID: 108595 Result: Up-regulated in Transcription
  misc_feature: MA Experiment 108595 PARAMETER Experiment Name: At_Ler-pi_Ovule_cDNA_P Parameter: Plant Line Value: null
  misc_feature: MA Experiment ID: 20000030 Result: Down-regulated in Transcription
  misc_feature: MA Experiment 20000030 PARAMETER Experiment Name: At_CS6630_Roots_cDNA_P Parameter: Plant Line Value: CS6630 vs. WS
  misc_feature: MA Experiment 20000030 PARAMETER Experiment Name: At_CS6630_Roots_cDNA_P Parameter: Tissue Value: Roots
  misc_feature: MA Experiment ID: 20000089 Result: Up-regulated in Transcription
atggtggtgtttcagacaggctacgctggtaatcacgtgatcatgagatatgctctaaacttaggagtaagcaagctcgtcttcccactttaccgcaccatcgtcgctttctctgttcttgctccctctgcttacttccttgaaaaaaaagaaagaccggcgatgaaaatcagttttctgattcaattcttccttcttggactcgttggaataacgttaaaccaaggattttacatctttggattggacaatacctcaccaacattcgcatcagcaactgaaaatgttgttcctgctgtttcattcctcatggcagcgttgctcggaatagagaaggtggaatggaagaggaaagatggtatagccaaagtggtggggacaattgtatctgtcgcaggctctttggttataacactctataaaggaccaaccatttaccaaccgagtctgaatatagtgaaccaaactattaaacctgaagaagcagaggaagaaaacaagaactggacgttgggatgtctctgtttgatgggtcactgtttatgttggtcaagttggattgtgttacaatcaccattgcttaaaaagtacccagctcgcttctccttcgtctcctattcttgctttttcgcagtgatacagttctttggaatttcggcttatttcgagagagatctagagaggtggaagataatatcaggaggcgaattatacgcgttactctacactggtttagttggttcagcaatggtgtttgcaatacaaatatatgtagtggaaagaggaggacctctgtttgtatcagcgtatttgcctcttcaaactttgattgctgctgttttagctactttagctcttggtgaacacttttaccttggaggattgataggtgcaatactaatcatgagtggactatacttagttgtgatgggaaagagttgggagaatcaagctctttgccaacaacaacaacacatgatttcttcagcagcatcagattttggtgatgaagaagactaccataataataaaccaagatctcctattaagggagcgaatcttgaattcgaatccaaatcaaatgacaatggaaatgtgaaaatcgcaccaaacgaccaaagtttcctcacaattcttgacgacataaagtcttccaaatctccggctgttattaactatggagcttcttggtgtggagtttgtagccagattcttcctgcattccgaaagctcagcaacagtttctcgaagctcaagtttgtttatgcagatatcgacgagtgccctgaaaccactcgtcacatccgttacacacccacgtttcagttttacagagacggcgagaaagtcgatgagatgtttggagctggtgaacagaggctccatgatcgtctttggcttcactcttga

SEQ ID NO: 89334 - protein, 469 aa, Arabidopsis thaliana
  peptide (1)..(469): Ceres Seq. ID no. 12718140
  misc_feature (6)..(139): Pfam Name: Integral membrane protein DUF6 Pfam Description: Integral membrane protein DUF6
  misc_feature (1)..(349): Homolog of NCBI NO: 18409794 NR Description: putative protein; protein id: At3g53210.1,
  misc_feature (1)..(349): Homolog of NCBI NO: 21593130 NR Description: nodulin-like protein [Arabidopsis thaliana]
  misc_feature (1)..(177): Homolog of NCBI NO: 11358354 NR Description: hypothetical protein T4D2.140 - Arabidopsis >gi|6630741|emb|CAB64224.1| putative protein [Arabidopsis
  misc_feature (212)..(349): Homolog of NCBI NO: 11358354 NR Description: hypothetical protein T4D2.140 - Arabidopsis >gi|6630741|emb|CAB64224.1| putative protein [Arabidopsis
  misc_feature (1)..(363): Homolog of NCBI NO: 18410867 NR Description: nodulin-like protein; protein id: At1g75500.1, by cDNA: gi_15028078, supported by cDNA: gi_20259306 [Arabidopsis >gi|15028079|gb|AAK76570.1| putative nodulin protein nodulin
  misc_feature (9)..(318): Homolog of NCBI NO: 34895316 NR Description: putative nodulin [Oryza sativa (japonica
  misc_feature (1)..(324): Homolog of NCBI NO: 9294076 NR Description: nodulin-like protein [Arabidopsis thaliana]
  misc_feature (1)..(324): Homolog of NCBI NO: 15229596 NR Description: integral membrane protein, putative; protein id:
  misc_feature (131)..(363): Homolog of NCBI NO: 25404978 NR Description: protein F10A5.28 [imported] - Arabidopsis >gi|9369372|gb|AAF87121.1|AC006434_17 F10A5.28 [Arabidopsis
  misc_feature (1)..(70): Homolog of NCBI NO: 25404978 NR Description: protein F10A5.28 [imported] - Arabidopsis >gi|9369372|gb|AAF87121.1|AC006434_17 F10A5.28 [Arabidopsis
MVVFQTGYAGNHVIMRYALNLGVSKLVFPLYRTIVAFSVLAPSAYFLEKKERPAMKISFLIQFFLLGLVGITLNQGFYIFGLDNTSPTFASATENVVPAVSFLMAALLGIEKVEWKRKDGIAKVVGTIVSVAGSLVITLYKGPTIYQPSLNIVNQTIKPEEAEEENKNWTLGCLCLMGHCLCWSSWIVLQSPLLKKYPARFSFVSYSCFFAVIQFFGISAYFERDLERWKIISGGELYALLYTGLVGSAMVFAIQIYVVERGGPLFVSAYLPLQTLIAAVLATLALGEHFYLGGLIGAILIMSGLYLVVMGKSWENQALCQQQQHMISSAASDFGDEEDYHNNKPRSPIKGANLEFESKSNDNGNVKIAPNDQSFLTILDDIKSSKSPAVINYGASWCGVCSQILPAFRKLSNSFSKLKFVYADIDECPETTRHIRYTPTFQFYRDGEKVDEMFGAGEQRLHDRLWLHS

SEQ ID NO: 89335 - protein, 455 aa, Arabidopsis thaliana
  peptide (1)..(455): Ceres Seq. ID no. 12718141
  misc_feature (1)..(125): Pfam Name: Integral membrane protein DUF6 Pfam Description: Integral membrane protein DUF6
  misc_feature (1)..(335): Homolog of NCBI NO: 18409794 NR Description: putative protein; protein id: At3g53210.1,
  misc_feature (1)..(335): Homolog of NCBI NO: 21593130 NR Description: nodulin-like protein [Arabidopsis thaliana]
  misc_feature (1)..(163): Homolog of NCBI NO: 11358354 NR Description: hypothetical protein T4D2.140 - Arabidopsis >gi|6630741|emb|CAB64224.1| putative protein [Arabidopsis
  misc_feature (198)..(335): Homolog of NCBI NO: 11358354 NR Description: hypothetical protein T4D2.140 - Arabidopsis >gi|6630741|emb|CAB64224.1| putative protein [Arabidopsis
  misc_feature (1)..(349): Homolog of NCBI NO: 18410867 NR Description: nodulin-like protein; protein id: At1g75500.1, by cDNA: gi_15028078, supported by cDNA: gi_20259306 [Arabidopsis >gi|15028079|gb|AAK76570.1| putative nodulin protein nodulin
  misc_feature (1)..(304): Homolog of NCBI NO: 34895316 NR Description: putative nodulin [Oryza sativa (japonica
  misc_feature (1)..(310): Homolog of NCBI NO: 9294076 NR Description: nodulin-like protein [Arabidopsis thaliana]
  misc_feature (1)..(310): Homolog of NCBI NO: 15229596 NR Description: integral membrane protein, putative; protein id:
  misc_feature (117)..(349): Homolog of NCBI NO: 25404978 NR Description: protein F10A5.28 [imported] - Arabidopsis >gi|9369372|gb|AAF87121.1|AC006434_17 F10A5.28 [Arabidopsis
  misc_feature (1)..(56): Homolog of NCBI NO: 25404978 NR Description: protein F10A5.28 [imported] - Arabidopsis >gi|9369372|gb|AAF87121.1|AC006434_17 F10A5.28 [Arabidopsis
MRYALNLGVSKLVFPLYRTIVAFSVLAPSAYFLEKKERPAMKISFLIQFFLLGLVGITLNQGFYIFGLDNTSPTFASATENVVPAVSFLMAALLGIEKVEWKRKDGIAKVVGTIVSVAGSLVITLYKGPTIYQPSLNIVNQTIKPEEAEEENKNWTLGCLCLMGHCLCWSSWIVLQSPLLKKYPARFSFVSYSCFFAVIQFFGISAYFERDLERWKIISGGELYALLYTGLVGSAMVFAIQIYVVERGGPLFVSAYLPLQTLIAAVLATLALGEHFYLGGLIGAILIMSGLYLVVMGKSWENQALCQQQQHMISSAASDFGDEEDYHNNKPRSPIKGANLEFESKSNDNGNVKIAPNDQSFLTILDDIKSSKSPAVINYGASWCGVCSQILPAFRKLSNSFSKLKFVYADIDECPETTRHIRYTPTFQFYRDGEKVDEMFGAGEQRLHDRLWLHS

SEQ ID NO: 89336 - protein, 415 aa, Arabidopsis thaliana
  peptide (1)..(415): Ceres Seq. ID no. 12718142
  misc_feature (1)..(85): Pfam Name: Integral membrane protein DUF6 Pfam Description: Integral membrane protein DUF6
  misc_feature (1)..(295): Homolog of NCBI NO: 18409794 NR Description: putative protein; protein id: At3g53210.1,
  misc_feature (1)..(295): Homolog of NCBI NO: 21593130 NR Description: nodulin-like protein [Arabidopsis thaliana]
  misc_feature (1)..(123): Homolog of NCBI NO: 11358354 NR Description: hypothetical protein T4D2.140 - Arabidopsis >gi|6630741|emb|CAB64224.1| putative protein [Arabidopsis
  misc_feature (158)..(295): Homolog of NCBI NO: 11358354 NR Description: hypothetical protein T4D2.140 - Arabidopsis >gi|6630741|emb|CAB64224.1| putative protein [Arabidopsis
  misc_feature (1)..(309): Homolog of NCBI NO: 18410867 NR Description: nodulin-like protein; protein id: At1g75500.1, by cDNA: gi_15028078, supported by cDNA: gi_20259306 [Arabidopsis >gi|15028079|gb|AAK76570.1| putative nodulin protein nodulin
  misc_feature (1)..(264): Homolog of NCBI NO: 34895316 NR Description: putative nodulin [Oryza sativa (japonica
  misc_feature (1)..(270): Homolog of NCBI NO: 9294076 NR Description: nodulin-like protein [Arabidopsis thaliana]
  misc_feature (1)..(270): Homolog of NCBI NO: 15229596 NR Description: integral membrane protein, putative; protein id:
  misc_feature (77)..(309): Homolog of NCBI NO: 25404978 NR Description: protein F10A5.28 [imported] - Arabidopsis >gi|9369372|gb|AAF87121.1|AC006434_17 F10A5.28 [Arabidopsis
  misc_feature (1)..(16): Homolog of NCBI NO: 25404978 NR Description: protein F10A5.28 [imported] - Arabidopsis >gi|9369372|gb|AAF87121.1|AC006434_17 F10A5.28 [Arabidopsis
MKISFLIQFFLLGLVGITLNQGFYIFGLDNTSPTFASATENVVPAVSFLMAALLGIEKVEWKRKDGIAKVVGTIVSVAGSLVITLYKGPTIYQPSLNIVNQTIKPEEAEEENKNWTLGCLCLMGHCLCWSSWIVLQSPLLKKYPARFSFVSYSCFFAVIQFFGISAYFERDLERWKIISGGELYALLYTGLVGSAMVFAIQIYVVERGGPLFVSAYLPLQTLIAAVLATLALGEHFYLGGLIGAILIMSGLYLVVMGKSWENQALCQQQQHMISSAASDFGDEEDYHNNKPRSPIKGANLEFESKSNDNGNVKIAPNDQSFLTILDDIKSSKSPAVINYGASWCGVCSQILPAFRKLSNSFSKLKFVYADIDECPETTRHIRYTPTFQFYRDGEKVDEMFGAGEQRLHDRLWLHS

SEQ ID NO: 89337 - DNA, 1269 bp, Arabidopsis thaliana
  misc_feature (1)..(1269): Ceres Seq. ID no. 12718151
  misc_feature: MA Experiment ID: 20000173 Result: Up-regulated in Transcription
  misc_feature: MA Experiment 20000173 PARAMETER Experiment Name: At_42deg_Heat_P Parameter: Age (day) Value: 14
  misc_feature: MA Experiment 20000173 PARAMETER Experiment Name: At_42deg_Heat_P Parameter: Organism Value: A. thaliana
  misc_feature: MA Experiment 20000173 PARAMETER Experiment Name: At_42deg_Heat_P Parameter: Plant Line Value: WS
  misc_feature: MA Experiment 20000173 PARAMETER Experiment Name: At_42deg_Heat_P Parameter: Temperature (deg C) Value: 42 vs. 22
  misc_feature: MA Experiment 20000173 PARAMETER Experiment Name: At_42deg_Heat_P Parameter: Timepoint (hr) Value: 6
  misc_feature: MA Experiment 20000173 PARAMETER Experiment Name: At_42deg_Heat_P Parameter: Tissue Value: Aerial
  misc_feature: MA Experiment ID: 20000234 Result: Down-regulated in Transcription
  misc_feature: MA Experiment 20000234 PARAMETER Experiment Name: At_Siliques_P Parameter: Age (day) Value: 21
  misc_feature: MA Experiment 20000234 PARAMETER Experiment Name: At_Siliques_P Parameter: Organism Value: A. thaliana
  misc_feature: MA Experiment 20000234 PARAMETER Experiment Name: At_Siliques_P Parameter: Plant Line Value: WS
  misc_feature: MA Experiment 20000234 PARAMETER Experiment Name: At_Siliques_P Parameter: Tissue Value: Less Than 5mm Siliques vs. Whole Plant
  misc_feature: MA Experiment ID: 20000235 Result: Down-regulated in Transcription
  misc_feature: MA Experiment 20000235 PARAMETER Experiment Name: At_Siliques_P Parameter: Age (day) Value: 21
  misc_feature: MA Experiment 20000235 PARAMETER Experiment Name: At_Siliques_P Parameter: Organism Value: A. thaliana
  misc_feature: MA Experiment 20000235 PARAMETER Experiment Name: At_Siliques_P Parameter: Plant Line Value: WS
  misc_feature: MA Experiment 20000235 PARAMETER Experiment Name: At_Siliques_P Parameter: Tissue Value: 5-10mm Siliques vs. Whole Plant
  misc_feature: MA Experiment ID: 20000452 Result: Down-regulated in Transcription
  misc_feature: MA Experiment 20000452 PARAMETER Experiment Name: At_CS6879_Shoots-Roots_P Parameter: Age (day) Value: 14
  misc_feature: MA Experiment 20000452 PARAMETER Experiment Name: At_CS6879_Shoots-Roots_P Parameter: Organism Value: A. thaliana
  misc_feature: MA Experiment 20000452 PARAMETER Experiment Name: At_CS6879_Shoots-Roots_P Parameter: Plant Line Value: CS6879 vs. WS
  misc_feature: MA Experiment 20000452 PARAMETER Experiment Name: At_CS6879_Shoots-Roots_P Parameter: Tissue Value: Shoots
  misc_feature: MA Experiment ID: 20000794 Result: Up-regulated in Transcription
  misc_feature: MA Experiment 20000794 PARAMETER Experiment Name: At_Petals_P Parameter: Age (day) Value: 23-25 days
  misc_feature: MA Experiment 20000794 PARAMETER Experiment Name: At_Petals_P Parameter: Plant Line Value: WS
  misc_feature: MA Experiment 20000794 PARAMETER Experiment Name: At_Petals_P Parameter: Tissue Value: Petals vs. Whole plant
  misc_feature: MA Experiment ID: 20001909 Result: Up-regulated in Transcription
  misc_feature: MA Experiment 20001909 PARAMETER Experiment Name: At_Drought_Reproduction_P Parameter: Age (day) Value: 35
  misc_feature: MA Experiment 20001909 PARAMETER Experiment Name: At_Drought_Reproduction_P Parameter: Organism Value: A. thaliana
  misc_feature: MA Experiment 20001909 PARAMETER Experiment Name: At_Drought_Reproduction_P Parameter: Plant Line Value: WS
  misc_feature: MA Experiment 20001909 PARAMETER Experiment Name: At_Drought_Reproduction_P Parameter: Timepoint (day) Value: 5
  misc_feature: MA Experiment 20001909 PARAMETER Experiment Name: At_Drought_Reproduction_P Parameter: Tissue Value: Flowers
  misc_feature: MA Experiment 20001909 PARAMETER Experiment Name: At_Drought_Reproduction_P Parameter: Treatment Value: Drought vs. No Drought
atgttcttttatctttatttatcatcatcagctaaagaagttctcaagactcatgacctagagacatgcactcgacctaagatggtcacgaccggtttgttttcttacaacttcaaagacattggtttcactcaatatggagaggaatggggagagatgaaaaagcttatagggcttgagctctttagtccaaaaacgcaaaagtcttttaggtatatcagagaggaagagagtgacttgctggtcaagaaaatttcaaaatctgctcaaacacaaaccctagtggatttgggaaaaccccttttctccttcactgccggtattatatttagacttgcgtttggacagaacttccgtaagtgcgattttatcgatagggagagagtcgaagagctggtggtagagtcagagaccaacgtaggcaccttggcattttctgacttcttccccacgggtctcggatggcttatagaccggctctctggtcaaagttcgaggatgaacaaagtcttttccaaactcaccaatttatttgaacatgtgattgatgatcatttaaagactgaacaacatcaagatcactcaaacctcatcagtgccatgttgaatatgatcaataaacccaccaatataggctctttcaagatcacttccgatcatctcaaaggagtcatgtcggatgtgtttttagcgggagtgaacgcgggagtgatcacaatgatatggacgatgacagagctaaccagacatccaagaattcgagcaacactcggttccaacaaagagagaatcacagaagaagatctagagaaagttgagtacctaaagatggtgatcgaggaaacattcagactacacccacctgctccactcttgctcccaagattaacaatgtccgacgtcacaattcaaggctacaacattcccaaaaacaccatgattgagatcaacacttataccataggtcgtgatccaaaatgttggactaaccctgaagaattcattcctgagaggttttccaacacctctataaactacaagggtcagcatttcgagctcttgccctttggagctggtcgtaggagctgtcccggaatgtccttgggaatcaccattcttgagctaggccttcttaaccttctttatttctttgattggcgtttgcccaatggaatgaccattgctgacattgacatggaagaagttggagctttaaacatagctaagaaagtacctcttgagctcgtaccaactcttcatcattcgtga

SEQ ID NO: 89338 - protein, 422 aa, Arabidopsis thaliana
  peptide (1)..(422): Ceres Seq. ID no. 12718152
  misc_feature (10)..(415): Pfam Name: Cytochrome P450 Pfam Description: Cytochrome P450
  misc_feature (1)..(422): Homolog of NCBI NO: 15231784 NR Description: cytochrome p450 family; protein id: At3g53290.1 thaliana] >gi|11249499|pir||T46175 probable cytochrome P450
  misc_feature (10)..(419): Homolog of NCBI NO: 13878369 NR Description: CYTOCHROME P450 71B8
  misc_feature (10)..(419): Homolog of NCBI NO: 22327366 NR Description: similar to cytochrome p450 family; protein id:
  misc_feature (8)..(419): Homolog of NCBI NO: 15231786 NR Description: cytochrome p450 family; protein id: At3g53300.1, by cDNA: gi_15810490 [Arabidopsis thaliana] Cytochrome P450 71B31 >gi|11249493|pir||T46176 probable
  misc_feature (10)..(421): Homolog of NCBI NO: 15231524 NR Description: cytochrome p450 family; protein id: At3g26190.1 thaliana] >gi|13878385|sp|Q9LTM2|C72L_ARATH Cytochrome P450 71B21
  misc_feature (8)..(419): Homolog of NCBI NO: 15810491 NR Description: putative cytochrome P450 protein [Arabidopsis
  misc_feature (10)..(420): Homolog of NCBI NO: 15231525 NR Description: cytochrome p450 family; protein id: At3g26200.1, by cDNA: gi_13430717 [Arabidopsis thaliana] Cytochrome P450 71B22 >gi|11994439|dbj|BAB02441.1| cytochrome
  misc_feature (11)..(420): Homolog of NCBI NO: 30923413 NR Description: Cytochrome P450 71B38
  misc_feature (11)..(420): Homolog of NCBI NO: 15229913 NR Description: cytochrome p450 family; protein id: At3g44250.1
  misc_feature (11)..(420): Homolog of NCBI NO: 15231782 NR Description: cytochrome P450 monooxygenase; protein id: supported by cDNA: gi_3164131 [Arabidopsis thaliana]
MFFYLYLSSSAKEVLKTHDLETCTRPKMVTTGLFSYNFKDIGFTQYGEEWGEMKKLIGLELFSPKTQKSFRYIREEESDLLVKKISKSAQTQTLVDLGKPLFSFTAGIIFRLAFGQNFRKCDFIDRERVEELVVESETNVGTLAFSDFFPTGLGWLIDRLSGQSSRMNKVFSKLTNLFEHVIDDHLKTEQHQDHSNLISAMLNMINKPTNIGSFKITSDHLKGVMSDVFLAGVNAGVITMIWTMTELTRHPRIRATLGSNKERITEEDLEKVEYLKMVIEETFRLHPPAPLLLPRLTMSDVTIQGYNIPKNTMIEINTYTIGRDPKCWTNPEEFIPERFSNTSINYKGQHFELLPFGAGRRSCPGMSLGITILELGLLNLLYFFDWRLPNGMTIADIDMEEVGALNIAKKVPLELVPTLHHS

SEQ ID NO: 89339 - protein, 395 aa, Arabidopsis thaliana
  peptide (1)..(395): Ceres Seq. ID no. 12718153
  misc_feature (1)..(388): Pfam Name: Cytochrome P450 Pfam Description: Cytochrome P450
  misc_feature (1)..(395): Homolog of NCBI NO: 15231784 NR Description: cytochrome p450 family; protein id: At3g53290.1 thaliana] >gi|11249499|pir||T46175 probable cytochrome P450
  misc_feature (1)..(392): Homolog of NCBI NO: 13878369 NR Description: CYTOCHROME P450 71B8
  misc_feature (1)..(392): Homolog of NCBI NO: 22327366 NR Description: similar to cytochrome p450 family; protein id:
  misc_feature (1)..(392): Homolog of NCBI NO: 15231786 NR Description: cytochrome p450 family; protein id: At3g53300.1, by cDNA: gi_15810490 [Arabidopsis thaliana] Cytochrome P450 71B31 >gi|11249493|pir||T46176 probable
  misc_feature (1)..(394): Homolog of NCBI NO: 15231524 NR Description: cytochrome p450 family; protein id: At3g26190.1 thaliana] >gi|13878385|sp|Q9LTM2|C72L_ARATH Cytochrome P450 71B21
  misc_feature (1)..(392): Homolog of NCBI NO: 15810491 NR Description: putative cytochrome P450 protein [Arabidopsis
  misc_feature (1)..(393): Homolog of NCBI NO: 15231525 NR Description: cytochrome p450 family; protein id: At3g26200.1, by cDNA: gi_13430717 [Arabidopsis thaliana] Cytochrome P450 71B22 >gi|11994439|dbj|BAB02441.1| cytochrome
  misc_feature (1)..(393): Homolog of NCBI NO: 30923413 NR Description: Cytochrome P450 71B38
  misc_feature (1)..(393): Homolog of NCBI NO: 15229913 NR Description: cytochrome p450 family; protein id: At3g44250.1
  misc_feature (1)..(393): Homolog of NCBI NO: 15231782 NR Description: cytochrome P450 monooxygenase; protein id: supported by cDNA: gi_3164131 [Arabidopsis thaliana]
MVTTGLFSYNFKDIGFTQYGEEWGEMKKLIGLELFSPKTQKSFRYIREEESDLLVKKISKSAQTQTLVDLGKPLFSFTAGIIFRLAFGQNFRKCDFIDRERVEELVVESETNVGTLAFSDFFPTGLGWLIDRLSGQSSRMNKVFSKLTNLFEHVIDDHLKTEQHQDHSNLISAMLNMINKPTNIGSFKITSDHLKGVMSDVFLAGVNAGVITMIWTMTELTRHPRIRATLGSNKERITEEDLEKVEYLKMVIEETFRLHPPAPLLLPRLTMSDVTIQGYNIPKNTMIEINTYTIGRDPKCWTNPEEFIPERFSNTSINYKGQHFELLPFGAGRRSCPGMSLGITILELGLLNLLYFFDWRLPNGMTIADIDMEEVGALNIAKKVPLELVPTLHHS

SEQ ID NO: 89340 - protein, 370 aa, Arabidopsis thaliana
  peptide (1)..(370): Ceres Seq. ID no. 12718154
  misc_feature (1)..(363): Pfam Name: Cytochrome P450 Pfam Description: Cytochrome P450
  misc_feature (1)..(370): Homolog of NCBI NO: 15231784 NR Description: cytochrome p450 family; protein id: At3g53290.1 thaliana] >gi|11249499|pir||T46175 probable cytochrome P450
  misc_feature (1)..(367): Homolog of NCBI NO: 13878369 NR Description: CYTOCHROME P450 71B8
  misc_feature (1)..(367): Homolog of NCBI NO: 22327366 NR Description: similar to cytochrome p450 family; protein id:
  misc_feature (1)..(367): Homolog of NCBI NO: 15231786 NR Description: cytochrome p450 family; protein id: At3g53300.1, by cDNA: gi_15810490 [Arabidopsis thaliana] Cytochrome P450 71B31 >gi|11249493|pir||T46176 probable
  misc_feature (1)..(369): Homolog of NCBI NO: 15231524 NR Description: cytochrome p450 family; protein id: At3g26190.1 thaliana] >gi|13878385|sp|Q9LTM2|C72L_ARATH Cytochrome P450 71B21
  misc_feature (1)..(367): Homolog of NCBI NO: 15810491 NR Description: putative cytochrome P450 protein [Arabidopsis
  misc_feature (1)..(368): Homolog of NCBI NO: 15231525 NR Description: cytochrome p450 family; protein id: At3g26200.1, by cDNA: gi_13430717 [Arabidopsis thaliana] Cytochrome P450 71B22 >gi|11994439|dbj|BAB02441.1| cytochrome
  misc_feature (1)..(368): Homolog of NCBI NO: 30923413 NR Description: Cytochrome P450 71B38
  misc_feature (1)..(368): Homolog of NCBI NO: 15229913 NR Description: cytochrome p450 family; protein id: At3g44250.1
  misc_feature (1)..(368): Homolog of NCBI NO: 15231782 NR Description: cytochrome P450 monooxygenase; protein id: supported by cDNA: gi_3164131 [Arabidopsis thaliana]
MKKLIGLELFSPKTQKSFRYIREEESDLLVKKISKSAQTQTLVDLGKPLFSFTAGIIFRLAFGQNFRKCDFIDRERVEELVVESETNVGTLAFSDFFPTGLGWLIDRLSGQSSRMNKVFSKLTNLFEHVIDDHLKTEQHQDHSNLISAMLNMINKPTNIGSFKITSDHLKGVMSDVFLAGVNAGVITMIWTMTELTRHPRIRATLGSNKERITEEDLEKVEYLKMVIEETFRLHPPAPLLLPRLTMSDVTIQGYNIPKNTMIEINTYTIGRDPKCWTNPEEFIPERFSNTSINYKGQHFELLPFGAGRRSCPGMSLGITILELGLLNLLYFFDWRLPNGMTIADIDMEEVGALNIAKKVPLELVPTLHHS

SEQ ID NO: 89341 - DNA, 1191 bp, Arabidopsis thaliana
  misc_feature (1)..(1191): Ceres Seq. ID no. 12718160
  misc_feature: MA Experiment ID: 20000171 Result: Down-regulated in Transcription
  misc_feature: MA Experiment 20000171 PARAMETER Experiment Name: At_42deg_Heat_P Parameter: Age (day) Value: 14
  misc_feature: MA Experiment 20000171 PARAMETER Experiment Name: At_42deg_Heat_P Parameter: Organism Value: A. thaliana
  misc_feature: MA Experiment 20000171 PARAMETER Experiment Name: At_42deg_Heat_P Parameter: Plant Line Value: WS
  misc_feature: MA Experiment 20000171 PARAMETER Experiment Name: At_42deg_Heat_P Parameter: Temperature (deg C) Value: 42 vs. 22
  misc_feature: MA Experiment 20000171 PARAMETER Experiment Name: At_42deg_Heat_P Parameter: Timepoint (hr) Value: 1
  misc_feature: MA Experiment 20000171 PARAMETER Experiment Name: At_42deg_Heat_P Parameter: Tissue Value: Aerial
  misc_feature: MA Experiment ID: 20000173 Result: Down-regulated in Transcription
  misc_feature: MA Experiment 20000173 PARAMETER Experiment Name: At_42deg_Heat_P Parameter: Age (day) Value: 14
  misc_feature: MA Experiment 20000173 PARAMETER Experiment Name: At_42deg_Heat_P Parameter: Organism Value: A. thaliana
  misc_feature: MA Experiment 20000173 PARAMETER Experiment Name: At_42deg_Heat_P Parameter: Plant Line Value: WS
  misc_feature: MA Experiment 20000173 PARAMETER Experiment Name: At_42deg_Heat_P Parameter: Temperature (deg C) Value: 42 vs. 22
  misc_feature: MA Experiment 20000173 PARAMETER Experiment Name: At_42deg_Heat_P Parameter: Timepoint (hr) Value: 6
  misc_feature: MA Experiment 20000173 PARAMETER Experiment Name: At_42deg_Heat_P Parameter: Tissue Value: Aerial
  misc_feature: MA Experiment ID: 20000180 Result: Up-regulated in Transcription
  misc_feature: MA Experiment 20000180 PARAMETER Experiment Name: At_Germinating_Seeds_P Parameter: Age (hr) Value: 24 vs. 0
  misc_feature: MA Experiment 20000180 PARAMETER Experiment Name: At_Germinating_Seeds_P Parameter: Tissue Value: Germinating Seeds
  misc_feature: MA Experiment ID: 20000184 Result: Down-regulated in Transcription
  misc_feature: MA Experiment 20000184 PARAMETER Experiment Name: At_Shoots__P Parameter: Age (day) Value: 7
  misc_feature: MA Experiment 20000184 PARAMETER Experiment Name: At_Shoots__P Parameter: Tissue Value: Shoots vs. Whole Plant
  misc_feature: MA Experiment ID: 20000185 Result: Up-regulated in Transcription
  misc_feature: MA Experiment 20000185 PARAMETER Experiment Name: At_Roots__P Parameter: Age (day) Value: 7 vs. 21
  misc_feature: MA Experiment 20000185 PARAMETER Experiment Name: At_Roots__P Parameter: Organism Value: A. thaliana
  misc_feature: MA Experiment 20000185 PARAMETER Experiment Name: At_Roots__P Parameter: Tissue Value: Roots vs. Whole Plant
  misc_feature: MA Experiment ID: 20000234 Result: Up-regulated in Transcription
  misc_feature: MA Experiment 20000234 PARAMETER Experiment Name: At_Siliques_P Parameter: Age (day) Value: 21
  misc_feature: MA Experiment 20000234 PARAMETER Experiment Name: At_Siliques_P Parameter: Organism Value: A. thaliana
  misc_feature: MA Experiment 20000234 PARAMETER Experiment Name: At_Siliques_P Parameter: Plant Line Value: WS
  misc_feature: MA Experiment 20000234 PARAMETER Experiment Name: At_Siliques_P Parameter: Tissue Value: Less Than 5mm Siliques vs. Whole Plant
  misc_feature: MA Experiment ID: 20000235 Result: Up-regulated in Transcription
  misc_feature: MA Experiment 20000235 PARAMETER Experiment Name: At_Siliques_P Parameter: Age (day) Value: 21
  misc_feature: MA Experiment 20000235 PARAMETER Experiment Name: At_Siliques_P Parameter: Organism Value: A. thaliana
  misc_feature: MA Experiment 20000235 PARAMETER Experiment Name: At_Siliques_P Parameter: Plant Line Value: WS
  misc_feature: MA Experiment 20000235 PARAMETER Experiment Name: At_Siliques_P Parameter: Tissue Value: 5-10mm Siliques vs. Whole Plant
  misc_feature: MA Experiment ID: 20000264 Result: Up-regulated in Transcription
  misc_feature: MA Experiment 20000264 PARAMETER Experiment Name: At_Open_Flower_P Parameter: Age (day) Value: 21
  misc_feature: MA Experiment 20000264 PARAMETER Experiment Name: At_Open_Flower_P Parameter: Plant Line Value: WS
  misc_feature: MA Experiment 20000264 PARAMETER Experiment Name: At_Open_Flower_P Parameter: Tissue Value: Open Flower vs. Whole Plant
  misc_feature: MA Experiment ID: 20000265 Result: Up-regulated in Transcription
  misc_feature: MA Experiment 20000265 PARAMETER Experiment Name: At_Open_Flower_P Parameter: Age (day) Value: 21
  misc_feature: MA Experiment 20000265 PARAMETER Experiment Name: At_Open_Flower_P Parameter: Plant Line Value: WS
  misc_feature: MA Experiment 20000265 PARAMETER Experiment Name: At_Open_Flower_P Parameter: Tissue Value: Closed Flower vs. Whole Plant
  misc_feature: MA Experiment ID: 20000286 Result: Up-regulated in Transcription
  misc_feature: MA Experiment 20000286 PARAMETER Experiment Name: At_Open_Flower_P Parameter: Age (day) Value: 21
  misc_feature: MA Experiment 20000286 PARAMETER Experiment Name: At_Open_Flower_P Parameter: Plant Line Value: WS
  misc_feature: MA Experiment 20000286 PARAMETER Experiment Name: At_Open_Flower_P Parameter: Tissue Value: Half Open vs. Whole Plant
  misc_feature: MA Experiment ID: 20000439 Result: Up-regulated in Transcription
  misc_feature: MA Experiment 20000439 PARAMETER Experiment Name: At_Roots__P Parameter: Age (day) Value: 14 vs. 21
  misc_feature: MA Experiment 20000439 PARAMETER Experiment Name: At_Roots__P Parameter: Organism Value: A. thaliana
  misc_feature: MA Experiment 20000439 PARAMETER Experiment Name: At_Roots__P Parameter: Tissue Value: Roots vs. Whole Plant
  misc_feature: MA Experiment ID: 20000794 Result: Up-regulated in Transcription
  misc_feature: MA Experiment 20000794 PARAMETER Experiment Name: At_Petals_P Parameter: Age (day) Value: 23-25 days
  misc_feature: MA Experiment 20000794 PARAMETER Experiment Name: At_Petals_P Parameter: Plant Line Value: WS
  misc_feature: MA Experiment 20000794 PARAMETER Experiment Name: At_Petals_P Parameter: Tissue Value: Petals vs. Whole plant
  misc_feature: MA Experiment ID: 20001757 Result: Down-regulated in Transcription
  misc_feature: MA Experiment 20001757 PARAMETER Experiment Name: At_50mM_NH4NO3_L-to-H_P Parameter: Timepoint (hr) Value: 6
  misc_feature: MA Experiment 20001757 PARAMETER Experiment Name: At_50mM_NH4NO3_L-to-H_P Parameter: Tissue Value: Leaf
  misc_feature: MA Experiment 20001757 PARAMETER Experiment Name: At_50mM_NH4NO3_L-to-H_P Parameter: Treatment Value: 50mM NH4NO3 vs 100mM Mannitol
atgcagactccaaaatcaaggccaggatcattggagctgccacaaaagaagtctcctttaccagctcccaaagttgttaggagactcaaaccaagcggagcagaatccgatccaaaaaccaagacaatatcgaaaactcaaatcccgaaagtagtagctgatcgtcgctctgcaagaatccctctcaatgagattcagaagaagcggacgggaaggataccggaactggaatctacgatatctcagcttcaagaagagcttaagaaggcaaaagaagagctaaacagatcagaagcattgaaaagagaagctcaagaagaagctgaagatgccaagcatcagttaatggatatcaatgcctcggaagattcaagaattgaggagctgcgtaaactctcgcaggagcgagacaagacatggcagtctgaacttgaagctatgcagagacaacacggaatggattctaccgctctgtcttctgccattaacgaagttcagaaactgaaatcgaagctctttgagtccgagtctgagttagagcagtctaagtatgaggtaaggtctttagagaaactcgtcagacagctcgaggaagaaagagtaaacagtagagactcttcatcatcaatggaagtggaagagctgaaagaagcaatgaatctttcaaggcaagagataacacaattgaaatctgcagttgaagcagcagagacaaggtatcaagaagagtatatacagagcacattgcagataagaagcgcatacgaacaaacagaggcggttaaatcaagatattcacagagagaagcagagttaacggaagaattgaacagaaccaaagatgaaatcgaaggtttgcgcaaagagttaatggagaaggtgaaagaagacgaatctacgggcgatttgaagaagctagaatcggatttgatggaagtgagagggagtttaatggataaagagatggagttgcagattctaaggagtgcaatggagaagaaagtggaaaccgcaaacacggaagccatggaagctgagcttaaaagagtgaagattcaatgtgagcaatggaggaaagctgctgagacggcagcttctatactgaacaatgatgaggaaagaacagattctattgagactagcaaaatgttgaagaagtttggtgtgttactcaagaaaaaccataagtaa

SEQ ID NO: 89342 - protein, 396 aa, Arabidopsis thaliana; identical to SEQ ID NO: 49913
  peptide (1)..(396): Ceres Seq. ID no. 12718161
  misc_feature (11)..(369): Pfam Name: Myosin tail Pfam Description: Myosin tail
  misc_feature (1)..(396): Homolog of NCBI NO: 22331765 NR Description: putative protein; protein id: At3g53350.1,
  misc_feature (1)..(396): Homolog of NCBI NO: 17978993 NR Description: AT3g53350/F4P12_50 [Arabidopsis thaliana]
  misc_feature (1)..(396): Homolog of NCBI NO: 11357801 NR Description: hypothetical protein F4P12.50 - Arabidopsis >gi|6729486|emb|CAB67642.1| putative protein [Arabidopsis
  misc_feature (1)..(298): Homolog of NCBI NO: 15228082 NR Description: putative myosin heavy chain; protein id: [Arabidopsis thaliana] >gi|25408529|pir||C84788 probable myosin
  misc_feature (1)..(383): Homolog of NCBI NO: 18076679 NR Description: P70 protein [Nicotiana tabacum]
  misc_feature (12)..(396): Homolog of NCBI NO: 15228082 NR Description: putative myosin heavy chain; protein id: [Arabidopsis thaliana] >gi|25408529|pir||C84788 probable myosin
  misc_feature (1)..(396): Homolog of NCBI NO: 8885572 NR Description: myosin heavy chain-like [Arabidopsis thaliana]
  misc_feature (7)..(396): Homolog of NCBI NO: 30697347 NR Description: expressed protein [Arabidopsis thaliana]
  misc_feature (65)..(392): Homolog of NCBI NO: 34908020 NR Description: P0460C04.20 [Oryza sativa (japonica
  misc_feature (75)..(380): Homolog of NCBI NO: 34860755 NR Description: similar to hypothetical protein [Rattus

SEQ ID NO: 89343 - protein, 281 aa, Arabidopsis thaliana; identical to SEQ ID NO: 49914
  peptide (1)..(281): Ceres Seq. ID no. 12718162
  misc_feature (1)..(254): Pfam Name: Myosin tail Pfam Description: Myosin tail
  misc_feature (1)..(281): Homolog of NCBI NO: 22331765 NR Description: putative protein; protein id: At3g53350.1,
  misc_feature (1)..(281): Homolog of NCBI NO: 17978993 NR Description: AT3g53350/F4P12_50 [Arabidopsis thaliana]
  misc_feature (1)..(281): Homolog of NCBI NO: 11357801 NR Description: hypothetical protein F4P12.50 - Arabidopsis >gi|6729486|emb|CAB67642.1| putative protein [Arabidopsis
  misc_feature (1)..(183): Homolog of NCBI NO: 15228082 NR Description: putative myosin heavy chain; protein id: [Arabidopsis thaliana] >gi|25408529|pir||C84788 probable myosin
  misc_feature (1)..(268): Homolog of NCBI NO: 18076679 NR Description: P70 protein [Nicotiana tabacum]
  misc_feature (1)..(281): Homolog of NCBI NO: 15228082 NR Description: putative myosin heavy chain; protein id: [Arabidopsis thaliana] >gi|25408529|pir||C84788 probable myosin
  misc_feature (1)..(281): Homolog of NCBI NO: 8885572 NR Description: myosin heavy chain-like [Arabidopsis thaliana]
  misc_feature (1)..(281): Homolog of NCBI NO: 30697347 NR Description: expressed protein [Arabidopsis thaliana]
  misc_feature (1)..(277): Homolog of NCBI NO: 34908020 NR Description: P0460C04.20 [Oryza sativa (japonica
  misc_feature (1)..(265): Homolog of NCBI NO: 34860755 NR Description: similar to hypothetical protein [Rattus

SEQ ID NO: 89344 - protein, 250 aa, Arabidopsis thaliana; identical to SEQ ID NO: 49915
  peptide (1)..(250): Ceres Seq. ID no. 12718163
  misc_feature (1)..(223): Pfam Name: Myosin tail Pfam Description: Myosin tail
  misc_feature (1)..(250): Homolog of NCBI NO: 22331765 NR Description: putative protein; protein id: At3g53350.1,
  misc_feature (1)..(250): Homolog of NCBI NO: 17978993 NR Description: AT3g53350/F4P12_50 [Arabidopsis thaliana]
  misc_feature (1)..(250): Homolog of NCBI NO: 11357801 NR Description: hypothetical protein F4P12.50 - Arabidopsis >gi|6729486|emb|CAB67642.1| putative protein [Arabidopsis
  misc_feature (1)..(152): Homolog of NCBI NO: 15228082 NR Description: putative myosin heavy chain; protein id: [Arabidopsis thaliana] >gi|25408529|pir||C84788 probable myosin
  misc_feature (1)..(237): Homolog of NCBI NO: 18076679 NR Description: P70 protein [Nicotiana tabacum]
  misc_feature (1)..(250): Homolog of NCBI NO: 15228082 NR Description: putative myosin heavy chain; protein id: [Arabidopsis thaliana] >gi|25408529|pir||C84788 probable myosin
  misc_feature (1)..(250): Homolog of NCBI NO: 8885572 NR Description: myosin heavy chain-like [Arabidopsis thaliana]
  misc_feature (1)..(250): Homolog of NCBI NO: 30697347 NR Description: expressed protein [Arabidopsis thaliana]
  misc_feature (1)..(246): Homolog of NCBI NO: 34908020 NR Description: P0460C04.20 [Oryza sativa (japonica
  misc_feature (1)..(234): Homolog of NCBI NO: 34860755 NR Description: similar to hypothetical protein [Rattus

SEQ ID NO: 89345 - DNA, 1890 bp, Arabidopsis thaliana
  misc_feature (1)..(1890): Ceres Seq. ID no. 12718164
  misc_feature: MA Experiment ID: 20000180 Result: Up-regulated in Transcription
  misc_feature: MA Experiment 20000180 PARAMETER Experiment Name: At_Germinating_Seeds_P Parameter: Age (hr) Value: 24 vs. 0
  misc_feature: MA Experiment 20000180 PARAMETER Experiment Name: At_Germinating_Seeds_P Parameter: Tissue Value: Germinating Seeds
  misc_feature: MA Experiment ID: 20000184 Result: Up-regulated in Transcription
  misc_feature: MA Experiment 20000184 PARAMETER Experiment Name: At_Shoots__P Parameter: Age (day) Value: 7
  misc_feature: MA Experiment 20000184 PARAMETER Experiment Name: At_Shoots__P Parameter: Tissue Value: Shoots vs. Whole Plant
  misc_feature: MA Experiment ID: 20000265 Result: Up-regulated in Transcription
  misc_feature: MA Experiment 20000265 PARAMETER Experiment Name: At_Open_Flower_P Parameter: Age (day) Value: 21
  misc_feature: MA Experiment 20000265 PARAMETER Experiment Name: At_Open_Flower_P Parameter: Plant Line Value: WS
  misc_feature: MA Experiment 20000265 PARAMETER Experiment Name: At_Open_Flower_P Parameter: Tissue Value: Closed Flower vs. Whole Plant
  misc_feature: MA Experiment ID: 20000437 Result: Down-regulated in Transcription
  misc_feature: MA Experiment 20000437 PARAMETER Experiment Name: At_Drought_P Parameter: Age (day) Value: 8
  misc_feature: MA Experiment 20000437 PARAMETER Experiment Name: At_Drought_P Parameter: Organism Value: A. thaliana
  misc_feature: MA Experiment 20000437 PARAMETER Experiment Name: At_Drought_P Parameter: Plant Line Value: WS
  misc_feature: MA Experiment 20000437 PARAMETER Experiment Name: At_Drought_P Parameter: Timepoint (hr) Value: 24
  misc_feature: MA Experiment 20000437 PARAMETER Experiment Name: At_Drought_P Parameter: Tissue Value: Whole Plant
  misc_feature: MA Experiment 20000437 PARAMETER Experiment Name: At_Drought_P Parameter: Treatment Value: Drought vs. No Drought
  misc_feature: MA Experiment ID: 20000438 Result: Up-regulated in Transcription
  misc_feature: MA Experiment 20000438 PARAMETER Experiment Name: At_Shoots__P Parameter: Age (day) Value: 14
  misc_feature: MA Experiment 20000438 PARAMETER Experiment Name: At_Shoots__P Parameter: Tissue Value: Shoots vs. Whole Plant
atgtctctctttctctccttcttcatttcaatcttgctctgtttcttcaatggagctacgacgacacagtttgatttctccacgctagccataagcaacctcaaactcctcggtgatgcacgtttaagcaatggaatcgttggcctcacacgtgacctctctgtacctaattccggcgccggaaaagtcttatactctaacccaatcagattccgacaacctggaactcactttccgacaagcttctcttcttttttctccttctctataaccaatgtcaacccttcttccatcggcggtggtctcgctttcgtcatctctcccgacgcaaactcaatcggcatcgctggtggctctcttggtctaaccggtccaaacggttccggttcaaaatttgtcgccgtcgaattcgatactttaatggatgtagatttcaaggacattaacagtaaccatgttggattcgacgtaaatggcgtagtttcctctgtttccggtgatcttggcaccgtaaacatcgatctcaagagcggcaacaccatcaattcatggatcgaatacgacggattgactcgggtcttcaacgtatcagtctcttactcaaatctgaaaccgaaagttccaattttgtctttccctctcgatttagatcgatacgtgaacgatttcatgttcgttggattctccgggtcaactcagggaagtacagagattcacagtatcgaatggtggagcttcagttcatcattcgggtcgagtctcggatccggatccgggtcacctcctcctcgggctaatttgatgaatccgaaagctaattcggtgaaatctccgccctataaagaactcaaagccggcacaaagaacttcaacgagagtcgtatcatcggacatggagccttcggagtcgtatacagaggaatattaccggagaccggagacatcgtcgccgtcaaacgatgcagccatagctcacaagacaaaaagaacgagtttttatctgaactatcaataatcggaagcttaagacacagaaacctcgtgagattacaaggatggtgtcacgagaaaggtgagattttgttagtctacgatctaatgcctaatggttcgcttgataaagctttgtttgagtcacgattcacgttaccgtgggatcatcggaaaaagatcttgcttggtgttgcatctgctttagcttatttacatagagagtgtgagaatcaggtgattcatagagatgttaagagtagtaatataatgttagatgagagttttaatgccaagcttggagatttcggattggcgagacagattgagcatgataagtcgccggaagcaactgttgccgccgggacgatgggatatttagcgccggagtatcttctgacgggtcgtgcttcggagaagacggatgtgtttagttacggagcggtggttttggaagtggttagtggaagaagaccgattgagaaggacttaaatgtgcaaagacataatgttggggtgaatccgaatttagtagaatgggtgtggggtttgtataaagaagggaaagtttctgcagctgctgattctaggcttgaaggtaagtttgatgaaggtgagatgtggcgggtcttggttgtgggcttggcttgttcgcatccggatccagcatttaggcccactatgaggtcagtggtgcaaatgctgattggtgaggctgatgtaccggttgtgcctaagtctagacccaccatgagttttagcacttcgcatttgttgctgagtttgcaagatactctctctgattgtaataccgtggctttgaactctagtcgatcgtcttcgtggtcggtgcccgaacataacgttatcattcgaagcgacgatgaccatttggtatag

SEQ ID NO: 89346 - protein, 629 aa, Arabidopsis thaliana
  peptide (1)..(629): Ceres Seq. ID no. 12718165
  misc_feature (290)..(489): Pfam Name: Protein kinase domain Pfam Description: Protein kinase domain
  misc_feature (275)..(625): Homolog of NCBI NO: 15242646 NR Description: receptor like protein kinase; protein id: supported by cDNA: gi_20260625 [Arabidopsis thaliana]
  misc_feature (22)..(279): Homolog of NCBI NO: 15242646 NR Description: receptor like protein kinase; protein id: supported by cDNA: gi_20260625 [Arabidopsis thaliana]
  misc_feature (280)..(598): Homolog of NCBI NO: 15241048 NR Description: serine/threonine-specific kinase like protein;
  misc_feature (16)..(249): Homolog of NCBI NO: 15241048 NR Description: serine/threonine-specific kinase like protein;
  misc_feature (282)..(581): Homolog of NCBI NO: 15238300 NR Description: receptor lectin kinase-like protein; protein id:
  misc_feature (13)..(252): Homolog of NCBI NO: 15238300 NR Description: receptor lectin kinase-like protein; protein id:
  misc_feature (280)..(572): Homolog of NCBI NO: 38112429 NR Description: lectin-like receptor kinase 7;3 [Medicago
  misc_feature (4)..(246): Homolog of NCBI NO: 38112429 NR Description: lectin-like receptor kinase 7;3 [Medicago
  misc_feature (280)..(583): Homolog of NCBI NO: 15289871 NR Description: putative receptor protein kinase-like protein
  misc_feature (21)..(249): Homolog of NCBI NO: 15289871 NR Description: putative receptor protein kinase-like protein
MSLFLSFFISILLCFFNGATTTQFDFSTLAISNLKLLGDARLSNGIVGLTRDLSVPNSGAGKVLYSNPIRFRQPGTHFPTSFSSFFSFSITNVNPSSIGGGLAFVISPDANSIGIAGGSLGLTGPNGSGSKFVAVEFDTLMDVDFKDINSNHVGFDVNGVVSSVSGDLGTVNIDLKSGNTINSWIEYDGLTRVFNVSVSYSNLKPKVPILSFPLDLDRYVNDFMFVGFSGSTQGSTEIHSIEWWSFSSSFGSSLGSGSGSPPPRANLMNPKANSVKSPPYKELKAGTKNFNESRIIGHGAFGVVYRGILPETGDIVAVKRCSHSSQDKKNEFLSELSIIGSLRHRNLVRLQGWCHEKGEILLVYDLMPNGSLDKALFESRFTLPWDHRKKILLGVASALAYLHRECENQVIHRDVKSSNIMLDESFNAKLGDFGLARQIEHDKSPEATVAAGTMGYLAPEYLLTGRASEKTDVFSYGAVVLEVVSGRRPIEKDLNVQRHNVGVNPNLVEWVWGLYKEGKVSAAADSRLEGKFDEGEMWRVLVVGLACSHPDPAFRPTMRSVVQMLIGEADVPVVPKSRPTMSFSTSHLLLSLQDTLSDCNTVALNSSRSSSWSVPEHNVIIRSDDDHLV

SEQ ID NO: 89347 - protein, 489 aa, Arabidopsis thaliana
  peptide (1)..(489): Ceres Seq. ID no. 12718166
  misc_feature (150)..(349): Pfam Name: Protein kinase domain Pfam Description: Protein kinase domain
  misc_feature (135)..(485): Homolog of NCBI NO: 15242646 NR Description: receptor like protein kinase; protein id: supported by cDNA: gi_20260625 [Arabidopsis thaliana]
  misc_feature (1)..(139): Homolog of NCBI NO: 15242646 NR Description: receptor like protein kinase; protein id: supported by cDNA: gi_20260625 [Arabidopsis thaliana]
  misc_feature (140)..(458): Homolog of NCBI NO: 15241048 NR Description: serine/threonine-specific kinase like protein;
  misc_feature (1)..(109): Homolog of NCBI NO: 15241048 NR Description: serine/threonine-specific kinase like protein;
  misc_feature (142)..(441): Homolog of NCBI NO: 15238300 NR Description: receptor lectin kinase-like protein; protein id:
  misc_feature (1)..(112): Homolog of NCBI NO: 15238300 NR Description: receptor lectin kinase-like protein; protein id:
  misc_feature (140)..(432): Homolog of NCBI NO: 38112429 NR Description: lectin-like receptor kinase 7;3 [Medicago
  misc_feature (1)..(106): Homolog of NCBI NO: 38112429 NR Description: lectin-like receptor kinase 7;3 [Medicago
  misc_feature (140)..(443): Homolog of NCBI NO: 15289871 NR Description: putative receptor protein kinase-like protein
  misc_feature (1)..(109): Homolog of NCBI NO: 15289871 NR Description: putative receptor protein kinase-like protein
MDVDFKDINSNHVGFDVNGVVSSVSGDLGTVNIDLKSGNTINSWIEYDGLTRVFNVSVSYSNLKPKVPILSFPLDLDRYVNDFMFVGFSGSTQGSTEIHSIEWWSFSSSFGSSLGSGSGSPPPRANLMNPKANSVKSPPYKELKAGTKNFNESRIIGHGAFGVVYRGILPETGDIVAVKRCSHSSQDKKNEFLSELSIIGSLRHRNLVRLQGWCHEKGEILLVYDLMPNGSLDKALFESRFTLPWDHRKKILLGVASALAYLHRECENQVIHRDVKSSNIMLDESFNAKLGDFGLARQIEHDKSPEATVAAGTMGYLAPEYLLTGRASEKTDVFSYGAVVLEVVSGRRPIEKDLNVQRHNVGVNPNLVEWVWGLYKEGKVSAAADSRLEGKFDEGEMWRVLVVGLACSHPDPAFRPTMRSVVQMLIGEADVPVVPKSRPTMSFSTSHLLLSLQDTLSDCNTVALNSSRSSSWSVPEHNVIIRSDDDHLV

SEQ ID NO: 89348 - protein, 406 aa, Arabidopsis thaliana
  peptide (1)..(406): Ceres Seq. ID no. 12718167
  misc_feature (67)..(266): Pfam Name: Protein kinase domain Pfam Description: Protein kinase domain
  misc_feature (52)..(402): Homolog of NCBI NO: 15242646 NR Description: receptor like protein kinase; protein id: supported by cDNA: gi_20260625 [Arabidopsis thaliana]
  misc_feature (1)..(56): Homolog of NCBI NO: 15242646 NR Description: receptor like protein kinase; protein id: supported by cDNA: gi_20260625 [Arabidopsis thaliana]
  misc_feature (57)..(375): Homolog of NCBI NO: 15241048 NR Description: serine/threonine-specific kinase like protein;
  misc_feature (1)..(26): Homolog of NCBI NO: 15241048 NR Description: serine/threonine-specific kinase like protein;
  misc_feature (59)..(358): Homolog of NCBI NO: 15238300 NR Description: receptor lectin kinase-like protein; protein id:
  misc_feature (1)..(29): Homolog of NCBI NO: 15238300 NR Description: receptor lectin kinase-like protein; protein id:
  misc_feature (57)..(349): Homolog of NCBI NO: 38112429 NR Description: lectin-like receptor kinase 7;3 [Medicago
  misc_feature (1)..(23): Homolog of NCBI NO: 38112429 NR Description: lectin-like receptor kinase 7;3 [Medicago
  misc_feature (57)..(360): Homolog of NCBI NO: 15289871 NR Description: putative receptor protein kinase-like protein
  misc_feature (1)..(26): Homolog of NCBI NO: 15289871 NR Description: putative receptor protein kinase-like protein
MFVGFSGSTQGSTEIHSIEWWSFSSSFGSSLGSGSGSPPPRANLMNPKANSVKSPPYKELKAGTKNFNESRIIGHGAFGVVYRGILPETGDIVAVKRCSHSSQDKKNEFLSELSIIGSLRHRNLVRLQGWCHEKGEILLVYDLMPNGSLDKALFESRFTLPWDHRKKILLGVASALAYLHRECENQVIHRDVKSSNIMLDESFNAKLGDFGLARQIEHDKSPEATVAAGTMGYLAPEYLLTGRASEKTDVFSYGAVVLEVVSGRRPIEKDLNVQRHNVGVNPNLVEWVWGLYKEGKVSAAADSRLEGKFDEGEMWRVLVVGLACSHPDPAFRPTMRSVVQMLIGEADVPVVPKSRPTMSFSTSHLLLSLQDTLSDCNTVALNSSRSSSWSVPEHNVIIRSDDDHLV

SEQ ID NO: 89349 - DNA, 1532 bp, Arabidopsis thaliana
  misc_feature (1)..(1532): Ceres Seq. ID no. 12718175
  misc_feature: MA Experiment ID: 108434 Result: Up-regulated in Transcription
  misc_feature: MA Experiment 108434 PARAMETER Experiment Name: At_Root_Tips_cDNA_P Parameter: Tissue Value: Root Tips
  misc_feature: MA Experiment ID: 108462 Result: Down-regulated in Transcription
  misc_feature: MA Experiment 108462 PARAMETER Experiment Name: At_Germinating_Seeds_cDNA_P Parameter: Age (day) Value: 2 vs. 0
  misc_feature: MA Experiment 108462 PARAMETER Experiment Name: At_Germinating_Seeds_cDNA_P Parameter: Tissue Value: Germinating Seeds
  misc_feature: MA Experiment ID: 108463 Result: Down-regulated in Transcription
  misc_feature: MA Experiment 108463 PARAMETER Experiment Name: At_Germinating_Seeds_cDNA_P Parameter: Age (day) Value: 3 vs. 0
  misc_feature: MA Experiment 108463 PARAMETER Experiment Name: At_Germinating_Seeds_cDNA_P Parameter: Tissue Value: Germinating Seeds
  misc_feature: MA Experiment ID: 108464 Result: Down-regulated in Transcription
  misc_feature: MA Experiment 108464 PARAMETER Experiment Name: At_Germinating_Seeds_cDNA_P Parameter: Age (day) Value: 4 vs. 0
  misc_feature: MA Experiment 108464 PARAMETER Experiment Name: At_Germinating_Seeds_cDNA_P Parameter: Tissue Value: Germinating Seeds
  misc_feature: MA Experiment ID: 108488 Result: Up-regulated in Transcription
  misc_feature: MA Experiment ID: 108489 Result: Up-regulated in Transcription
  misc_feature: MA Experiment ID: 108561 Result: Down-regulated in Transcription
  misc_feature: MA Experiment 108561 PARAMETER Experiment Name: At_100uM_ABA_cDNA_P Parameter: Timepoint (hr) Value: 6
  misc_feature: MA Experiment 108561 PARAMETER Experiment Name: At_100uM_ABA_cDNA_P Parameter: Tissue Value: Aerial
  misc_feature: MA Experiment 108561 PARAMETER Experiment Name: At_100uM_ABA_cDNA_P Parameter: Treatment Value: 100uM ABA vs. No Treatment
  misc_feature: MA Experiment ID: 108573 Result: Down-regulated in Transcription
  misc_feature: MA Experiment 108573 PARAMETER Experiment Name: At_Drought_cDNA_P Parameter: Timepoint (hr) Value: 6
  misc_feature: MA Experiment 108573 PARAMETER Experiment Name: At_Drought_cDNA_P Parameter: Tissue Value: Aerial
  misc_feature: MA Experiment 108573 PARAMETER Experiment Name: At_Drought_cDNA_P Parameter: Treatment Value: Drought vs. No Drought
  misc_feature: MA Experiment ID: 108577 Result: Down-regulated in Transcription
  misc_feature: MA Experiment 108577 PARAMETER Experiment Name: At_42deg_Heat_cDNA_P Parameter: Temperature (deg C) Value: 42 vs. 22
  misc_feature: MA Experiment 108577 PARAMETER Experiment Name: At_42deg_Heat_cDNA_P Parameter: Timepoint (hr) Value: 6
  misc_feature: MA Experiment 108577 PARAMETER Experiment Name: At_42deg_Heat_cDNA_P Parameter: Tissue Value: Aerial
  misc_feature: MA Experiment ID: 108595 Result: Down-regulated in Transcription
  misc_feature: MA Experiment 108595 PARAMETER Experiment Name: At_Ler-pi_Ovule_cDNA_P Parameter: Plant Line Value: null
  misc_feature: MA Experiment ID: 108605 Result: Down-regulated in Transcription
  misc_feature: MA Experiment 108605 PARAMETER Experiment Name: At_100uM_ABA_cDNA_P Parameter: Timepoint (hr) Value: 6
  misc_feature: MA Experiment 108605 PARAMETER Experiment Name: At_100uM_ABA_cDNA_P Parameter: Tissue Value: Aerial
  misc_feature: MA Experiment 108605 PARAMETER Experiment Name: At_100uM_ABA_cDNA_P Parameter: Treatment Value: 100uM ABA vs. No Treatment
  misc_feature: MA Experiment ID: 108607 Result: Down-regulated in Transcription
  misc_feature: MA Experiment 108607 PARAMETER Experiment Name: At_100uM_ABA_cDNA_P Parameter: Timepoint (hr) Value: 4
  misc_feature: MA Experiment 108607 PARAMETER Experiment Name: At_100uM_ABA_cDNA_P Parameter: Tissue Value: Aerial
  misc_feature: MA Experiment 108607 PARAMETER Experiment Name: At_100uM_ABA_cDNA_P Parameter: Treatment Value: 100uM ABA vs. No Treatment
  misc_feature: MA Experiment ID: 20000069 Result: Up-regulated in Transcription
  misc_feature: MA Experiment 20000069 PARAMETER Experiment Name: At_100uM_ABA_Mutants_cDNA_P Parameter: Plant Line Value: CS23
  misc_feature: MA Experiment 20000069 PARAMETER Experiment Name: At_100uM_ABA_Mutants_cDNA_P Parameter: Timepoint (hr) Value: 6
  misc_feature: MA Experiment 20000069 PARAMETER Experiment Name: At_100uM_ABA_Mutants_cDNA_P Parameter: Tissue Value: Aerial
  misc_feature: MA Experiment 20000069 PARAMETER Experiment Name: At_100uM_ABA_Mutants_cDNA_P Parameter: Treatment Value: 100uM ABA vs. No Treatment
  misc_feature: MA Experiment ID: 20000071 Result: Up-regulated in Transcription
  misc_feature: MA Experiment 20000071 PARAMETER Experiment Name: At_100uM_ABA_Mutants_cDNA_P Parameter: Plant Line Value: CS8104
  misc_feature: MA Experiment 20000071 PARAMETER Experiment Name: At_100uM_ABA_Mutants_cDNA_P Parameter: Timepoint (hr) Value: 6
  misc_feature: MA Experiment 20000071 PARAMETER Experiment Name: At_100uM_ABA_Mutants_cDNA_P Parameter: Tissue Value: Aerial
  misc_feature: MA Experiment 20000071 PARAMETER Experiment Name: At_100uM_ABA_Mutants_cDNA_P Parameter: Treatment Value: 100uM ABA vs. No Treatment
  misc_feature: MA Experiment ID: 20000072 Result: Up-regulated in Transcription
  misc_feature: MA Experiment 20000072 PARAMETER Experiment Name: At_100uM_ABA_Mutants_cDNA_P Parameter: Plant Line Value: CS8105
  misc_feature: MA Experiment 20000072 PARAMETER Experiment Name: At_100uM_ABA_Mutants_cDNA_P Parameter: Timepoint (hr) Value: 6
  misc_feature: MA Experiment 20000072 PARAMETER Experiment Name: At_100uM_ABA_Mutants_cDNA_P Parameter: Tissue Value: Aerial
  misc_feature: MA Experiment 20000072 PARAMETER Experiment Name: At_100uM_ABA_Mutants_cDNA_P Parameter: Treatment Value: 100uM ABA vs. No Treatment
  misc_feature: MA Experiment ID: 20000086 Result: Up-regulated in Transcription
  misc_feature: MA Experiment 20000086 PARAMETER Experiment Name: At_100uM_ABA_Mutants_cDNA_P Parameter: Plant Line Value: CS22
  misc_feature: MA Experiment 20000086 PARAMETER Experiment Name: At_100uM_ABA_Mutants_cDNA_P Parameter: Timepoint (hr) Value: 6
  misc_feature: MA Experiment 20000086 PARAMETER Experiment Name: At_100uM_ABA_Mutants_cDNA_P Parameter: Tissue Value: Aerial
  misc_feature: MA Experiment 20000086 PARAMETER Experiment Name: At_100uM_ABA_Mutants_cDNA_P Parameter: Treatment Value: 100uM ABA vs. No Treatment
  misc_feature: MA Experiment ID: 20000088 Result: Up-regulated in Transcription
  misc_feature: MA Experiment 20000088 PARAMETER Experiment Name: At_100uM_ABA_Mutants_cDNA_P Parameter: Plant Line Value: Landsberg
  misc_feature: MA Experiment 20000088 PARAMETER Experiment Name: At_100uM_ABA_Mutants_cDNA_P Parameter: Timepoint (hr) Value: 6
  misc_feature: MA Experiment 20000088 PARAMETER Experiment Name: At_100uM_ABA_Mutants_cDNA_P Parameter: Tissue Value: Aerial
  misc_feature: MA Experiment 20000088 PARAMETER Experiment Name: At_100uM_ABA_Mutants_cDNA_P Parameter: Treatment Value: 100uM ABA vs. No Treatment
  misc_feature: MA Experiment ID: 20000089 Result: Up-regulated in Transcription
  misc_feature: MA Experiment ID: 20000090 Result: Up-regulated in Transcription
  misc_feature: MA Experiment ID: 20000169 Result: Down-regulated in Transcription
  misc_feature: MA Experiment 20000169 PARAMETER Experiment Name: At_100uM_ABA_P Parameter: Age (day) Value: 14
  misc_feature: MA Experiment 20000169 PARAMETER Experiment Name: At_100uM_ABA_P Parameter: Organism Value: A. thaliana
  misc_feature: MA Experiment 20000169 PARAMETER Experiment Name: At_100uM_ABA_P Parameter: Plant Line Value: WS
  misc_feature: MA Experiment 20000169 PARAMETER Experiment Name: At_100uM_ABA_P Parameter: Timepoint (hr) Value: 6
  misc_feature: MA Experiment 20000169 PARAMETER Experiment Name: At_100uM_ABA_P Parameter: Tissue Value: Aerial
  misc_feature: MA Experiment 20000169 PARAMETER Experiment Name: At_100uM_ABA_P Parameter: Treatment Value: 100uM ABA vs. No Treatment
  misc_feature: MA Experiment ID: 20000182 Result: Down-regulated in Transcription
  misc_feature: MA Experiment 20000182 PARAMETER Experiment Name: At_2mM_SA_P Parameter: Age (day) Value: 14
  misc_feature: MA Experiment 20000182 PARAMETER Experiment Name: At_2mM_SA_P Parameter: Organism Value: A. thaliana
  misc_feature: MA Experiment 20000182 PARAMETER Experiment Name: At_2mM_SA_P Parameter: Plant Line Value: WS
  misc_feature: MA Experiment 20000182 PARAMETER Experiment Name: At_2mM_SA_P Parameter: Timepoint (hr) Value: 6
  misc_feature: MA Experiment 20000182 PARAMETER Experiment Name: At_2mM_SA_P Parameter: Tissue Value: Aerial
  misc_feature: MA Experiment 20000182 PARAMETER Experiment Name: At_2mM_SA_P Parameter: Treatment Value: 2mM SA vs. No Treatment
  misc_feature: MA Experiment ID: 20000185 Result: Down-regulated in Transcription
  misc_feature: MA Experiment 20000185 PARAMETER Experiment Name: At_Roots__P Parameter: Age (day) Value: 7 vs. 21
  misc_feature: MA Experiment 20000185 PARAMETER Experiment Name: At_Roots__P Parameter: Organism Value: A. thaliana
  misc_feature: MA Experiment 20000185 PARAMETER Experiment Name: At_Roots__P Parameter: Tissue Value: Roots vs. Whole Plant
  misc_feature: MA Experiment ID: 20000213 Result: Up-regulated in Transcription
  misc_feature: MA Experiment 20000213 PARAMETER Experiment Name: At_4deg_Cold_P Parameter: Timepoint (hr) Value: 2
  misc_feature: MA Experiment ID: 20000224 Result: Down-regulated in Transcription
  misc_feature: MA Experiment ID: 20000264 Result: Down-regulated in Transcription
  misc_feature: MA Experiment 20000264 PARAMETER Experiment Name: At_Open_Flower_P Parameter: Age (day) Value: 21
  misc_feature: MA Experiment 20000264 PARAMETER Experiment Name: At_Open_Flower_P Parameter: Plant Line Value: WS
  misc_feature: MA Experiment 20000264 PARAMETER Experiment Name: At_Open_Flower_P Parameter: Tissue Value: Open Flower vs. Whole Plant
  misc_feature: MA Experiment ID: 20000436 Result: Down-regulated in Transcription
  misc_feature: MA Experiment 20000436 PARAMETER Experiment Name: At_Drought_P Parameter: Age (day) Value: 7
  misc_feature: MA Experiment 20000436 PARAMETER Experiment Name: At_Drought_P Parameter: Organism Value: A. thaliana
  misc_feature: MA Experiment 20000436 PARAMETER Experiment Name: At_Drought_P Parameter: Plant Line Value: WS
  misc_feature: MA Experiment 20000436 PARAMETER Experiment Name: At_Drought_P Parameter: Timepoint (hr) Value: 12
  misc_feature: MA Experiment 20000436 PARAMETER Experiment Name: At_Drought_P Parameter: Tissue Value: Whole Plant
  misc_feature: MA Experiment 20000436 PARAMETER Experiment Name: At_Drought_P Parameter: Treatment Value: Drought vs. No Drought
  misc_feature: MA Experiment ID: 20000439 Result: Down-regulated in Transcription
  misc_feature: MA Experiment 20000439 PARAMETER Experiment Name: At_Roots__P Parameter: Age (day) Value: 14 vs. 21
  misc_feature: MA Experiment 20000439 PARAMETER Experiment Name: At_Roots__P Parameter: Organism Value: A. thaliana
  misc_feature: MA Experiment 20000439 PARAMETER Experiment Name: At_Roots__P Parameter: Tissue Value: Roots vs. Whole Plant
  misc_feature: MA Experiment ID: 20000527 Result: Up-regulated in Transcription
  misc_feature: MA Experiment 20000527 PARAMETER Experiment Name: At_10percent_PEG_P Parameter: Age (day) Value: 20
  misc_feature: MA Experiment 20000527 PARAMETER Experiment Name: At_10percent_PEG_P Parameter: Organism Value: A. thaliana
  misc_feature: MA Experiment 20000527 PARAMETER Experiment Name: At_10percent_PEG_P Parameter: Plant Line Value: WS
  misc_feature: MA Experiment 20000527 PARAMETER Experiment Name: At_10percent_PEG_P Parameter: Timepoint (day) Value: 20
  misc_feature: MA Experiment 20000527 PARAMETER Experiment Name: At_10percent_PEG_P Parameter: Tissue Value: Whole Plant
  misc_feature: MA Experiment 20000527 PARAMETER Experiment Name: At_10percent_PEG_P Parameter: Treatment Value: 10percent PEG vs. No Treatment
  misc_feature: MA Experiment ID: 20000709 Result: Up-regulated in Transcription
  misc_feature: MA Experiment 20000709 PARAMETER Experiment Name: At_15mM_NH4NO3_L-to-H_P Parameter: Age (hr) Value: 14
  misc_feature: MA Experiment 20000709 PARAMETER Experiment Name: At_15mM_NH4NO3_L-to-H_P Parameter: Organism Value: A. thaliana
  misc_feature: MA Experiment 20000709 PARAMETER Experiment Name: At_15mM_NH4NO3_L-to-H_P Parameter: Plant Line Value: WS
  misc_feature: MA Experiment 20000709 PARAMETER Experiment Name: At_15mM_NH4NO3_L-to-H_P Parameter: Timepoint (hr) Value: 4
  misc_feature: MA Experiment 20000709 PARAMETER Experiment Name: At_15mM_NH4NO3_L-to-H_P Parameter: Tissue Value: Aerial
  misc_feature: MA Experiment 20000709 PARAMETER Experiment Name: At_15mM_NH4NO3_L-to-H_P Parameter: Treatment Value: 15mM NH4NO3 vs. 30mM Mannitol
  misc_feature: MA Experiment ID: 20000794 Result: Down-regulated in Transcription
  misc_feature: MA Experiment 20000794 PARAMETER Experiment Name: At_Petals_P Parameter: Age (day) Value: 23-25 days
  misc_feature: MA Experiment 20000794 PARAMETER Experiment Name: At_Petals_P Parameter: Plant Line Value: WS
  misc_feature: MA Experiment 20000794 PARAMETER Experiment Name: At_Petals_P Parameter: Tissue Value: Petals vs. Whole plant
  misc_feature: MA Experiment ID: 20001248 Result: Up-regulated in Transcription
  misc_feature: MA Experiment 20001248 PARAMETER Experiment Name: At_Far-red-induction_P Parameter: Age (day) Value: 7
  misc_feature: MA Experiment 20001248 PARAMETER Experiment Name: At_Far-red-induction_P Parameter: Light Value: Far-red vs. White
  misc_feature: MA Experiment 20001248 PARAMETER Experiment Name: At_Far-red-induction_P Parameter: Organism Value: A. thaliana
  misc_feature: MA Experiment 20001248 PARAMETER Experiment Name: At_Far-red-induction_P Parameter: Plant Line Value: Columbia
  misc_feature: MA Experiment 20001248 PARAMETER Experiment Name: At_Far-red-induction_P Parameter: Timepoint (hr) Value: 4
  misc_feature: MA Experiment 20001248 PARAMETER Experiment Name: At_Far-red-induction_P Parameter: Tissue Value: Whole Plant
  misc_feature: MA Experiment ID: 20001458 Result: Up-regulated in Transcription
  misc_feature: MA Experiment 20001458 PARAMETER Experiment Name: At_50mM_NH4NO3_L-to-H_P Parameter: Age (day) Value: Undefined
  misc_feature: MA Experiment 20001458 PARAMETER Experiment Name: At_50mM_NH4NO3_L-to-H_P Parameter: Organism Value: Undefined
  misc_feature: MA Experiment 20001458 PARAMETER Experiment Name: At_50mM_NH4NO3_L-to-H_P Parameter: Plant Line Value: Undefined
  misc_feature: MA Experiment 20001458 PARAMETER Experiment Name: At_50mM_NH4NO3_L-to-H_P Parameter: Timepoint (hr) Value: 2
  misc_feature: MA Experiment 20001458 PARAMETER Experiment Name: At_50mM_NH4NO3_L-to-H_P Parameter: Tissue Value: Siliques
  misc_feature: MA Experiment 20001458 PARAMETER Experiment Name: At_50mM_NH4NO3_L-to-H_P Parameter: Treatment Value: 50mM NH4NO3 vs. 100mM Manitol
  misc_feature: MA Experiment ID: 20001556 Result: Up-regulated in Transcription
  misc_feature: MA Experiment 20001556 PARAMETER Experiment Name: At_Drought_Soil_Dry_P Parameter: Age (day) Value: 26
  misc_feature: MA Experiment 20001556 PARAMETER Experiment Name: At_Drought_Soil_Dry_P Parameter: Organism Value: A. thaliana
  misc_feature: MA Experiment 20001556 PARAMETER Experiment Name: At_Drought_Soil_Dry_P Parameter: Plant Line Value: WS
  misc_feature: MA Experiment 20001556 PARAMETER Experiment Name: At_Drought_Soil_Dry_P Parameter: Post Timepoint (hr) Value: None
  misc_feature: MA Experiment 20001556 PARAMETER Experiment Name: At_Drought_Soil_Dry_P Parameter: Post-Treatment Value: None
  misc_feature: MA Experiment 20001556 PARAMETER Experiment Name: At_Drought_Soil_Dry_P Parameter: Timepoint (day) Value: 12
  misc_feature: MA Experiment 20001556 PARAMETER Experiment Name: At_Drought_Soil_Dry_P Parameter: Treatment Value: Drought vs. No Drought
  misc_feature: MA Experiment ID: 20001557 Result: Up-regulated in Transcription
  misc_feature: MA Experiment 20001557 PARAMETER Experiment Name: At_Drought_Soil_Dry_P Parameter: Age (day) Value: 27
  misc_feature: MA Experiment 20001557 PARAMETER Experiment Name: At_Drought_Soil_Dry_P Parameter: Organism Value: A. thaliana
  misc_feature: MA Experiment 20001557 PARAMETER Experiment Name: At_Drought_Soil_Dry_P Parameter: Plant Line Value: WS
  misc_feature: MA Experiment 20001557 PARAMETER Experiment Name: At_Drought_Soil_Dry_P Parameter: Post Timepoint (hr) Value: 3
  misc_feature: MA Experiment 20001557 PARAMETER Experiment Name: At_Drought_Soil_Dry_P Parameter: Post-Treatment Value: Re-Water vs. No Drought
  misc_feature: MA Experiment 20001557 PARAMETER Experiment Name: At_Drought_Soil_Dry_P Parameter: Timepoint (day) Value: 13
  misc_feature: MA Experiment 20001557 PARAMETER Experiment Name: At_Drought_Soil_Dry_P Parameter: Treatment Value: Drought vs. No Drought
  misc_feature: MA Experiment ID: 20001558 Result: Up-regulated in Transcription
  misc_feature: MA Experiment 20001558 PARAMETER Experiment Name: At_Drought_Soil_Dry_P Parameter: Age (day) Value: 27
  misc_feature: MA Experiment 20001558 PARAMETER Experiment Name: At_Drought_Soil_Dry_P Parameter: Organism Value: A. thaliana
  misc_feature: MA Experiment 20001558 PARAMETER Experiment Name: At_Drought_Soil_Dry_P Parameter: Plant Line Value: WS
  misc_feature: MA Experiment 20001558 PARAMETER Experiment Name: At_Drought_Soil_Dry_P Parameter: Post Timepoint (hr) Value: 6
  misc_feature: MA Experiment 20001558 PARAMETER Experiment Name: At_Drought_Soil_Dry_P Parameter: Post-Treatment Value: Re-Water vs. No Drought
  misc_feature: MA Experiment 20001558 PARAMETER Experiment Name: At_Drought_Soil_Dry_P Parameter: Timepoint (day) Value: 13
  misc_feature: MA Experiment 20001558 PARAMETER Experiment Name: At_Drought_Soil_Dry_P Parameter: Treatment Value: Drought vs. No Drought
  misc_feature: MA Experiment ID: 20001560 Result: Up-regulated in Transcription
  misc_feature: MA Experiment 20001560 PARAMETER Experiment Name: At_Drought_Soil_Dry_P Parameter: Age (day) Value: 28
  misc_feature: MA Experiment 20001560 PARAMETER Experiment Name: At_Drought_Soil_Dry_P Parameter: Organism Value: A. thaliana
  misc_feature: MA Experiment 20001560 PARAMETER Experiment Name: At_Drought_Soil_Dry_P Parameter: Plant Line Value: WS
  misc_feature: MA Experiment 20001560 PARAMETER Experiment Name: At_Drought_Soil_Dry_P Parameter: Post Timepoint (hr) Value: None
  misc_feature: MA Experiment 20001560 PARAMETER Experiment Name: At_Drought_Soil_Dry_P Parameter: Post-Treatment Value: None
  misc_feature: MA Experiment 20001560 PARAMETER Experiment Name: At_Drought_Soil_Dry_P Parameter: Timepoint (day) Value: 14
  misc_feature: MA Experiment 20001560 PARAMETER Experiment Name: At_Drought_Soil_Dry_P Parameter: Treatment Value: Drought vs. No Drought
  misc_feature: MA Experiment ID: 20001757 Result: Up-regulated in Transcription
  misc_feature: MA Experiment 20001757 PARAMETER Experiment Name: At_50mM_NH4NO3_L-to-H_P Parameter: Timepoint (hr) Value: 6
  misc_feature: MA Experiment 20001757 PARAMETER Experiment Name: At_50mM_NH4NO3_L-to-H_P Parameter: Tissue Value: Leaf
  misc_feature: MA Experiment 20001757 PARAMETER Experiment Name: At_50mM_NH4NO3_L-to-H_P Parameter: Treatment Value: 50mM NH4NO3 vs 100mM Mannitol
  misc_feature: MA Experiment ID: 20001905 Result: Down-regulated in Transcription
  misc_feature: MA Experiment 20001905 PARAMETER Experiment Name: At_Drought_Reproduction_P Parameter: Age (day) Value: 40
  misc_feature: MA Experiment 20001905 PARAMETER Experiment Name: At_Drought_Reproduction_P Parameter: Organism Value: A. thaliana
  misc_feature: MA Experiment 20001905 PARAMETER Experiment Name: At_Drought_Reproduction_P Parameter: Plant Line Value: WS
  misc_feature: MA Experiment 20001905 PARAMETER Experiment Name: At_Drought_Reproduction_P Parameter: Timepoint (day) Value: 10
  misc_feature: MA Experiment 20001905 PARAMETER Experiment Name: At_Drought_Reproduction_P Parameter: Tissue Value: Rosettes
  misc_feature: MA Experiment 20001905 PARAMETER Experiment Name: At_Drought_Reproduction_P Parameter: Treatment Value: Drought vs. No Drought
gcagaacccttaaaccttatctcttcaccaccagcttctcaaagctttagcctcgagagcaaaattctctcaagctttagccatgtctgcctctgcttcttccctctctgctttcaatcctaaatcccttcctctctgcgtctccagacccgcttccgtctccgtcttacctccttccctctccttcaaacttcactccgaccacctcgtctctatcttcgcttcctccgccctcaaatgctcatcccccgccgagtacccgtcgcgtttcgttagaaacgttgctgtatcttcggattttgaggtggaggaagatgatatgttcgctgacggtgacgattcagcgcctgtggagcgtaactccttctctcctgaccttaagctctttgttggtaacctttcttttaacgttgatagcgctcagcttgctcagctctttgagagcgctggaaatgttgagatggttgaggttatctatgacaaagtgactggccggagcaggggtttcggatttgtgacaatgtcaaccgcagcggaagttgaagcagcagctcaacagttcaatggctatgaatttgaaggcagacctttgagagtcaatgctggccctcctccacctaaaagagaggaatccttctccagaggaccaagaagtggaggttacggttctgagcgtggtggaggttacggttccgagcgtggtggtggttatggttccgagcgtggtggtggttatggttccgagcgtggtggtggatacggttctcaacgtagtggtggtggttacggagggtctcaacgttccagttatggttcggggtcagggtccggttcgggctcaggttcaggaaaccgtctctacgtgggcaacctttcttggggtgttgatgacatggcacttgagaacttgtttaacgagcaaggaaaggtagttgaagctagggttatctacgacagggacagcggtagatccaagggttttggatttgtgacacttagctcttcccaagaggttcagaaggcgatcaattccttgaatggagcagatttggatggaagacaaataagagtctcagaggctgaggctaggccaccaagaggccaattttgagcggtcacacctctttcatattctcaaaaaatgcaaattctggagggttctttgaagcatatagggttagtggaaaatggcggtttcagacagtaactaaaactcactgctggtgcacgctaggctttatccgcctttgatgcatgaaggtcgttaaggaatggtctttttttgagaaagataacaattagattaaagcagagaacccatgtttcttgtctgttcgaatcctgcgagattggttgtagttgaagttgcattttcttcttgtcttttttgttggtattttgacacaatttggctttttggcatatgagagtgactgtagcagtctgttttatttgatgttcgtgatcttcttatgttctgaaaaccagttttcctaaaacttaacaaatttcgatatggaacaagaaatttt

SEQ ID NO: 89350 - protein, 342 aa, Arabidopsis thaliana; identical to SEQ ID NO: 24722
  peptide (1)..(342): Ceres Seq. ID no. 12718176
  misc_feature (193)..(263): Pfam Name: Dec-1 protein, C terminal region Pfam Description: Dec-1 protein, C terminal region
  misc_feature (1)..(342): Homolog of NCBI NO: 15231817 NR Description: 29 kDa ribonucleoprotein, chloroplast precursor protein cp29); protein id: At3g53460.1, supported by cDNA: supported by cDNA: gi_14532569, supported by cDNA: gi_18655392
  misc_feature (1)..(342): Homolog of NCBI NO: 30693824 NR Description: 29 kDa ribonucleoprotein, chloroplast
  misc_feature (9)..(342): Homolog of NCBI NO: 681904 NR Description: cp29 [Arabidopsis thaliana]
  misc_feature (1)..(212): Homolog of NCBI NO: 21617920 NR Description: putative RNA-binding protein [Arabidopsis
  misc_feature (234)..(342): Homolog of NCBI NO: 21617920 NR Description: putative RNA-binding protein [Arabidopsis
  misc_feature (1)..(212): Homolog of NCBI NO: 15228102 NR Description: chloroplast RNA-binding protein cp29, putative; id: At2g37220.1, supported by cDNA: 8849., supported by cDNA: supported by cDNA: gi_15081716, supported by cDNA: gi_16323481
  misc_feature (234)..(342): Homolog of NCBI NO: 15228102 NR Description: chloroplast RNA-binding protein cp29, putative; id: At2g37220.1, supported by cDNA: 8849., supported by cDNA: supported by cDNA: gi_15081716, supported by cDNA: gi_16323481
  misc_feature (1)..(201): Homolog of NCBI NO: 1350820 NR Description: 30 kDa ribonucleoprotein, chloroplast precursor
  misc_feature (239)..(342): Homolog of NCBI NO: 1350820 NR Description: 30 kDa ribonucleoprotein, chloroplast precursor
  misc_feature (8)..(208): Homolog of NCBI NO: 12230585 NR Description: 29 kDa ribonucleoprotein B, chloroplast precursor

SEQ ID NO: 89351 - protein, 263 aa, Arabidopsis thaliana; identical to SEQ ID NO: 24723
  peptide (1)..(263): Ceres Seq. ID no. 12718177
  misc_feature (114)..(184): Pfam Name: Dec-1 protein, C terminal region Pfam Description: Dec-1 protein, C terminal region
  misc_feature (1)..(263): Homolog of NCBI NO: 15231817 NR Description: 29 kDa ribonucleoprotein, chloroplast precursor protein cp29); protein id: At3g53460.1, supported by cDNA: supported by cDNA: gi_14532569, supported by cDNA: gi_18655392
  misc_feature (1)..(263): Homolog of NCBI NO: 30693824 NR Description: 29 kDa ribonucleoprotein, chloroplast
  misc_feature (1)..(263): Homolog of NCBI NO: 681904 NR Description: cp29 [Arabidopsis thaliana]
  misc_feature (1)..(133): Homolog of NCBI NO: 21617920 NR Description: putative RNA-binding protein [Arabidopsis
  misc_feature (155)..(263): Homolog of NCBI NO: 21617920 NR Description: putative RNA-binding protein [Arabidopsis
  misc_feature (1)..(133): Homolog of NCBI NO: 15228102 NR Description: chloroplast RNA-binding protein cp29, putative; id: At2g37220.1, supported by cDNA: 8849., supported by cDNA: supported by cDNA: gi_15081716, supported by cDNA: gi_16323481
  misc_feature (155)..(263): Homolog of NCBI NO: 15228102 NR Description: chloroplast RNA-binding protein cp29, putative; id: At2g37220.1, supported by cDNA: 8849., supported by cDNA: supported by cDNA: gi_15081716, supported by cDNA: gi_16323481
  misc_feature (1)..(122): Homolog of NCBI NO: 1350820 NR Description: 30 kDa ribonucleoprotein, chloroplast precursor
  misc_feature (160)..(263): Homolog of NCBI NO: 1350820 NR Description: 30 kDa ribonucleoprotein, chloroplast precursor
  misc_feature (1)..(129): Homolog of NCBI NO: 12230585 NR Description: 29 kDa ribonucleoprotein B, chloroplast precursor

SEQ ID NO: 89352 - protein, 216 aa, Arabidopsis thaliana; identical to SEQ ID NO: 24724
  peptide (1)..(216): Ceres Seq. ID no. 12718178
  misc_feature (67)..(137): Pfam Name: Dec-1 protein, C terminal region Pfam Description: Dec-1 protein, C terminal region
  misc_feature (1)..(216): Homolog of NCBI NO: 15231817 NR Description: 29 kDa ribonucleoprotein, chloroplast precursor protein cp29); protein id: At3g53460.1, supported by cDNA: supported by cDNA: gi_14532569, supported by cDNA: gi_18655392
  misc_feature (1)..(216): Homolog of NCBI NO: 30693824 NR Description: 29 kDa ribonucleoprotein, chloroplast
  misc_feature (1)..(216): Homolog of NCBI NO: 681904 NR Description: cp29 [Arabidopsis thaliana]
  misc_feature (1)..(86): Homolog of NCBI NO: 21617920 NR Description: putative RNA-binding protein [Arabidopsis
  misc_feature (108)..(216): Homolog of NCBI NO: 21617920 NR Description: putative RNA-binding protein [Arabidopsis
  misc_feature (1)..(86): Homolog of NCBI NO: 15228102 NR Description: chloroplast RNA-binding protein cp29, putative; id: At2g37220.1, supported by cDNA: 8849., supported by cDNA: supported by cDNA: gi_15081716, supported by cDNA: gi_16323481
  misc_feature (108)..(216): Homolog of NCBI NO: 15228102 NR Description: chloroplast RNA-binding protein cp29, putative; id: At2g37220.1, supported by cDNA: 8849., supported by cDNA: supported by cDNA: gi_15081716, supported by cDNA: gi_16323481
  misc_feature (1)..(75): Homolog of NCBI NO: 1350820 NR Description: 30 kDa ribonucleoprotein, chloroplast precursor
  misc_feature (113)..(216): Homolog of NCBI NO: 1350820 NR Description: 30 kDa ribonucleoprotein, chloroplast precursor
  misc_feature (1)..(82): Homolog of NCBI NO: 12230585 NR Description: 29 kDa ribonucleoprotein B, chloroplast precursor

SEQ ID NO: 89353 - DNA, 968 bp, Arabidopsis thaliana
  misc_feature (1)..(968): Ceres Seq. ID no. 12718223
  misc_feature: MA Experiment ID: 108595 Result: Down-regulated in Transcription
  misc_feature: MA Experiment 108595 PARAMETER Experiment Name: At_Ler-pi_Ovule_cDNA_P Parameter: Plant Line Value: null
  misc_feature: MA Experiment ID: 20000071 Result: Down-regulated in Transcription
  misc_feature: MA Experiment 20000071 PARAMETER Experiment Name: At_100uM_ABA_Mutants_cDNA_P Parameter: Plant Line Value: CS8104
  misc_feature: MA Experiment 20000071 PARAMETER Experiment Name: At_100uM_ABA_Mutants_cDNA_P Parameter: Timepoint (hr) Value: 6
  misc_feature: MA Experiment 20000071 PARAMETER Experiment Name: At_100uM_ABA_Mutants_cDNA_P Parameter: Tissue Value: Aerial
  misc_feature: MA Experiment 20000071 PARAMETER Experiment Name: At_100uM_ABA_Mutants_cDNA_P Parameter: Treatment Value: 100uM ABA vs. No Treatment
  misc_feature: MA Experiment ID: 20000180 Result: Down-regulated in Transcription
  misc_feature: MA Experiment 20000180 PARAMETER Experiment Name: At_Germinating_Seeds_P Parameter: Age (hr) Value: 24 vs. 0
  misc_feature: MA Experiment 20000180 PARAMETER Experiment Name: At_Germinating_Seeds_P Parameter: Tissue Value: Germinating Seeds
  misc_feature: MA Experiment ID: 20000184 Result: Up-regulated in Transcription
  misc_feature: MA Experiment 20000184 PARAMETER Experiment Name: At_Shoots__P Parameter: Age (day) Value: 7
  misc_feature: MA Experiment 20000184 PARAMETER Experiment Name: At_Shoots__P Parameter: Tissue Value: Shoots vs. Whole Plant
  misc_feature: MA Experiment ID: 20000234 Result: Up-regulated in Transcription
  misc_feature: MA Experiment 20000234 PARAMETER Experiment Name: At_Siliques_P Parameter: Age (day) Value: 21
  misc_feature: MA Experiment 20000234 PARAMETER Experiment Name: At_Siliques_P Parameter: Organism Value: A. thaliana
  misc_feature: MA Experiment 20000234 PARAMETER Experiment Name: At_Siliques_P Parameter: Plant Line Value: WS
  misc_feature: MA Experiment 20000234 PARAMETER Experiment Name: At_Siliques_P Parameter: Tissue Value: Less Than 5mm Siliques vs. Whole Plant
  misc_feature: MA Experiment ID: 20001451 Result: Down-regulated in Transcription
  misc_feature: MA Experiment 20001451 PARAMETER Experiment Name: At_Far-red-induction_P Parameter: Age (day) Value: 7
  misc_feature: MA Experiment 20001451 PARAMETER Experiment Name: At_Far-red-induction_P Parameter: Light Value: Far-red vs. White
  misc_feature: MA Experiment 20001451 PARAMETER Experiment Name: At_Far-red-induction_P Parameter: Organism Value: A. thaliana
  misc_feature: MA Experiment 20001451 PARAMETER Experiment Name: At_Far-red-induction_P Parameter: Plant Line Value: Columbia
  misc_feature: MA Experiment 20001451 PARAMETER Experiment Name: At_Far-red-induction_P Parameter: Timepoint (hr) Value: 24
  misc_feature: MA Experiment 20001451 PARAMETER Experiment Name: At_Far-red-induction_P Parameter: Tissue Value: Whole Plant
  misc_feature: MA Experiment ID: 20001557 Result: Up-regulated in Transcription
  misc_feature: MA Experiment 20001557 PARAMETER Experiment Name: At_Drought_Soil_Dry_P Parameter: Age (day) Value: 27
  misc_feature: MA Experiment 20001557 PARAMETER Experiment Name: At_Drought_Soil_Dry_P Parameter: Organism Value: A. thaliana
  misc_feature: MA Experiment 20001557 PARAMETER Experiment Name: At_Drought_Soil_Dry_P Parameter: Plant Line Value: WS
  misc_feature: MA Experiment 20001557 PARAMETER Experiment Name: At_Drought_Soil_Dry_P Parameter: Post Timepoint (hr) Value: 3
  misc_feature: MA Experiment 20001557 PARAMETER Experiment Name: At_Drought_Soil_Dry_P Parameter: Post-Treatment Value: Re-Water vs. No Drought
  misc_feature: MA Experiment 20001557 PARAMETER Experiment Name: At_Drought_Soil_Dry_P Parameter: Timepoint (day) Value: 13
  misc_feature: MA Experiment 20001557 PARAMETER Experiment Name: At_Drought_Soil_Dry_P Parameter: Treatment Value: Drought vs. No Drought
  misc_feature: MA Experiment ID: 20001558 Result: Up-regulated in Transcription
  misc_feature: MA Experiment 20001558 PARAMETER Experiment Name: At_Drought_Soil_Dry_P Parameter: Age (day) Value: 27
  misc_feature: MA Experiment 20001558 PARAMETER Experiment Name: At_Drought_Soil_Dry_P Parameter: Organism Value: A. thaliana
  misc_feature: MA Experiment 20001558 PARAMETER Experiment Name: At_Drought_Soil_Dry_P Parameter: Plant Line Value: WS
  misc_feature: MA Experiment 20001558 PARAMETER Experiment Name: At_Drought_Soil_Dry_P Parameter: Post Timepoint (hr) Value: 6
  misc_feature: MA Experiment 20001558 PARAMETER Experiment Name: At_Drought_Soil_Dry_P Parameter: Post-Treatment Value: Re-Water vs. No Drought
  misc_feature: MA Experiment 20001558 PARAMETER Experiment Name: At_Drought_Soil_Dry_P Parameter: Timepoint (day) Value: 13
  misc_feature: MA Experiment 20001558 PARAMETER Experiment Name: At_Drought_Soil_Dry_P Parameter: Treatment Value: Drought vs. No Drought
  misc_feature: MA Experiment ID: 20001757 Result: Up-regulated in Transcription
  misc_feature: MA Experiment 20001757 PARAMETER Experiment Name: At_50mM_NH4NO3_L-to-H_P Parameter: Timepoint (hr) Value: 6
  misc_feature: MA Experiment 20001757 PARAMETER Experiment Name: At_50mM_NH4NO3_L-to-H_P Parameter: Tissue Value: Leaf
  misc_feature: MA Experiment 20001757 PARAMETER Experiment Name: At_50mM_NH4NO3_L-to-H_P Parameter: Treatment Value: 50mM NH4NO3 vs 100mM Mannitol
acgccgctcatttttagggtttcagatataggcagattctcacatttgcaaacatgacgactcagatcagcaagaagagaaagtttgtagcggacggtgtgttctacgctgaattgaatgaggttcttacaagagagctagcagaggatggttactctggtgttgaggttagggttactcctatgaggactgagattatcatcagagctacacgtactcagaatgttctcggtgagaaggggaggagaattagggaattgacttcccttgttcagaagagattcaagtttccagttgacagtgttgagctttatgccgagaaggttaacaacagaggtctctgtgccatcgctcaggctgagtctttacgttacaagcttcttggtggtctcgctgttcgtagggcttgctatggtgtgttgaggtttgttatggagagtggagctaagggatgcgaggttatcgtgagtggaaagcttcgtgctgccagagccaagtctatgaagttcaaagatggctacatggtgtcatctggtcaaccaactaaggaatacatagactctgcagtgagacatgttttgcttagacaaggtgtgttgggaatcaaggtgaaggttatgcttgattgggaccctaagggcatatcaggaccaaagacaccattgcctgatgttgtgatcattcattctcctaaagaagaagaggccatctatgcacctgctcaggttgctgccccggctgctctcgtagcagatgcaccactcacagccgtagattaccctgcgatgatcccagtcgcctaaaagaatcctttgtactagtcgatgtgattttgttttcaactgttcttgctcttttgacagattatagcttctcgtatcttcgaatcagacacgtttcctctgttcttattcgaaaattatctcaagtttccattgttgaaaaagccctttttagtttcataaatc

SEQ ID NO: 89354 - protein, 249 aa, Arabidopsis thaliana; identical to SEQ ID NO: 28293
  peptide (1)..(249): Ceres Seq. ID no. 12718224
  misc_feature (104)..(188): Pfam Name: Ribosomal protein S3, C-terminal domain Pfam Description: Ribosomal protein S3, C-terminal domain
  misc_feature (1)..(249): Homolog of NCBI NO: 15232352 NR Description: 40S ribosomal protein S3, putative; protein id: supported by cDNA: 9568., supported by cDNA: gi_14334697, by cDNA: gi_16226457, supported by cDNA: gi_16323403 [Arabidopsis
  misc_feature (1)..(247): Homolog of NCBI NO: 15225107 NR Description: 40S ribosomal protein S3, putative; protein id: supported by cDNA: gi_14190418, supported by cDNA: gi_15028252, by cDNA: gi_15450570, supported by cDNA: gi_15451083, protein
  misc_feature (1)..(249): Homolog of NCBI NO: 15238533 NR Description: 40S ribosomal protein S3; protein id: supported by cDNA: 10394., supported by cDNA: gi_16604317, by cDNA: gi_20466074 [Arabidopsis thaliana]
  misc_feature (3)..(230): Homolog of NCBI NO: 14192875 NR Description: Putative 40S ribosomal protein; contains
  misc_feature (1)..(225): Homolog of NCBI NO: 22204124 NR Description: putative 40S ribosomal protein S3 [Triticum
  misc_feature (1)..(249): Homolog of NCBI NO: 38512247 NR Description: Ribosomal protein S3 [Silurana tropicalis]
  misc_feature (1)..(216): Homolog of NCBI NO: 12847921 NR Description: unnamed protein product [Mus musculus]
  misc_feature (1)..(249): Homolog of NCBI NO: 133940 NR Description: 40S ribosomal protein S3A (S1A)
  misc_feature (1)..(216): Homolog of NCBI NO: 6755372 NR Description: ribosomal protein S3 [Mus musculus] similar to ribosomal protein S3 [Mus musculus] [Rattus >gi|1173253|sp|P17073|RS3_MOUSE 40S ribosomal protein S3
  misc_feature (1)..(216): Homolog of NCBI NO: 27735393 NR Description: Similar to ribosomal protein S3 [Xenopus laevis]

SEQ ID NO: 89355 - protein, 206 aa, Arabidopsis thaliana; identical to SEQ ID NO: 28294
  peptide (1)..(206): Ceres Seq. ID no. 12718225
  misc_feature (61)..(145): Pfam Name: Ribosomal protein S3, C-terminal domain Pfam Description: Ribosomal protein S3, C-terminal domain
  misc_feature (1)..(206): Homolog of NCBI NO: 15232352 NR Description: 40S ribosomal protein S3, putative; protein id: supported by cDNA: 9568., supported by cDNA: gi_14334697, by cDNA: gi_16226457, supported by cDNA: gi_16323403 [Arabidopsis
  misc_feature (1)..(204): Homolog of NCBI NO: 15225107 NR Description: 40S ribosomal protein S3, putative; protein id: supported by cDNA: gi_14190418, supported by cDNA: gi_15028252, by cDNA: gi_15450570, supported by cDNA: gi_15451083, protein
  misc_feature (1)..(206): Homolog of NCBI NO: 15238533 NR Description: 40S ribosomal protein S3; protein id: supported by cDNA: 10394., supported by cDNA: gi_16604317, by cDNA: gi_20466074 [Arabidopsis thaliana]
  misc_feature (1)..(187): Homolog of NCBI NO: 14192875 NR Description: Putative 40S ribosomal protein; contains
  misc_feature (1)..(182): Homolog of NCBI NO: 22204124 NR Description: putative 40S ribosomal protein S3 [Triticum
  misc_feature (1)..(206): Homolog of NCBI NO: 38512247 NR Description: Ribosomal protein S3 [Silurana tropicalis]
  misc_feature (1)..(173): Homolog of NCBI NO: 12847921 NR Description: unnamed protein product [Mus musculus]
  misc_feature (1)..(206): Homolog of NCBI NO: 133940 NR Description: 40S ribosomal protein S3A (S1A)
  misc_feature (1)..(173): Homolog of NCBI NO: 6755372 NR Description: ribosomal protein S3 [Mus musculus] similar to ribosomal protein S3 [Mus musculus] [Rattus >gi|1173253|sp|P17073|RS3_MOUSE 40S ribosomal protein S3
  misc_feature (1)..(173): Homolog of NCBI NO: 27735393 NR Description: Similar to ribosomal protein S3 [Xenopus laevis]

SEQ ID NO: 89356 - DNA, 1258 bp, Arabidopsis thaliana
  misc_feature (1)..(1258): Ceres Seq. ID no. 12718251
  misc_feature: MA Experiment ID: 20000179 Result: Up-regulated in Transcription
  misc_feature: MA Experiment 20000179 PARAMETER Experiment Name: At_Germinating_Seeds_P Parameter: Age (hr) Value: 6 vs. 0
  misc_feature: MA Experiment 20000179 PARAMETER Experiment Name: At_Germinating_Seeds_P Parameter: Tissue Value: Germinating Seeds
atttcgtagcgcgcagagagagagagagagggacgatcttttctataactgaaacactactcgaggccaagttgctttagccgtaatcgtcgtcgtccctcttcccgatattatctcttctctgttcttcgatttcgaaaccctaacctcctctctttaattcgcgttttctggatcgaagatggtggcggctggtaaatccgacctttccttgcccaaaactttcgcctgcagtgccttcgctgcttgcgtcggcgaggtatgcacaattccattggacactgctaaagttaggcttcagctccaaaagtctgctcttgctggtgatgttactctgcctaaatatcgaggattgttgggaactgttggtaccatagcaagggaagaagggttacgttcactatggaaaggtgttgtacctggattgcatcgtcaatgcctatttggaggtcttaggattggaatgtatgagccggtgaaaaacttgtatgttggaaaagactttgtaggtgatgttccattgagcaagaaaattcttgctggtttgacaacaggtgcactgggtatcatggtagcaaatcccactgatcttgtgaaagttaggcttcaggccgaaggaaaactagctgcaggtgcgccaagacggtattctggagcgctgaatgcttattcaacaattgtgagacaggaaggagtccgagctctttggactggtcttggacctaacgtagcaagaaacgctattatcaatgctgctgaattagcgagttacgatcaagtgaaagagacgatcttgaagattccgggtttcactgacaacgttgtcacacatattctatctggactgggagcaggattctttgctgtctgcatcggctctcctgtcgacgtggttaagtcaagaatgatgggagattctggtgcttacaagggcaccattgactgcttcgtcaaaactctgaagagcgacggtcctatggcattttacaagggtttcatccccaactttggacgccttggctcatggaacgtaatcatgtttttgaccctcgaacaggcaaagaagtatgtccgggaactcgatgcgtccaaaagaaactgagacacatagttttaagcagagggaataagagcaacattgttttcttcttcattttcggtgattgagagaggccagaacttggtcgaatattgttttcggaatagagattcagttttcgagtaaaactgtgaaataaaatttctgtggattgctcat

SEQ ID NO: 89357 - protein, 306 aa, Arabidopsis thaliana; identical to SEQ ID NO: 41422
  peptide (1)..(306): Ceres Seq. ID no. 12718252
  misc_feature (1)..(306): Homolog of NCBI NO: 15232420 NR Description: uncoupling protein (ucp/PUMP); protein id: supported by cDNA: gi_15810466, supported by cDNA: gi_20259562, by cDNA: gi_7673022 [Arabidopsis thaliana]
  misc_feature (1)..(306): Homolog of NCBI NO: 25295878 NR Description: uncoupling protein [imported] - Arabidopsis >gi|3115108|emb|CAA11757.1| plant uncoupling mitochondrial
  misc_feature (5)..(302): Homolog of NCBI NO: 7489287 NR Description: uncoupling protein (clone StUCP7), mitochonrial - >gi|2398829|emb|CAA72107.1| mitochondrial uncoupling protein
  misc_feature (5)..(302): Homolog of NCBI NO: 18921040 NR Description: putative uncoupling protein [Lycopersicon
  misc_feature (4)..(299): Homolog of NCBI NO: 22002462 NR Description: mitochondrial uncoupling protein [Helicodiceros
  misc_feature (18)..(300): Homolog of NCBI NO: 7106157 NR Description: SfUCPa [Symplocarpus foetidus]
  misc_feature (6)..(299): Homolog of NCBI NO: 19401698 NR Description: uncoupling protein [Zea mays]
  misc_feature (6)..(299): Homolog of NCBI NO: 13537347 NR Description: uncoupling protein [Oryza sativa (japonica
  misc_feature (8)..(300): Homolog of NCBI NO: 18424178 NR Description: uncoupling protein (AtUCP2); protein id: supported by cDNA: 42926., supported by cDNA: gi_4063006 thaliana] >gi|4063007|dbj|BAA36222.1| uncoupling protein
  misc_feature (38)..(279): Homolog of NCBI NO: 14599482 NR Description: putative mitochondrial uncoupling protein

SEQ ID NO: 89358 - protein, 212 aa, Arabidopsis thaliana; identical to SEQ ID NO: 41423
  peptide (1)..(212): Ceres Seq. ID no. 12718253
  misc_feature (1)..(212): Homolog of NCBI NO: 15232420 NR Description: uncoupling protein (ucp/PUMP); protein id: supported by cDNA: gi_15810466, supported by cDNA: gi_20259562, by cDNA: gi_7673022 [Arabidopsis thaliana]
  misc_feature (1)..(212): Homolog of NCBI NO: 25295878 NR Description: uncoupling protein [imported] - Arabidopsis >gi|3115108|emb|CAA11757.1| plant uncoupling mitochondrial
  misc_feature (1)..(208): Homolog of NCBI NO: 7489287 NR Description: uncoupling protein (clone StUCP7), mitochonrial - >gi|2398829|emb|CAA72107.1| mitochondrial uncoupling protein
  misc_feature (1)..(208): Homolog of NCBI NO: 18921040 NR Description: putative uncoupling protein [Lycopersicon
  misc_feature (1)..(205): Homolog of NCBI NO: 22002462 NR Description: mitochondrial uncoupling protein [Helicodiceros
  misc_feature (1)..(206): Homolog of NCBI NO: 7106157 NR Description: SfUCPa [Symplocarpus foetidus]
  misc_feature (1)..(205): Homolog of NCBI NO: 19401698 NR Description: uncoupling protein [Zea mays]
  misc_feature (1)..(205): Homolog of NCBI NO: 13537347 NR Description: uncoupling protein [Oryza sativa (japonica
  misc_feature (1)..(206): Homolog of NCBI NO: 18424178 NR Description: uncoupling protein (AtUCP2); protein id: supported by cDNA: 42926., supported by cDNA: gi_4063006 thaliana] >gi|4063007|dbj|BAA36222.1| uncoupling protein
  misc_feature (1)..(185): Homolog of NCBI NO: 14599482 NR Description: putative mitochondrial uncoupling protein

SEQ ID NO: 89359 - protein, 177 aa, Arabidopsis thaliana; identical to SEQ ID NO: 41424
  peptide (1)..(177): Ceres Seq. ID no. 12718254
  misc_feature (1)..(177): Homolog of NCBI NO: 15232420 NR Description: uncoupling protein (ucp/PUMP); protein id: supported by cDNA: gi_15810466, supported by cDNA: gi_20259562, by cDNA: gi_7673022 [Arabidopsis thaliana]
  misc_feature (1)..(177): Homolog of NCBI NO: 25295878 NR Description: uncoupling protein [imported] - Arabidopsis >gi|3115108|emb|CAA11757.1| plant uncoupling mitochondrial
  misc_feature (1)..(173): Homolog of NCBI NO: 7489287 NR Description: uncoupling protein (clone StUCP7), mitochonrial - >gi|2398829|emb|CAA72107.1| mitochondrial uncoupling protein
  misc_feature (1)..(173): Homolog of NCBI NO: 18921040 NR Description: putative uncoupling protein [Lycopersicon
  misc_feature (1)..(170): Homolog of NCBI NO: 22002462 NR Description: mitochondrial uncoupling protein [Helicodiceros
  misc_feature (1)..(171): Homolog of NCBI NO: 7106157 NR Description: SfUCPa [Symplocarpus foetidus]
  misc_feature (1)..(170): Homolog of NCBI NO: 19401698 NR Description: uncoupling protein [Zea mays]
  misc_feature (1)..(170): Homolog of NCBI NO: 13537347 NR Description: uncoupling protein [Oryza sativa (japonica
  misc_feature (1)..(171): Homolog of NCBI NO: 18424178 NR Description: uncoupling protein (AtUCP2); protein id: supported by cDNA: 42926., supported by cDNA: gi_4063006 thaliana] >gi|4063007|dbj|BAA36222.1| uncoupling protein
  misc_feature (1)..(150): Homolog of NCBI NO: 14599482 NR Description: putative mitochondrial uncoupling protein

SEQ ID NO: 89360 - DNA, 1809 bp, Arabidopsis thaliana
  misc_feature (1)..(1809): Ceres Seq. ID no. 12718263
  misc_feature: MA Experiment ID: 20000314 Result: Up-regulated in Transcription
  misc_feature: MA Experiment 20000314 PARAMETER Experiment Name: At_14day_Shoots-Roots_Sub_P Parameter: Age (day) Value: 14
  misc_feature: MA Experiment 20000314 PARAMETER Experiment Name: At_14day_Shoots-Roots_Sub_P Parameter: Organism Value: A. thaliana
  misc_feature: MA Experiment 20000314 PARAMETER Experiment Name: At_14day_Shoots-Roots_Sub_P Parameter: Plant Line Value: WS
  misc_feature: MA Experiment 20000314 PARAMETER Experiment Name: At_14day_Shoots-Roots_Sub_P Parameter: Tissue Value: Roots vs. Whole Plant
  misc_feature: MA Experiment ID: 20000315 Result: Down-regulated in Transcription
  misc_feature: MA Experiment 20000315 PARAMETER Experiment Name: At_14day_Shoots-Roots_Sub_P Parameter: Age (day) Value: 14
  misc_feature: MA Experiment 20000315 PARAMETER Experiment Name: At_14day_Shoots-Roots_Sub_P Parameter: Organism Value: A. thaliana
  misc_feature: MA Experiment 20000315 PARAMETER Experiment Name: At_14day_Shoots-Roots_Sub_P Parameter: Plant Line Value: WS
  misc_feature: MA Experiment 20000315 PARAMETER Experiment Name: At_14day_Shoots-Roots_Sub_P Parameter: Tissue Value: Shoots vs. Whole Plant
  misc_feature: MA Experiment ID: 20000328 Result: Down-regulated in Transcription
  misc_feature: MA Experiment 20000328 PARAMETER Experiment Name: At_42deg_Heat_Sub_P Parameter: Age (day) Value: 14
  misc_feature: MA Experiment 20000328 PARAMETER Experiment Name: At_42deg_Heat_Sub_P Parameter: Organism Value: A. thaliana
  misc_feature: MA Experiment 20000328 PARAMETER Experiment Name: At_42deg_Heat_Sub_P Parameter: Plant Line Value: WS
  misc_feature: MA Experiment 20000328 PARAMETER Experiment Name: At_42deg_Heat_Sub_P Parameter: Temperature (deg C) Value: 42 vs. 22
  misc_feature: MA Experiment 20000328 PARAMETER Experiment Name: At_42deg_Heat_Sub_P Parameter: Timepoint (hr) Value: 6
  misc_feature: MA Experiment 20000328 PARAMETER Experiment Name: At_42deg_Heat_Sub_P Parameter: Tissue Value: Aerial
  misc_feature: MA Experiment ID: 20000355 Result: Down-regulated in Transcription
  misc_feature: MA Experiment 20000355 PARAMETER Experiment Name: At_Siliques_Sub_P Parameter: Age (day) Value: 21
  misc_feature: MA Experiment 20000355 PARAMETER Experiment Name: At_Siliques_Sub_P Parameter: Organism Value: A. thaliana
  misc_feature: MA Experiment 20000355 PARAMETER Experiment Name: At_Siliques_Sub_P Parameter: Plant Line Value: WS
  misc_feature: MA Experiment 20000355 PARAMETER Experiment Name: At_Siliques_Sub_P Parameter: Tissue Value: Less Than 5mm Siliques vs. Whole Plant
  misc_feature: MA Experiment ID: 20000440 Result: Down-regulated in Transcription
  misc_feature: MA Experiment 20000440 PARAMETER Experiment Name: At_Closed-Flower__Sub_P Parameter: Tissue Value: Closed Flower vs. Whole Plant
atgtcgatatttccttctttccaattgctagagctcaacataatctctgctcaagatctagctcctgtctcacgtaaaatgaagacctacgcggtggcttgggttcactctgaacgcaaactcaccacccgcgtagattacaccggtggtggaaacccaacttggaacgacaagtttgtcttccgagttagcgaggatttcctctacgccgatacttcagccgtcgtggttgaaatctacgctttacattggttccgtgatgttcacgttggcacagtccgtgtcctcattagcaacttaatccctccaaatcgccgacctggataccgaagcaacgaggagtaccgtcgtacaccccctcccggaatgcgattcgtcgcacttcaagttcgcagaccatcaggtcgtcctcaaggaatattaaacatcggtgtgggaatactggacggatcaatgcgtagcatgccactttacaccaatatggactcttctgcagtaggttacagagacttgcttggagaagaagatccaaatctgcagaatttgcatctcaatagcttcaaaggaagctcaaagaatccacaatcaccatcttctaaacaataccaatccgtagtctcgagaccgccaatgctccgtcgtacaaggagcgatacaagttcaatggtcgtttccgatcttctaagcagagttgagcgaagtcgtgtagctaataggaagccagcgagcgcgttgatgagcgcagaatcggaaactgtacctacaacgacgggacacgattcagtgacttcagattccgagctgacgaaatcgatagagtatgcacttccttatcaatccccaaagattccaagtcagggatacgattcatacgagcctgatttcatagatcaatcaccaaatcacaatgtgttgcggccgagaagtgagagacaacacgaacctgatttcatagatcaatcaccttttcgatcaaacgatcgttcacgcaaaactccgagaagatcaacaccaatgatcgagaaaccaagaccgccgagagactatgaccgtacaagcagccgcgcttcaccatatttgtcaagacacggaacgccgttgagatcaaacatcgtcgcgtctactccgatcagatctaacatggtttcatcaagtccaatgagatccaccggcgtcggatcaactccgagaagatctaacatcctcggatcgactccgttacgatccaacatcgtcggatcaactccgattagatctaactacaaggctacaccgatgaaatcgcctatgcaatttggtactccgatgagatctaatttagcaggaagaccggttttaacagaatccgaattaggtccgtcgccatcagaagtagcgcagaaaatggcgaaagagagatcacaagcttacgaaacagagagttcgattcttagtgaatggagcttagacgatgatagtaacatcgaaggtctccgatcgaaacttgagagatggagaacagagcttccgccgctttacgatctgggatcgagtcatcaaagcagcgatgtaggaagcggcgcgatggttgttgctaatgtaggtggaggaaaaagctcgaggaagaaaactccggcggtgaagaagaagcataatcgccgtcacactgaaggaggaggtaacggacttttctcgtgttttagtaatttgtgcggcgtggaatgcacattcgtgtgtggaggcgggtcggatcaagacgggtcaaaaaagaaaggtgggtctgggcgtttgccccgcttgggctctgctgatgatttgagttatttatga

SEQ ID NO: 89361 - protein, 602 aa, Arabidopsis thaliana
  peptide (1)..(602): Ceres Seq. ID no. 12718264
  misc_feature (10)..(94): Pfam Name: C2 domain Pfam Description: C2 domain
  misc_feature (3)..(602): Homolog of NCBI NO: 15219742 NR Description: hypothetical protein; protein id: At1g04540.1
  misc_feature (3)..(551): Homolog of NCBI NO: 25372827 NR Description: hypothetical protein [imported] - Arabidopsis >gi|2494130|gb|AAB80639.1| Contains similarity to Glycine SRC2
  misc_feature (379)..(584): Homolog of NCBI NO: 15225023 NR Description: hypothetical protein; protein id: At2g13350.1
  misc_feature (1)..(162): Homolog of NCBI NO: 15225023 NR Description: hypothetical protein; protein id: At2g13350.1
  misc_feature (9)..(202): Homolog of NCBI NO: 21618096 NR Description: unknown [Arabidopsis thaliana]
  misc_feature (446)..(598): Homolog of NCBI NO: 21618096 NR Description: unknown [Arabidopsis thaliana]
  misc_feature (9)..(202): Homolog of NCBI NO: 18396861 NR Description: expressed protein; protein id: At3g04360.1 thaliana] >gi|6721150|gb|AAF26778.1|AC016829_2 hypothetical
  misc_feature (8)..(151): Homolog of NCBI NO: 15234097 NR Description: hypothetical protein; protein id: At4g01200.1, by cDNA: gi_19424080, supported by cDNA: gi_21281234 [Arabidopsis >gi|25407092|pir||G85015 hypothetical protein AT4g01200
  misc_feature (8)..(209): Homolog of NCBI NO: 34912020 NR Description: P0684E06.19 [Oryza sativa (japonica
  misc_feature (10)..(141): Homolog of NCBI NO: 15228227 NR Description: unknown protein; protein id: At3g16510.1 thaliana] >gi|9279650|dbj|BAB01150.1| contains similarity to SRC2
MSIFPSFQLLELNIISAQDLAPVSRKMKTYAVAWVHSERKLTTRVDYTGGGNPTWNDKFVFRVSEDFLYADTSAVVVEIYALHWFRDVHVGTVRVLISNLIPPNRRPGYRSNEEYRRTPPPGMRFVALQVRRPSGRPQGILNIGVGILDGSMRSMPLYTNMDSSAVGYRDLLGEEDPNLQNLHLNSFKGSSKNPQSPSSKQYQSVVSRPPMLRRTRSDTSSMVVSDLLSRVERSRVANRKPASALMSAESETVPTTTGHDSVTSDSELTKSIEYALPYQSPKIPSQGYDSYEPDFIDQSPNHNVLRPRSERQHEPDFIDQSPFRSNDRSRKTPRRSTPMIEKPRPPRDYDRTSSRASPYLSRHGTPLRSNIVASTPIRSNMVSSSPMRSTGVGSTPRRSNILGSTPLRSNIVGSTPIRSNYKATPMKSPMQFGTPMRSNLAGRPVLTESELGPSPSEVAQKMAKERSQAYETESSILSEWSLDDDSNIEGLRSKLERWRTELPPLYDLGSSHQSSDVGSGAMVVANVGGGKSSRKKTPAVKKKHNRRHTEGGGNGLFSCFSNLCGVECTFVCGGGSDQDGSKKKGGSGRLPRLGSADDLSYL

SEQ ID NO: 89362 - protein, 576 aa, Arabidopsis thaliana
  peptide (1)..(576): Ceres Seq. ID no. 12718265
  misc_feature (1)..(68): Pfam Name: C2 domain Pfam Description: C2 domain
  misc_feature (1)..(576): Homolog of NCBI NO: 15219742 NR Description: hypothetical protein; protein id: At1g04540.1
  misc_feature (1)..(525): Homolog of NCBI NO: 25372827 NR Description: hypothetical protein [imported] - Arabidopsis >gi|2494130|gb|AAB80639.1| Contains similarity to Glycine SRC2
  misc_feature (353)..(558): Homolog of NCBI NO: 15225023 NR Description: hypothetical protein; protein id: At2g13350.1
  misc_feature (1)..(136): Homolog of NCBI NO: 15225023 NR Description: hypothetical protein; protein id: At2g13350.1
  misc_feature (1)..(176): Homolog of NCBI NO: 21618096 NR Description: unknown [Arabidopsis thaliana]
  misc_feature (420)..(572): Homolog of NCBI NO: 21618096 NR Description: unknown [Arabidopsis thaliana]
  misc_feature (1)..(176): Homolog of NCBI NO: 18396861 NR Description: expressed protein; protein id: At3g04360.1 thaliana] >gi|6721150|gb|AAF26778.1|AC016829_2 hypothetical
  misc_feature (1)..(125): Homolog of NCBI NO: 15234097 NR Description: hypothetical protein; protein id: At4g01200.1, by cDNA: gi_19424080, supported by cDNA: gi_21281234 [Arabidopsis >gi|25407092|pir||G85015 hypothetical protein AT4g01200
  misc_feature (1)..(183): Homolog of NCBI NO: 34912020 NR Description: P0684E06.19 [Oryza sativa (japonica
  misc_feature (1)..(115): Homolog of NCBI NO: 15228227 NR Description: unknown protein; protein id: At3g16510.1 thaliana] >gi|9279650|dbj|BAB01150.1| contains similarity to SRC2
MKTYAVAWVHSERKLTTRVDYTGGGNPTWNDKFVFRVSEDFLYADTSAVVVEIYALHWFRDVHVGTVRVLISNLIPPNRRPGYRSNEEYRRTPPPGMRFVALQVRRPSGRPQGILNIGVGILDGSMRSMPLYTNMDSSAVGYRDLLGEEDPNLQNLHLNSFKGSSKNPQSPSSKQYQSVVSRPPMLRRTRSDTSSMVVSDLLSRVERSRVANRKPASALMSAESETVPTTTGHDSVTSDSELTKSIEYALPYQSPKIPSQGYDSYEPDFIDQSPNHNVLRPRSERQHEPDFIDQSPFRSNDRSRKTPRRSTPMIEKPRPPRDYDRTSSRASPYLSRHGTPLRSNIVASTPIRSNMVSSSPMRSTGVGSTPRRSNILGSTPLRSNIVGSTPIRSNYKATPMKSPMQFGTPMRSNLAGRPVLTESELGPSPSEVAQKMAKERSQAYETESSILSEWSLDDDSNIEGLRSKLERWRTELPPLYDLGSSHQSSDVGSGAMVVANVGGGKSSRKKTPAVKKKHNRRHTEGGGNGLFSCFSNLCGVECTFVCGGGSDQDGSKKKGGSGRLPRLGSADDLSYL

SEQ ID NO: 89363 - protein, 480 aa, Arabidopsis thaliana
  peptide (1)..(480): Ceres Seq. ID no. 12718266
  misc_feature (1)..(480): Homolog of NCBI NO: 15219742 NR Description: hypothetical protein; protein id: At1g04540.1
  misc_feature (1)..(429): Homolog of NCBI NO: 25372827 NR Description: hypothetical protein [imported] - Arabidopsis >gi|2494130|gb|AAB80639.1| Contains similarity to Glycine SRC2
  misc_feature (257)..(462): Homolog of NCBI NO: 15225023 NR Description: hypothetical protein; protein id: At2g13350.1
  misc_feature (1)..(40): Homolog of NCBI NO: 15225023 NR Description: hypothetical protein; protein id: At2g13350.1
  misc_feature (1)..(80): Homolog of NCBI NO: 21618096 NR Description: unknown [Arabidopsis thaliana]
  misc_feature (324)..(476): Homolog of NCBI NO: 21618096 NR Description: unknown [Arabidopsis thaliana]
  misc_feature (1)..(80): Homolog of NCBI NO: 18396861 NR Description: expressed protein; protein id: At3g04360.1 thaliana] >gi|6721150|gb|AAF26778.1|AC016829_2 hypothetical
  misc_feature (1)..(29): Homolog of NCBI NO: 15234097 NR Description: hypothetical protein; protein id: At4g01200.1, by cDNA: gi_19424080, supported by cDNA: gi_21281234 [Arabidopsis >gi|25407092|pir||G85015 hypothetical protein AT4g01200
  misc_feature (1)..(87): Homolog of NCBI NO: 34912020 NR Description: P0684E06.19 [Oryza sativa (japonica
  misc_feature (1)..(19): Homolog of NCBI NO: 15228227 NR Description: unknown protein; protein id: At3g16510.1 thaliana] >gi|9279650|dbj|BAB01150.1| contains similarity to SRC2
MRFVALQVRRPSGRPQGILNIGVGILDGSMRSMPLYTNMDSSAVGYRDLLGEEDPNLQNLHLNSFKGSSKNPQSPSSKQYQSVVSRPPMLRRTRSDTSSMVVSDLLSRVERSRVANRKPASALMSAESETVPTTTGHDSVTSDSELTKSIEYALPYQSPKIPSQGYDSYEPDFIDQSPNHNVLRPRSERQHEPDFIDQSPFRSNDRSRKTPRRSTPMIEKPRPPRDYDRTSSRASPYLSRHGTPLRSNIVASTPIRSNMVSSSPMRSTGVGSTPRRSNILGSTPLRSNIVGSTPIRSNYKATPMKSPMQFGTPMRSNLAGRPVLTESELGPSPSEVAQKMAKERSQAYETESSILSEWSLDDDSNIEGLRSKLERWRTELPPLYDLGSSHQSSDVGSGAMVVANVGGGKSSRKKTPAVKKKHNRRHTEGGGNGLFSCFSNLCGVECTFVCGGGSDQDGSKKKGGSGRLPRLGSADDLSYL

SEQ ID NO: 89364 - DNA, 1015 bp, Arabidopsis thaliana
  misc_feature (1)..(1015): Ceres Seq. ID no. 12718277
  misc_feature: MA Experiment ID: 20000185 Result: Down-regulated in Transcription
  misc_feature: MA Experiment 20000185 PARAMETER Experiment Name: At_Roots__P Parameter: Age (day) Value: 7 vs. 21
  misc_feature: MA Experiment 20000185 PARAMETER Experiment Name: At_Roots__P Parameter: Organism Value: A. thaliana
  misc_feature: MA Experiment 20000185 PARAMETER Experiment Name: At_Roots__P Parameter: Tissue Value: Roots vs. Whole Plant
  misc_feature: MA Experiment ID: 20000437 Result: Down-regulated in Transcription
  misc_feature: MA Experiment 20000437 PARAMETER Experiment Name: At_Drought_P Parameter: Age (day) Value: 8
  misc_feature: MA Experiment 20000437 PARAMETER Experiment Name: At_Drought_P Parameter: Organism Value: A. thaliana
  misc_feature: MA Experiment 20000437 PARAMETER Experiment Name: At_Drought_P Parameter: Plant Line Value: WS
  misc_feature: MA Experiment 20000437 PARAMETER Experiment Name: At_Drought_P Parameter: Timepoint (hr) Value: 24
  misc_feature: MA Experiment 20000437 PARAMETER Experiment Name: At_Drought_P Parameter: Tissue Value: Whole Plant
  misc_feature: MA Experiment 20000437 PARAMETER Experiment Name: At_Drought_P Parameter: Treatment Value: Drought vs. No Drought
  misc_feature: MA Experiment ID: 20000439 Result: Down-regulated in Transcription
  misc_feature: MA Experiment 20000439 PARAMETER Experiment Name: At_Roots__P Parameter: Age (day) Value: 14 vs. 21
  misc_feature: MA Experiment 20000439 PARAMETER Experiment Name: At_Roots__P Parameter: Organism Value: A. thaliana
  misc_feature: MA Experiment 20000439 PARAMETER Experiment Name: At_Roots__P Parameter: Tissue Value: Roots vs. Whole Plant
  misc_feature: MA Experiment ID: 20000496 Result: Up-regulated in Transcription
  misc_feature: MA Experiment 20000496 PARAMETER Experiment Name: At_Guard_Cells_P Parameter: Harvest Date Value: 7/19/2002
  misc_feature: MA Experiment 20000496 PARAMETER Experiment Name: At_Guard_Cells_P Parameter: Organism Value: Canola
  misc_feature: MA Experiment 20000496 PARAMETER Experiment Name: At_Guard_Cells_P Parameter: Tissue Value: Guard Cells vs. Leaves
  misc_feature: MA Experiment ID: 20000794 Result: Down-regulated in Transcription
  misc_feature: MA Experiment 20000794 PARAMETER Experiment Name: At_Petals_P Parameter: Age (day) Value: 23-25 days
  misc_feature: MA Experiment 20000794 PARAMETER Experiment Name: At_Petals_P Parameter: Plant Line Value: WS
  misc_feature: MA Experiment 20000794 PARAMETER Experiment Name: At_Petals_P Parameter: Tissue Value: Petals vs. Whole plant
  misc_feature: MA Experiment ID: 20001458 Result: Up-regulated in Transcription
  misc_feature: MA Experiment 20001458 PARAMETER Experiment Name: At_50mM_NH4NO3_L-to-H_P Parameter: Age (day) Value: Undefined
  misc_feature: MA Experiment 20001458 PARAMETER Experiment Name: At_50mM_NH4NO3_L-to-H_P Parameter: Organism Value: Undefined
  misc_feature: MA Experiment 20001458 PARAMETER Experiment Name: At_50mM_NH4NO3_L-to-H_P Parameter: Plant Line Value: Undefined
  misc_feature: MA Experiment 20001458 PARAMETER Experiment Name: At_50mM_NH4NO3_L-to-H_P Parameter: Timepoint (hr) Value: 2
  misc_feature: MA Experiment 20001458 PARAMETER Experiment Name: At_50mM_NH4NO3_L-to-H_P Parameter: Tissue Value: Siliques
  misc_feature: MA Experiment 20001458 PARAMETER Experiment Name: At_50mM_NH4NO3_L-to-H_P Parameter: Treatment Value: 50mM NH4NO3 vs. 100mM Manitol
  misc_feature: MA Experiment ID: 20001556 Result: Up-regulated in Transcription
  misc_feature: MA Experiment 20001556 PARAMETER Experiment Name: At_Drought_Soil_Dry_P Parameter: Age (day) Value: 26
  misc_feature: MA Experiment 20001556 PARAMETER Experiment Name: At_Drought_Soil_Dry_P Parameter: Organism Value: A. thaliana
  misc_feature: MA Experiment 20001556 PARAMETER Experiment Name: At_Drought_Soil_Dry_P Parameter: Plant Line Value: WS
  misc_feature: MA Experiment 20001556 PARAMETER Experiment Name: At_Drought_Soil_Dry_P Parameter: Post Timepoint (hr) Value: None
  misc_feature: MA Experiment 20001556 PARAMETER Experiment Name: At_Drought_Soil_Dry_P Parameter: Post-Treatment Value: None
  misc_feature: MA Experiment 20001556 PARAMETER Experiment Name: At_Drought_Soil_Dry_P Parameter: Timepoint (day) Value: 12
  misc_feature: MA Experiment 20001556 PARAMETER Experiment Name: At_Drought_Soil_Dry_P Parameter: Treatment Value: Drought vs. No Drought
  misc_feature: MA Experiment ID: 20001558 Result: Up-regulated in Transcription
  misc_feature: MA Experiment 20001558 PARAMETER Experiment Name: At_Drought_Soil_Dry_P Parameter: Age (day) Value: 27
  misc_feature: MA Experiment 20001558 PARAMETER Experiment Name: At_Drought_Soil_Dry_P Parameter: Organism Value: A. thaliana
  misc_feature: MA Experiment 20001558 PARAMETER Experiment Name: At_Drought_Soil_Dry_P Parameter: Plant Line Value: WS
  misc_feature: MA Experiment 20001558 PARAMETER Experiment Name: At_Drought_Soil_Dry_P Parameter: Post Timepoint (hr) Value: 6
  misc_feature: MA Experiment 20001558 PARAMETER Experiment Name: At_Drought_Soil_Dry_P Parameter: Post-Treatment Value: Re-Water vs. No Drought
  misc_feature: MA Experiment 20001558 PARAMETER Experiment Name: At_Drought_Soil_Dry_P Parameter: Timepoint (day) Value: 13
  misc_feature: MA Experiment 20001558 PARAMETER Experiment Name: At_Drought_Soil_Dry_P Parameter: Treatment Value: Drought vs. No Drought
  misc_feature: MA Experiment ID: 20001757 Result: Up-regulated in Transcription
  misc_feature: MA Experiment 20001757 PARAMETER Experiment Name: At_50mM_NH4NO3_L-to-H_P Parameter: Timepoint (hr) Value: 6
  misc_feature: MA Experiment 20001757 PARAMETER Experiment Name: At_50mM_NH4NO3_L-to-H_P Parameter: Tissue Value: Leaf
  misc_feature: MA Experiment 20001757 PARAMETER Experiment Name: At_50mM_NH4NO3_L-to-H_P Parameter: Treatment Value: 50mM NH4NO3 vs 100mM Mannitol
aaacctccattaccttcgtctttcttcctcagtcgccctacaatggctttgcctttgtctggcacgcgccacctcacgcgcgctctcctctctaatgtcactcttatggctcctcctcggattccttcctctgttcactacggtggatctcggttaggttgttcgacccggttcttctcaattcgatgtggagctaaccggtcaggttctacttactcgccgcttaactctggctctaactttagtgatcggcctccgacggagatggctcctttgtttccgggatgcgattatgagcactggcttattgttatggataaacctggcggggaaggcgcgactaagcagcagatgattgattgttacattcaaaccctagcgaaagtcgttggaagtgaggaagaggcgaagaagcgaatctacaatgtttcatgtgagaggtatttagggtttggttgtgagattgatgaagagacatccactaagcttgaaggtttaccaggtgttctgtttgtgcttccagattcctatgtggatcctgaaaacaaagattatggagctgagctgtttgttaatggagagatagtccaacgatcaccagagaggcagaggcgggttgagccacagccgcagagagcccaagatagaccgagatacaatgacagaactcgttactctcgccgcagagaaaacacaagatgaactgtaactgaagatggtatacatacacctaagctaagccagtatgaggatgatgatgatgatgatgataatggtggtgaggatgatgttactgccgccacacgagggctctgtattccagtccgttgcagttaatggaccgggcttactttggatattgttgaaattctaagttttgtttctatgtaacaattttatttaataatgtaaattgaggtttcactgttttaggaaattactttgggtagaagattagttttcttttcaagaacaattcatgtgggaaatggtaaatttattttagtaatctttt

SEQ ID NO: 89365 - protein, 233 aa, Arabidopsis thaliana
  peptide (1)..(233): Ceres Seq. ID no. 12718278
  misc_feature (15)..(233): Homolog of NCBI NO: 15226108 NR Description: plastid protein; protein id: At2g33430.1, by cDNA: 8717., supported by cDNA: gi_17933284, supported by
  misc_feature (15)..(233): Homolog of NCBI NO: 21617909 NR Description: plastid protein [Arabidopsis thaliana]
  misc_feature (15)..(233): Homolog of NCBI NO: 2440029 NR Description: DAL1 protein [Arabidopsis thaliana]
  misc_feature (36)..(233): Homolog of NCBI NO: 25370552 NR Description: DAG protein homolog [imported] - Arabidopsis >gi|2246378|emb|CAB06698.1| plastid protein [Arabidopsis
  misc_feature (60)..(231): Homolog of NCBI NO: 38344141 NR Description: OSJNBa0041A02.8 [Oryza sativa (japonica
  misc_feature (57)..(233): Homolog of NCBI NO: 15223247 NR Description: plastid protein, putative; protein id: supported by cDNA: gi_17381077, supported by cDNA: gi_20465720
  misc_feature (50)..(233): Homolog of NCBI NO: 34897972 NR Description: putative plastid protein [Oryza sativa (japonica group)] >gi|24413962|dbj|BAC22214.1| putative plastid protein
  misc_feature (42)..(233): Homolog of NCBI NO: 15226934 NR Description: unknown protein; protein id: At2g35240.1, by cDNA: gi_18253008 [Arabidopsis thaliana]
  misc_feature (11)..(233): Homolog of NCBI NO: 27754695 NR Description: putative DAG protein [Arabidopsis thaliana]
  misc_feature (11)..(233): Homolog of NCBI NO: 15230785 NR Description: DAG protein, putative; protein id: At3g06790.1 thaliana] >gi|7549634|gb|AAF63819.1| DAG protein, putative
KPPLPSSFFLSRPTMALPLSGTRHLTRALLSNVTLMAPPRIPSSVHYGGSRLGCSTRFFSIRCGANRSGSTYSPLNSGSNFSDRPPTEMAPLFPGCDYEHWLIVMDKPGGEGATKQQMIDCYIQTLAKVVGSEEEAKKRIYNVSCERYLGFGCEIDEETSTKLEGLPGVLFVLPDSYVDPENKDYGAELFVNGEIVQRSPERQRRVEPQPQRAQDRPRYNDRTRYSRRRENTR

SEQ ID NO: 89366 - protein, 219 aa, Arabidopsis thaliana; identical to SEQ ID NO: 28131
  peptide (1)..(219): Ceres Seq. ID no. 12718279
  misc_feature (1)..(219): Homolog of NCBI NO: 15226108 NR Description: plastid protein; protein id: At2g33430.1, by cDNA: 8717., supported by cDNA: gi_17933284, supported by
  misc_feature (1)..(219): Homolog of NCBI NO: 21617909 NR Description: plastid protein [Arabidopsis thaliana]
  misc_feature (1)..(219): Homolog of NCBI NO: 2440029 NR Description: DAL1 protein [Arabidopsis thaliana]
  misc_feature (22)..(219): Homolog of NCBI NO: 25370552 NR Description: DAG protein homolog [imported] - Arabidopsis >gi|2246378|emb|CAB06698.1| plastid protein [Arabidopsis
  misc_feature (46)..(217): Homolog of NCBI NO: 38344141 NR Description: OSJNBa0041A02.8 [Oryza sativa (japonica
  misc_feature (43)..(219): Homolog of NCBI NO: 15223247 NR Description: plastid protein, putative; protein id: supported by cDNA: gi_17381077, supported by cDNA: gi_20465720
  misc_feature (36)..(219): Homolog of NCBI NO: 34897972 NR Description: putative plastid protein [Oryza sativa (japonica group)] >gi|24413962|dbj|BAC22214.1| putative plastid protein
  misc_feature (28)..(219): Homolog of NCBI NO: 15226934 NR Description: unknown protein; protein id: At2g35240.1, by cDNA: gi_18253008 [Arabidopsis thaliana]
  misc_feature (1)..(219): Homolog of NCBI NO: 27754695 NR Description: putative DAG protein [Arabidopsis thaliana]
  misc_feature (1)..(219): Homolog of NCBI NO: 15230785 NR Description: DAG protein, putative; protein id: At3g06790.1 thaliana] >gi|7549634|gb|AAF63819.1| DAG protein, putative

SEQ ID NO: 89367 - protein, 198 aa, Arabidopsis thaliana; identical to SEQ ID NO: 28132
  peptide (1)..(198): Ceres Seq. ID no. 12718280
  misc_feature (1)..(198): Homolog of NCBI NO: 15226108 NR Description: plastid protein; protein id: At2g33430.1, by cDNA: 8717., supported by cDNA: gi_17933284, supported by
  misc_feature (1)..(198): Homolog of NCBI NO: 21617909 NR Description: plastid protein [Arabidopsis thaliana]
  misc_feature (1)..(198): Homolog of NCBI NO: 2440029 NR Description: DAL1 protein [Arabidopsis thaliana]
  misc_feature (1)..(198): Homolog of NCBI NO: 25370552 NR Description: DAG protein homolog [imported] - Arabidopsis >gi|2246378|emb|CAB06698.1| plastid protein [Arabidopsis
  misc_feature (25)..(196): Homolog of NCBI NO: 38344141 NR Description: OSJNBa0041A02.8 [Oryza sativa (japonica
  misc_feature (22)..(198): Homolog of NCBI NO: 15223247 NR Description: plastid protein, putative; protein id: supported by cDNA: gi_17381077, supported by cDNA: gi_20465720
  misc_feature (15)..(198): Homolog of NCBI NO: 34897972 NR Description: putative plastid protein [Oryza sativa (japonica group)] >gi|24413962|dbj|BAC22214.1| putative plastid protein
  misc_feature (7)..(198): Homolog of NCBI NO: 15226934 NR Description: unknown protein; protein id: At2g35240.1, by cDNA: gi_18253008 [Arabidopsis thaliana]
  misc_feature (1)..(198): Homolog of NCBI NO: 27754695 NR Description: putative DAG protein [Arabidopsis thaliana]
  misc_feature (1)..(198): Homolog of NCBI NO: 15230785 NR Description: DAG protein, putative; protein id: At3g06790.1 thaliana] >gi|7549634|gb|AAF63819.1| DAG protein, putative

SEQ ID NO: 89368 - DNA, 1666 bp, Arabidopsis thaliana
  misc_feature (1)..(1666): Ceres Seq. ID no. 12718299
  misc_feature: MA Experiment ID: 20000794 Result: Up-regulated in Transcription
  misc_feature: MA Experiment 20000794 PARAMETER Experiment Name: At_Petals_P Parameter: Age (day) Value: 23-25 days
  misc_feature: MA Experiment 20000794 PARAMETER Experiment Name: At_Petals_P Parameter: Plant Line Value: WS
  misc_feature: MA Experiment 20000794 PARAMETER Experiment Name: At_Petals_P Parameter: Tissue Value: Petals vs. Whole plant
  misc_feature: MA Experiment ID: 20001910 Result: Up-regulated in Transcription
  misc_feature: MA Experiment 20001910 PARAMETER Experiment Name: At_Drought_Reproduction_P Parameter: Age (day) Value: 37
  misc_feature: MA Experiment 20001910 PARAMETER Experiment Name: At_Drought_Reproduction_P Parameter: Organism Value: A. thaliana
  misc_feature: MA Experiment 20001910 PARAMETER Experiment Name: At_Drought_Reproduction_P Parameter: Plant Line Value: WS
  misc_feature: MA Experiment 20001910 PARAMETER Experiment Name: At_Drought_Reproduction_P Parameter: Timepoint (day) Value: 7
  misc_feature: MA Experiment 20001910 PARAMETER Experiment Name: At_Drought_Reproduction_P Parameter: Tissue Value: Flowers
  misc_feature: MA Experiment 20001910 PARAMETER Experiment Name: At_Drought_Reproduction_P Parameter: Treatment Value: Drought vs. No Drought
ttaccgccgtttcttggccgtagaagatataaatattgatagtcgtatataaaaaaaaaacatataagacaaggtacataagaaaaaaacaatttcgttaaagaaaaaatggctggaggaggaggtggtagcacttctggagaaggtcctagagagctcgatcagacaccgacatgggccgtctccactgtttgtggcgttatcatcttgatctctatcgttctagagctcatgattcacaaaatcggagaggttttcactgaaagaaggaagaaagctttgtacgaagcgcttcaaaagatcaagaacgagcttatggttttgggattcatttctttgttattaacatttggacaaaactacatagcaagtttgtgtgtggcgtcaagatacggccatgcgatgtccttttgtggtccatacgatggtccaagtggtgagtctaagaagccaaagactaccgaacacttagaacgtcgtgttttggctgatgctgctccagctcagtgcaagaagggctatgtaccgcttatatcactcaacgcgttgcatcaagtgcatatcttcatctttttcttggctgtgtttcatgtcatttatagtgctattaccatgatgcttggacgagcaaagattcgtggatggaaagtttgggaggaagaagtcataaatgatcatgaaatgatgaatgacccttcaaggtttaggctcacacatgagacatcatttgttagagagcatgtcaatccttgggccaaaaatagattctcattctacgttatgtgtttctttcgtcaaatgctgagatctgtcagaaaatctgattatttgacaatgcgtcatggtttcataagtgtccatttggcaccgggtatgaagtttaatttccaaaaatacatcaaaagatcattggaagacgacttcaaggtagtcgtgggaataagtcccgagctatgggcctttgtaatgctctttttgctctttgatgttcacgggtggtatgttactgctgtgatcaccatgattcctccacttttgacattagcgataggaaccaagcttcaagccatcatctcagacatggcgttggaaattcaggagagacacgccgtgatacaagggatgccacttgtcaatgtctctgatcgacatttctggtttagtcgtcccgccttagtcctccatatcatccacttcattctcttccagaatgcttttgagatcacctacttcttctggatatggtatgagttcgggttacggtcctgttttcatcaccatttcgcgctaataatcataagggttgctcttggggtgggagtacaatttctctgcagttacatcacacttcctctttacgctctcgtgactcagatgggatcaacgatgaagcgatcggtgtttgatgatcaaacgtcaaaggcattaaagaattggcataaaaatgcaaagaaaaagagcgaaactcctggtcaaacgcagcctccattgcctaatctccgacctaaaaccggcggcgatattgagtctgcttctccggccaatatcacggctagtgttgatgttaaagaaagtgatcaatctcaatctagagacctcttaagcggtccctaaaaaaccaaacgggtcaagacattactttcacttaaccggcttactctaagtc

SEQ ID NO: 89369 - protein, 501 aa, Arabidopsis thaliana
  peptide (1)..(501): Ceres Seq. ID no. 12718300
  misc_feature (13)..(484): Pfam Name: Mlo family Pfam Description: Mlo family
  misc_feature (1)..(501): Homolog of NCBI NO: 15226140 NR Description: similar to Mlo proteins from H. vulgare; protein At2g33670.1, supported by cDNA: gi_14091579 [Arabidopsis
  misc_feature (1)..(501): Homolog of NCBI NO: 14091580 NR Description: membrane protein Mlo5 [Arabidopsis thaliana]
  misc_feature (1)..(452): Homolog of NCBI NO: 15217453 NR Description: Mlo-like protein; protein id: At1g42560.1
  misc_feature (1)..(452): Homolog of NCBI NO: 33112390 NR Description: MLO-like protein 9 (AtMlo9)
  misc_feature (1)..(452): Homolog of NCBI NO: 25346293 NR Description: hypothetical protein F8D11.2 [imported] - thaliana >gi|12322423|gb|AAG51234.1|AC035249_9 disease resistance
  misc_feature (121)..(452): Homolog of NCBI NO: 14091588 NR Description: membrane protein Mlo9 [Arabidopsis thaliana]
  misc_feature (3)..(501): Homolog of NCBI NO: 37536520 NR Description: putative Mlo (pathogen resistance) protein [Oryza
  misc_feature (124)..(455): Homolog of NCBI NO: 13784985 NR Description: seven transmembrane protein Mlo6 [Zea mays]
  misc_feature (1)..(136): Homolog of NCBI NO: 13784985 NR Description: seven transmembrane protein Mlo6 [Zea mays]
  misc_feature (11)..(450): Homolog of NCBI NO: 13784977 NR Description: seven transmembrane protein Mlo2 [Zea mays]
MAGGGGGSTSGEGPRELDQTPTWAVSTVCGVIILISIVLELMIHKIGEVFTERRKKALYEALQKIKNELMVLGFISLLLTFGQNYIASLCVASRYGHAMSFCGPYDGPSGESKKPKTTEHLERRVLADAAPAQCKKGYVPLISLNALHQVHIFIFFLAVFHVIYSAITMMLGRAKIRGWKVWEEEVINDHEMMNDPSRFRLTHETSFVREHVNPWAKNRFSFYVMCFFRQMLRSVRKSDYLTMRHGFISVHLAPGMKFNFQKYIKRSLEDDFKVVVGISPELWAFVMLFLLFDVHGWYVTAVITMIPPLLTLAIGTKLQAIISDMALEIQERHAVIQGMPLVNVSDRHFWFSRPALVLHIIHFILFQNAFEITYFFWIWYEFGLRSCFHHHFALIIIRVALGVGVQFLCSYITLPLYALVTQMGSTMKRSVFDDQTSKALKNWHKNAKKKSETPGQTQPPLPNLRPKTGGDIESASPANITASVDVKESDQSQSRDLLSGP

SEQ ID NO: 89370 - protein, 460 aa, Arabidopsis thaliana
  peptide (1)..(460): Ceres Seq. ID no. 12718301
  misc_feature (1)..(443): Pfam Name: Mlo family Pfam Description: Mlo family
  misc_feature (1)..(460): Homolog of NCBI NO: 15226140 NR Description: similar to Mlo proteins from H. vulgare; protein At2g33670.1, supported by cDNA: gi_14091579 [Arabidopsis
  misc_feature (1)..(460): Homolog of NCBI NO: 14091580 NR Description: membrane protein Mlo5 [Arabidopsis thaliana]
  misc_feature (1)..(411): Homolog of NCBI NO: 15217453 NR Description: Mlo-like protein; protein id: At1g42560.1
  misc_feature (1)..(411): Homolog of NCBI NO: 33112390 NR Description: MLO-like protein 9 (AtMlo9)
  misc_feature (1)..(411): Homolog of NCBI NO: 25346293 NR Description: hypothetical protein F8D11.2 [imported] - thaliana >gi|12322423|gb|AAG51234.1|AC035249_9 disease resistance
  misc_feature (80)..(411): Homolog of NCBI NO: 14091588 NR Description: membrane protein Mlo9 [Arabidopsis thaliana]
  misc_feature (1)..(460): Homolog of NCBI NO: 37536520 NR Description: putative Mlo (pathogen resistance) protein [Oryza
  misc_feature (83)..(414): Homolog of NCBI NO: 13784985 NR Description: seven transmembrane protein Mlo6 [Zea mays]
  misc_feature (1)..(95): Homolog of NCBI NO: 13784985 NR Description: seven transmembrane protein Mlo6 [Zea mays]
  misc_feature (1)..(409): Homolog of NCBI NO: 13784977 NR Description: seven transmembrane protein Mlo2 [Zea mays]
MIHKIGEVFTERRKKALYEALQKIKNELMVLGFISLLLTFGQNYIASLCVASRYGHAMSFCGPYDGPSGESKKPKTTEHLERRVLADAAPAQCKKGYVPLISLNALHQVHIFIFFLAVFHVIYSAITMMLGRAKIRGWKVWEEEVINDHEMMNDPSRFRLTHETSFVREHVNPWAKNRFSFYVMCFFRQMLRSVRKSDYLTMRHGFISVHLAPGMKFNFQKYIKRSLEDDFKVVVGISPELWAFVMLFLLFDVHGWYVTAVITMIPPLLTLAIGTKLQAIISDMALEIQERHAVIQGMPLVNVSDRHFWFSRPALVLHIIHFILFQNAFEITYFFWIWYEFGLRSCFHHHFALIIIRVALGVGVQFLCSYITLPLYALVTQMGSTMKRSVFDDQTSKALKNWHKNAKKKSETPGQTQPPLPNLRPKTGGDIESASPANITASVDVKESDQSQSRDLLSGP

SEQ ID NO: 89371 - protein, 432 aa, Arabidopsis thaliana
  peptide (1)..(432): Ceres Seq. ID no. 12718302
  misc_feature (1)..(415): Pfam Name: Mlo family Pfam Description: Mlo family
  misc_feature (1)..(432): Homolog of NCBI NO: 15226140 NR Description: similar to Mlo proteins from H. vulgare; protein At2g33670.1, supported by cDNA: gi_14091579 [Arabidopsis
  misc_feature (1)..(432): Homolog of NCBI NO: 14091580 NR Description: membrane protein Mlo5 [Arabidopsis thaliana]
  misc_feature (1)..(383): Homolog of NCBI NO: 15217453 NR Description: Mlo-like protein; protein id: At1g42560.1
  misc_feature (1)..(383): Homolog of NCBI NO: 33112390 NR Description: MLO-like protein 9 (AtMlo9)
  misc_feature (1)..(383): Homolog of NCBI NO: 25346293 NR Description: hypothetical protein F8D11.2 [imported] - thaliana >gi|12322423|gb|AAG51234.1|AC035249_9 disease resistance
  misc_feature (52)..(383): Homolog of NCBI NO: 14091588 NR Description: membrane protein Mlo9 [Arabidopsis thaliana]
  misc_feature (1)..(432): Homolog of NCBI NO: 37536520 NR Description: putative Mlo (pathogen resistance) protein [Oryza
  misc_feature (55)..(386): Homolog of NCBI NO: 13784985 NR Description: seven transmembrane protein Mlo6 [Zea mays]
  misc_feature (1)..(67): Homolog of NCBI NO: 13784985 NR Description: seven transmembrane protein Mlo6 [Zea mays]
  misc_feature (1)..(381): Homolog of NCBI NO: 13784977 NR Description: seven transmembrane protein Mlo2 [Zea mays]
MVLGFISLLLTFGQNYIASLCVASRYGHAMSFCGPYDGPSGESKKPKTTEHLERRVLADAAPAQCKKGYVPLISLNALHQVHIFIFFLAVFHVIYSAITMMLGRAKIRGWKVWEEEVINDHEMMNDPSRFRLTHETSFVREHVNPWAKNRFSFYVMCFFRQMLRSVRKSDYLTMRHGFISVHLAPGMKFNFQKYIKRSLEDDFKVVVGISPELWAFVMLFLLFDVHGWYVTAVITMIPPLLTLAIGTKLQAIISDMALEIQERHAVIQGMPLVNVSDRHFWFSRPALVLHIIHFILFQNAFEITYFFWIWYEFGLRSCFHHHFALIIIRVALGVGVQFLCSYITLPLYALVTQMGSTMKRSVFDDQTSKALKNWHKNAKKKSETPGQTQPPLPNLRPKTGGDIESASPANITASVDVKESDQSQSRDLLSGP

SEQ ID NO: 89372 - DNA, 2099 bp, Arabidopsis thaliana
  misc_feature (1)..(2099): Ceres Seq. ID no. 12718303
  misc_feature: MA Experiment ID: 20000171 Result: Up-regulated in Transcription
  misc_feature: MA Experiment 20000171 PARAMETER Experiment Name: At_42deg_Heat_P Parameter: Age (day) Value: 14
  misc_feature: MA Experiment 20000171 PARAMETER Experiment Name: At_42deg_Heat_P Parameter: Organism Value: A. thaliana
  misc_feature: MA Experiment 20000171 PARAMETER Experiment Name: At_42deg_Heat_P Parameter: Plant Line Value: WS
  misc_feature: MA Experiment 20000171 PARAMETER Experiment Name: At_42deg_Heat_P Parameter: Temperature (deg C) Value: 42 vs. 22
  misc_feature: MA Experiment 20000171 PARAMETER Experiment Name: At_42deg_Heat_P Parameter: Timepoint (hr) Value: 1
  misc_feature: MA Experiment 20000171 PARAMETER Experiment Name: At_42deg_Heat_P Parameter: Tissue Value: Aerial
  misc_feature: MA Experiment ID: 20000173 Result: Up-regulated in Transcription
  misc_feature: MA Experiment 20000173 PARAMETER Experiment Name: At_42deg_Heat_P Parameter: Age (day) Value: 14
  misc_feature: MA Experiment 20000173 PARAMETER Experiment Name: At_42deg_Heat_P Parameter: Organism Value: A. thaliana
  misc_feature: MA Experiment 20000173 PARAMETER Experiment Name: At_42deg_Heat_P Parameter: Plant Line Value: WS
  misc_feature: MA Experiment 20000173 PARAMETER Experiment Name: At_42deg_Heat_P Parameter: Temperature (deg C) Value: 42 vs. 22
  misc_feature: MA Experiment 20000173 PARAMETER Experiment Name: At_42deg_Heat_P Parameter: Timepoint (hr) Value: 6
  misc_feature: MA Experiment 20000173 PARAMETER Experiment Name: At_42deg_Heat_P Parameter: Tissue Value: Aerial
  misc_feature: MA Experiment ID: 20000437 Result: Up-regulated in Transcription
  misc_feature: MA Experiment 20000437 PARAMETER Experiment Name: At_Drought_P Parameter: Age (day) Value: 8
  misc_feature: MA Experiment 20000437 PARAMETER Experiment Name: At_Drought_P Parameter: Organism Value: A. thaliana
  misc_feature: MA Experiment 20000437 PARAMETER Experiment Name: At_Drought_P Parameter: Plant Line Value: WS
  misc_feature: MA Experiment 20000437 PARAMETER Experiment Name: At_Drought_P Parameter: Timepoint (hr) Value: 24
  misc_feature: MA Experiment 20000437 PARAMETER Experiment Name: At_Drought_P Parameter: Tissue Value: Whole Plant
  misc_feature: MA Experiment 20000437 PARAMETER Experiment Name: At_Drought_P Parameter: Treatment Value: Drought vs. No Drought
  misc_feature: MA Experiment ID: 20001904 Result: Up-regulated in Transcription
  misc_feature: MA Experiment 20001904 PARAMETER Experiment Name: At_Drought_Reproduction_P Parameter: Age (day) Value: 37
  misc_feature: MA Experiment 20001904 PARAMETER Experiment Name: At_Drought_Reproduction_P Parameter: Organism Value: A. thaliana
  misc_feature: MA Experiment 20001904 PARAMETER Experiment Name: At_Drought_Reproduction_P Parameter: Plant Line Value: WS
  misc_feature: MA Experiment 20001904 PARAMETER Experiment Name: At_Drought_Reproduction_P Parameter: Timepoint (day) Value: 7
  misc_feature: MA Experiment 20001904 PARAMETER Experiment Name: At_Drought_Reproduction_P Parameter: Tissue Value: Rosettes
  misc_feature: MA Experiment 20001904 PARAMETER Experiment Name: At_Drought_Reproduction_P Parameter: Treatment Value: Drought vs. No Drought
  misc_feature: MA Experiment ID: 20001911 Result: Up-regulated in Transcription
  misc_feature: MA Experiment 20001911 PARAMETER Experiment Name: At_Drought_Reproduction_P Parameter: Age (day) Value: 40
  misc_feature: MA Experiment 20001911 PARAMETER Experiment Name: At_Drought_Reproduction_P Parameter: Organism Value: A. thaliana
  misc_feature: MA Experiment 20001911 PARAMETER Experiment Name: At_Drought_Reproduction_P Parameter: Plant Line Value: WS
  misc_feature: MA Experiment 20001911 PARAMETER Experiment Name: At_Drought_Reproduction_P Parameter: Timepoint (day) Value: 10
  misc_feature: MA Experiment 20001911 PARAMETER Experiment Name: At_Drought_Reproduction_P Parameter: Tissue Value: Flowers
  misc_feature: MA Experiment 20001911 PARAMETER Experiment Name: At_Drought_Reproduction_P Parameter: Treatment Value: Drought vs. No Drought
atctatctttctctctcaaagaaagcttttggaaattgtctttcgtcaaattctgttcttcttcttcattaaactcataactttttctgggtttttcgagaatttcttcgaaaggatcttacggtaagagaaaaggaaaattaagagggaataagaagattcatcatcattgtcatctgtggggaatctcagagcttttttttctgtagttttgttatctttctgaattctctacctgcttcaagatttcatttttattcatcgatctttggggtttagtttcaaagctgaattctttgaggtttctgaaatttgcgagctgggtttttgttgaaataggcttctgagttttggttatatttgtggataatcgattacttgatctgacctgagaaaaagtagaaacctttgagtagagctggttctattacaaagttgtgtttgggagcttgctacaagaccattggatttcttcactttcttcatttgttgagtctgctacaagatcaaggatctgttgattttgggtatttgatcaaaatctgaaattgatcttgtggaagtaaggttgctgtagttgtcaaggtctttggtgaagtttgtttctcacaaagtttgatccttgaagttggtctctattgatcttagatctagtgtgaataaaggaagtccttggaaagcagcagacttgaaaacgctatcacaagaggaattgcttcctgaagagactgtctggattgctgatagatttatatgattcagagaagaactcaccgatgagtatggatttttcacctttgttaacggttcttgagggagatttcaacaaggataatacttcttctgcaacagaaattgatactttagagaacttagatgacactaggcagataagtaaaggaaaacctccgaggcacctcacaagcagtgctactaggctgcagcttgcagccaatgcggatgtggatgtttgtaacttggttatgaagtcacttgatgacaaatcagagtttctacctgtataccgatcaggaagttgtgctgagcaaggggcaaaacagttcatggaagatgaacacatttgcatcgatgatcttgttaatcatcttggtgcagctattcaatgctcttctcttggagccttctatggggtatttgatggccacggtggcacagatgcagcacactttgttagaaagaacattctgagattcattgtagaggactcctccttcccactatgcgtaaagaaagcaattaagagtgctttcttaaaagctgattatgaatttgcagatgattcttctcttgacatctcttctgggaccactgcgcttacagcttttatttttggacggaggttgataattgcaaatgctggtgattgccgagcagtactggggagaagaggtagggcaattgagttgtccaaagatcacaaaccaaactgcacagccgagaaagtaagaatagaaaagttaggtggagttgtgtatgacggttacctcaacgggcaactatcagttgcacgtgccattggagactggcacatgaaaggtcccaaaggctctgcttgtccgctaagcccagagccagagttgcaagagacagacctgagtgaagacgacgagttcttgataatgggatgtgatggtctgtgggatgtgatgagcagccagtgcgctgtgacaatagctaggaaggaactgatgattcataatgatccagagagatgctctagagagcttgtgagggaggcccttaaacggaatacatgtgacaatttgacagtgattgttgtgtgcttctctccggatcctccacagaggatagagatccgaatgcagtcacgggtgaggcggagcatatctgcggaagggttaaacctactcaaaggcgtgctcgatggctatccgtgagcatgttatgttgtacgttactttgtgagactattgccaagttagagagagtgtttacaggtttattgacatgttgtgttctgagtatgttgttgttaccaatattagtagtattcaacatccattgagattttagatggatgcatattatcccattgtaaataatttttaacttgttcc

SEQ ID NO: 89373 - protein, 380 aa, Arabidopsis thaliana
  peptide (1)..(380): Ceres Seq. ID no. 12718304
  misc_feature (83)..(337): Pfam Name: Protein phosphatase 2C Pfam Description: Protein phosphatase 2C
  misc_feature (1)..(380): Homolog of NCBI NO: 15226152 NR Description: protein phosphatase 2C (PP2C); protein id: supported by cDNA: gi_17979441, supported by cDNA: gi_20259092
  misc_feature (42)..(377): Homolog of NCBI NO: 37536524 NR Description: putative protein phosphatase-2C [Oryza sativa
  misc_feature (74)..(377): Homolog of NCBI NO: 10140768 NR Description: putative protein phosphatase-2C [Oryza sativa]
  misc_feature (21)..(377): Homolog of NCBI NO: 15230495 NR Description: protein phosphatase 2C (PP2C); protein id:
  misc_feature (74)..(378): Homolog of NCBI NO: 20146108 NR Description: protein phosphatase 2C [Mesembryanthemum
  misc_feature (78)..(378): Homolog of NCBI NO: 25352221 NR Description: phosphoprotein phosphatase (EC 3.1.3.16) 2C
  misc_feature (56)..(373): Homolog of NCBI NO: 34894410 NR Description: putative protein phosphatase [Oryza sativa
  misc_feature (16)..(378): Homolog of NCBI NO: 15224766 NR Description: protein phosphatase 2C (PP2C); protein id: supported by cDNA: gi_12642917, supported by cDNA: gi_14517519, by cDNA: gi_16323271 [Arabidopsis thaliana]
  misc_feature (77)..(378): Homolog of NCBI NO: 21693562 NR Description: DNA-binding protein phosphatase 2C [Nicotiana
  misc_feature (75)..(376): Homolog of NCBI NO: 24413992 NR Description: putative DNA-binding protein phosphatase 2C
MSMDFSPLLTVLEGDFNKDNTSSATEIDTLENLDDTRQISKGKPPRHLTSSATRLQLAANADVDVCNLVMKSLDDKSEFLPVYRSGSCAEQGAKQFMEDEHICIDDLVNHLGAAIQCSSLGAFYGVFDGHGGTDAAHFVRKNILRFIVEDSSFPLCVKKAIKSAFLKADYEFADDSSLDISSGTTALTAFIFGRRLIIANAGDCRAVLGRRGRAIELSKDHKPNCTAEKVRIEKLGGVVYDGYLNGQLSVARAIGDWHMKGPKGSACPLSPEPELQETDLSEDDEFLIMGCDGLWDVMSSQCAVTIARKELMIHNDPERCSRELVREALKRNTCDNLTVIVVCFSPDPPQRIEIRMQSRVRRSISAEGLNLLKGVLDGYP

SEQ ID NO: 89374 - protein, 378 aa, Arabidopsis thaliana
  peptide (1)..(378): Ceres Seq. ID no. 12718305
  misc_feature (81)..(335): Pfam Name: Protein phosphatase 2C Pfam Description: Protein phosphatase 2C
  misc_feature (1)..(378): Homolog of NCBI NO: 15226152 NR Description: protein phosphatase 2C (PP2C); protein id: supported by cDNA: gi_17979441, supported by cDNA: gi_20259092
  misc_feature (40)..(375): Homolog of NCBI NO: 37536524 NR Description: putative protein phosphatase-2C [Oryza sativa
  misc_feature (72)..(375): Homolog of NCBI NO: 10140768 NR Description: putative protein phosphatase-2C [Oryza sativa]
  misc_feature (19)..(375): Homolog of NCBI NO: 15230495 NR Description: protein phosphatase 2C (PP2C); protein id:
  misc_feature (72)..(376): Homolog of NCBI NO: 20146108 NR Description: protein phosphatase 2C [Mesembryanthemum
  misc_feature (76)..(376): Homolog of NCBI NO: 25352221 NR Description: phosphoprotein phosphatase (EC 3.1.3.16) 2C
  misc_feature (54)..(371): Homolog of NCBI NO: 34894410 NR Description: putative protein phosphatase [Oryza sativa
  misc_feature (14)..(376): Homolog of NCBI NO: 15224766 NR Description: protein phosphatase 2C (PP2C); protein id: supported by cDNA: gi_12642917, supported by cDNA: gi_14517519, by cDNA: gi_16323271 [Arabidopsis thaliana]
  misc_feature (75)..(376): Homolog of NCBI NO: 21693562 NR Description: DNA-binding protein phosphatase 2C [Nicotiana
  misc_feature (73)..(374): Homolog of NCBI NO: 24413992 NR Description: putative DNA-binding protein phosphatase 2C
MDFSPLLTVLEGDFNKDNTSSATEIDTLENLDDTRQISKGKPPRHLTSSATRLQLAANADVDVCNLVMKSLDDKSEFLPVYRSGSCAEQGAKQFMEDEHICIDDLVNHLGAAIQCSSLGAFYGVFDGHGGTDAAHFVRKNILRFIVEDSSFPLCVKKAIKSAFLKADYEFADDSSLDISSGTTALTAFIFGRRLIIANAGDCRAVLGRRGRAIELSKDHKPNCTAEKVRIEKLGGVVYDGYLNGQLSVARAIGDWHMKGPKGSACPLSPEPELQETDLSEDDEFLIMGCDGLWDVMSSQCAVTIARKELMIHNDPERCSRELVREALKRNTCDNLTVIVVCFSPDPPQRIEIRMQSRVRRSISAEGLNLLKGVLDGYP

SEQ ID NO: 89375 - protein, 311 aa, Arabidopsis thaliana
  peptide (1)..(311): Ceres Seq. ID no. 12718306
  misc_feature (14)..(268): Pfam Name: Protein phosphatase 2C Pfam Description: Protein phosphatase 2C
  misc_feature (1)..(311): Homolog of NCBI NO: 15226152 NR Description: protein phosphatase 2C (PP2C); protein id: supported by cDNA: gi_17979441, supported by cDNA: gi_20259092
  misc_feature (1)..(308): Homolog of NCBI NO: 37536524 NR Description: putative protein phosphatase-2C [Oryza sativa
  misc_feature (5)..(308): Homolog of NCBI NO: 10140768 NR Description: putative protein phosphatase-2C [Oryza sativa]
  misc_feature (1)..(308): Homolog of NCBI NO: 15230495 NR Description: protein phosphatase 2C (PP2C); protein id:
  misc_feature (5)..(309): Homolog of NCBI NO: 20146108 NR Description: protein phosphatase 2C [Mesembryanthemum
  misc_feature (9)..(309): Homolog of NCBI NO: 25352221 NR Description: phosphoprotein phosphatase (EC 3.1.3.16) 2C
  misc_feature (1)..(304): Homolog of NCBI NO: 34894410 NR Description: putative protein phosphatase [Oryza sativa
  misc_feature (1)..(309): Homolog of NCBI NO: 15224766 NR Description: protein phosphatase 2C (PP2C); protein id: supported by cDNA: gi_12642917, supported by cDNA: gi_14517519, by cDNA: gi_16323271 [Arabidopsis thaliana]
  misc_feature (8)..(309): Homolog of NCBI NO: 21693562 NR Description: DNA-binding protein phosphatase 2C [Nicotiana
  misc_feature (6)..(307): Homolog of NCBI NO: 24413992 NR Description: putative DNA-binding protein phosphatase 2C
MKSLDDKSEFLPVYRSGSCAEQGAKQFMEDEHICIDDLVNHLGAAIQCSSLGAFYGVFDGHGGTDAAHFVRKNILRFIVEDSSFPLCVKKAIKSAFLKADYEFADDSSLDISSGTTALTAFIFGRRLIIANAGDCRAVLGRRGRAIELSKDHKPNCTAEKVRIEKLGGVVYDGYLNGQLSVARAIGDWHMKGPKGSACPLSPEPELQETDLSEDDEFLIMGCDGLWDVMSSQCAVTIARKELMIHNDPERCSRELVREALKRNTCDNLTVIVVCFSPDPPQRIEIRMQSRVRRSISAEGLNLLKGVLDGYP

SEQ ID NO: 89376 - DNA, 2523 bp, Arabidopsis thaliana
  misc_feature (1)..(2523): Ceres Seq. ID no. 12718314
  misc_feature: MA Experiment ID: 20000179 Result: Down-regulated in Transcription
  misc_feature: MA Experiment 20000179 PARAMETER Experiment Name: At_Germinating_Seeds_P Parameter: Age (hr) Value: 6 vs. 0
  misc_feature: MA Experiment 20000179 PARAMETER Experiment Name: At_Germinating_Seeds_P Parameter: Tissue Value: Germinating Seeds
  misc_feature: MA Experiment ID: 20000180 Result: Down-regulated in Transcription
  misc_feature: MA Experiment 20000180 PARAMETER Experiment Name: At_Germinating_Seeds_P Parameter: Age (hr) Value: 24 vs. 0
  misc_feature: MA Experiment 20000180 PARAMETER Experiment Name: At_Germinating_Seeds_P Parameter: Tissue Value: Germinating Seeds
  misc_feature: MA Experiment ID: 20001911 Result: Up-regulated in Transcription
  misc_feature: MA Experiment 20001911 PARAMETER Experiment Name: At_Drought_Reproduction_P Parameter: Age (day) Value: 40
  misc_feature: MA Experiment 20001911 PARAMETER Experiment Name: At_Drought_Reproduction_P Parameter: Organism Value: A. thaliana
  misc_feature: MA Experiment 20001911 PARAMETER Experiment Name: At_Drought_Reproduction_P Parameter: Plant Line Value: WS
  misc_feature: MA Experiment 20001911 PARAMETER Experiment Name: At_Drought_Reproduction_P Parameter: Timepoint (day) Value: 10
  misc_feature: MA Experiment 20001911 PARAMETER Experiment Name: At_Drought_Reproduction_P Parameter: Tissue Value: Flowers
  misc_feature: MA Experiment 20001911 PARAMETER Experiment Name: At_Drought_Reproduction_P Parameter: Treatment Value: Drought vs. No Drought
agagcgagagaagaagagaagaaaggttctaggtcttgtttgctttcccctcctgctaatcgaccaagcgaataatctccagctaaccaccgatgaagcgaacaatcaacgaagtcgtcggatctacctccgtcaatactctcgattcctccattgctaagaagcctgtcttcctcaccaaaaaacagcgggaagagttagccctaaaacgccgccaggatcaaatctccgagcaacgtgtccgtcgtgagcaacttggtcgccccgagcccgagacggaagatgtctccaatggagataccaatcgggataaggatcgagatagagatcgggaccgagaccgagaacgtgaccgagatagggagagagatagagggcgagatcgagaccgcgatagggatagagacagggatagggatagagagcgagagagagaccgtgagcgtgaccgtcgtgaacgagatcgtgaaccggatcggagaaatagagaaaaggagagggaagaggaggttaaggctagggagaaggcgcgtgttgagaaattagttgagagagagaaggagaaggaacttgacgccattaaagagcagtatcttggaggtaagaagccgaagaagagagtcattaggccaagcgagaagtttcgtttctcttttgattgggaaaacactgaggatacttctagggatatgaacgttctttaccaaaaccctcatgaagctcagcttctctttgggagagggtttcgtgctggtatggaccgtcgtgagcagaagaaacaagcggctaagcatgagaaagagatgcgagacgagattcgtaagaaagatggtattgtagagaaaccagaggaagctgctgctcagagagtgagagaagaagctgctgatacttatgactcgtttgatatgagggttgacaggcattggagtgataagagattagaggagatgactgaaagggattggcgtattttcagagaagatttcaatatctcttacaagggttcgaggattcctcgtccgatgaggagctgggaagagagtaagcttacttctgagcttttgaaagctgtggagagagctggatacaagaaaccttctcctattcaaatggcagctataccacttggactgcaacagcgtgatgttatcggcattgcagagactggttctggtaagactgctgcttttgttttacccatgttagcttacatctctagattgccaccgatgagcgaagagaatgagactgaggggccttatgctgttgttatggcccctactagagagcttgctcagcagattgaggaggaaactgttaagtttgcgcattatctagggtttagggtgacttctattgtgggtggtcagtcgattgaggaacaggggttgaagataacacaagggtgtgagattgtgattgctactccgggtcgtctgattgattgccttgagaggcgttatgcggtgttgaaccagtgtaactatgtggttcttgatgaggcagatcggatgattgacatgggtttcgagccacaggttgcaggtgtgttagatgcgatgccttcaagtaatttgaaacctgagaacgaagaagaagagcttgatgaaaagaagatttatagaactacatatatgtttagtgctacaatgcctcctggggtagagcggctagctcggaagtacttgaggaacccggttgttgtcaccattggtactgctggaaagactacggatttgatttcgcaacatgttattatgatgaaagaatcagagaaattcttcagattgcagaaactgctcgatgagctcggcgagaagactgccattgtgtttgttaacacaaagaaaaattgtgactcgattgctaagaatctggataaggcagggtaccgtgtcacgaccttgcacggtgggaaatcacaagagcagagagaaatcagcttagaaggattcagagcaaagagatacaacgttcttgttgcaacagatgttgtaggacgtggaattgatattccggatgtggctcatgtcataaactacgacatgcctaaacatatagagatgtacacacatcgtatcggacgtacaggacgtgctgggaaaagtggtgttgcgacttcgttcttgacacttcatgataccgaagtcttctatgatctgaagcagatgcttgttcagagcaacagtgcggtgcctcctgagctggcgagacatgaagcgtccagattcaaaccaggtacggttcctgatagacccccaagacatagtgacactgtctatataaattgagtcgataggctctctggatttgttcttaactttcccagtgacgtttaccttttgggattgatctcatgcgtgtgcttagtcgcatgttttatctttaagattcgtagtttgatagtgaaggaagcagtagcaagtgtaatagttgaaacttgagtacctttttaaaacgatttagtactggtcttgttcaagaaaagtatctttgattctctgcctaatttttccacat

SEQ ID NO: 89377 - protein, 733 aa, Arabidopsis thaliana
  peptide (1)..(733): Ceres Seq. ID no. 12718315
  misc_feature (326)..(554): Pfam Name: DEAD/DEAH box helicase Pfam Description: DEAD/DEAH box helicase
  misc_feature (23)..(731): Homolog of NCBI NO: 13702821 NR Description: putative snRNP protein [Oryza sativa]
  misc_feature (275)..(722): Homolog of NCBI NO: 25518723 NR Description: hypothetical protein F3H9.16 [imported] - thaliana >gi|9795619|gb|AAF98437.1|AC021044_16 Similar to RNA
  misc_feature (80)..(254): Homolog of NCBI NO: 25518723 NR Description: hypothetical protein F3H9.16 [imported] - thaliana >gi|9795619|gb|AAF98437.1|AC021044_16 Similar to RNA
  misc_feature (24)..(732): Homolog of NCBI NO: 39584962 NR Description: Hypothetical protein CBG09074 [Caenorhabditis
  misc_feature (119)..(725): Homolog of NCBI NO: 24584994 NR Description: CG10333-PA [Drosophila melanogaster]
  misc_feature (47)..(118): Homolog of NCBI NO: 24584994 NR Description: CG10333-PA [Drosophila melanogaster]
  misc_feature (27)..(731): Homolog of NCBI NO: 12803125 NR Description: prp28, U5 snRNP 100 kd protein [Homo sapiens]
  misc_feature (24)..(162): Homolog of NCBI NO: 24584994 NR Description: CG10333-PA [Drosophila melanogaster]
  misc_feature (27)..(731): Homolog of NCBI NO: 4759278 NR Description: prp28, U5 snRNP 100 kd protein [Homo sapiens]
  misc_feature (30)..(731): Homolog of NCBI NO: 38014376 NR Description: Unknown (protein for MGC:63742) [Danio rerio]
MKRTINEVVGSTSVNTLDSSIAKKPVFLTKKQREELALKRRQDQISEQRVRREQLGRPEPETEDVSNGDTNRDKDRDRDRDRDRERDRDRERDRGRDRDRDRDRDRDRDRERERDRERDRRERDREPDRRNREKEREEEVKAREKARVEKLVEREKEKELDAIKEQYLGGKKPKKRVIRPSEKFRFSFDWENTEDTSRDMNVLYQNPHEAQLLFGRGFRAGMDRREQKKQAAKHEKEMRDEIRKKDGIVEKPEEAAAQRVREEAADTYDSFDMRVDRHWSDKRLEEMTERDWRIFREDFNISYKGSRIPRPMRSWEESKLTSELLKAVERAGYKKPSPIQMAAIPLGLQQRDVIGIAETGSGKTAAFVLPMLAYISRLPPMSEENETEGPYAVVMAPTRELAQQIEEETVKFAHYLGFRVTSIVGGQSIEEQGLKITQGCEIVIATPGRLIDCLERRYAVLNQCNYVVLDEADRMIDMGFEPQVAGVLDAMPSSNLKPENEEEELDEKKIYRTTYMFSATMPPGVERLARKYLRNPVVVTIGTAGKTTDLISQHVIMMKESEKFFRLQKLLDELGEKTAIVFVNTKKNCDSIAKNLDKAGYRVTTLHGGKSQEQREISLEGFRAKRYNVLVATDVVGRGIDIPDVAHVINYDMPKHIEMYTHRIGRTGRAGKSGVATSFLTLHDTEVFYDLKQMLVQSNSAVPPELARHEASRFKPGTVPDRPPRHSDTVYIN

SEQ ID NO: 89378 - protein, 534 aa, Arabidopsis thaliana
  peptide (1)..(534): Ceres Seq. ID no. 12718316
  misc_feature (127)..(355): Pfam Name: DEAD/DEAH box helicase Pfam Description: DEAD/DEAH box helicase
  misc_feature (1)..(532): Homolog of NCBI NO: 13702821 NR Description: putative snRNP protein [Oryza sativa]
  misc_feature (76)..(523): Homolog of NCBI NO: 25518723 NR Description: hypothetical protein F3H9.16 [imported] - thaliana >gi|9795619|gb|AAF98437.1|AC021044_16 Similar to RNA
  misc_feature (1)..(55): Homolog of NCBI NO: 25518723 NR Description: hypothetical protein F3H9.16 [imported] - thaliana >gi|9795619|gb|AAF98437.1|AC021044_16 Similar to RNA
  misc_feature (1)..(533): Homolog of NCBI NO: 39584962 NR Description: Hypothetical protein CBG09074 [Caenorhabditis
  misc_feature (1)..(526): Homolog of NCBI NO: 24584994 NR Description: CG10333-PA [Drosophila melanogaster]
  misc_feature (1)..(532): Homolog of NCBI NO: 12803125 NR Description: prp28, U5 snRNP 100 kd protein [Homo sapiens]
  misc_feature (1)..(532): Homolog of NCBI NO: 4759278 NR Description: prp28, U5 snRNP 100 kd protein [Homo sapiens]
  misc_feature (1)..(532): Homolog of NCBI NO: 38014376 NR Description: Unknown (protein for MGC:63742) [Danio rerio]
  misc_feature (1)..(499): Homolog of NCBI NO: 39584962 NR Description: Hypothetical protein CBG09074 [Caenorhabditis
  misc_feature (77)..(534): Homolog of NCBI NO: 23613207 NR Description: snrnp protein, putative [Plasmodium falciparum >gi|23504671|emb|CAD51549.1| snrnp protein, putative [Plasmodium
MNVLYQNPHEAQLLFGRGFRAGMDRREQKKQAAKHEKEMRDEIRKKDGIVEKPEEAAAQRVREEAADTYDSFDMRVDRHWSDKRLEEMTERDWRIFREDFNISYKGSRIPRPMRSWEESKLTSELLKAVERAGYKKPSPIQMAAIPLGLQQRDVIGIAETGSGKTAAFVLPMLAYISRLPPMSEENETEGPYAVVMAPTRELAQQIEEETVKFAHYLGFRVTSIVGGQSIEEQGLKITQGCEIVIATPGRLIDCLERRYAVLNQCNYVVLDEADRMIDMGFEPQVAGVLDAMPSSNLKPENEEEELDEKKIYRTTYMFSATMPPGVERLARKYLRNPVVVTIGTAGKTTDLISQHVIMMKESEKFFRLQKLLDELGEKTAIVFVNTKKNCDSIAKNLDKAGYRVTTLHGGKSQEQREISLEGFRAKRYNVLVATDVVGRGIDIPDVAHVINYDMPKHIEMYTHRIGRTGRAGKSGVATSFLTLHDTEVFYDLKQMLVQSNSAVPPELARHEASRFKPGTVPDRPPRHSDTVYIN

SEQ ID NO: 89379 - protein, 512 aa, Arabidopsis thaliana
  peptide (1)..(512): Ceres Seq. ID no. 12718317
  misc_feature (105)..(333): Pfam Name: DEAD/DEAH box helicase Pfam Description: DEAD/DEAH box helicase
  misc_feature (1)..(510): Homolog of NCBI NO: 13702821 NR Description: putative snRNP protein [Oryza sativa]
  misc_feature (54)..(501): Homolog of NCBI NO: 25518723 NR Description: hypothetical protein F3H9.16 [imported] - thaliana >gi|9795619|gb|AAF98437.1|AC021044_16 Similar to RNA
  misc_feature (1)..(33): Homolog of NCBI NO: 25518723 NR Description: hypothetical protein F3H9.16 [imported] - thaliana >gi|9795619|gb|AAF98437.1|AC021044_16 Similar to RNA
  misc_feature (1)..(511): Homolog of NCBI NO: 39584962 NR Description: Hypothetical protein CBG09074 [Caenorhabditis
  misc_feature (1)..(504): Homolog of NCBI NO: 24584994 NR Description: CG10333-PA [Drosophila melanogaster]
  misc_feature (1)..(510): Homolog of NCBI NO: 12803125 NR Description: prp28, U5 snRNP 100 kd protein [Homo sapiens]
  misc_feature (1)..(510): Homolog of NCBI NO: 4759278 NR Description: prp28, U5 snRNP 100 kd protein [Homo sapiens]
  misc_feature (1)..(510): Homolog of NCBI NO: 38014376 NR Description: Unknown (protein for MGC:63742) [Danio rerio]
  misc_feature (1)..(477): Homolog of NCBI NO: 39584962 NR Description: Hypothetical protein CBG09074 [Caenorhabditis
  misc_feature (55)..(512): Homolog of NCBI NO: 23613207 NR Description: snrnp protein, putative [Plasmodium falciparum >gi|23504671|emb|CAD51549.1| snrnp protein, putative [Plasmodium
MDRREQKKQAAKHEKEMRDEIRKKDGIVEKPEEAAAQRVREEAADTYDSFDMRVDRHWSDKRLEEMTERDWRIFREDFNISYKGSRIPRPMRSWEESKLTSELLKAVERAGYKKPSPIQMAAIPLGLQQRDVIGIAETGSGKTAAFVLPMLAYISRLPPMSEENETEGPYAVVMAPTRELAQQIEEETVKFAHYLGFRVTSIVGGQSIEEQGLKITQGCEIVIATPGRLIDCLERRYAVLNQCNYVVLDEADRMIDMGFEPQVAGVLDAMPSSNLKPENEEEELDEKKIYRTTYMFSATMPPGVERLARKYLRNPVVVTIGTAGKTTDLISQHVIMMKESEKFFRLQKLLDELGEKTAIVFVNTKKNCDSIAKNLDKAGYRVTTLHGGKSQEQREISLEGFRAKRYNVLVATDVVGRGIDIPDVAHVINYDMPKHIEMYTHRIGRTGRAGKSGVATSFLTLHDTEVFYDLKQMLVQSNSAVPPELARHEASRFKPGTVPDRPPRHSDTVYIN

SEQ ID NO: 89380 - DNA, 1214 bp, Arabidopsis thaliana
  misc_feature (1)..(1214): Ceres Seq. ID no. 12718325
  misc_feature: MA Experiment ID: 20000182 Result: Up-regulated in Transcription
  misc_feature: MA Experiment 20000182 PARAMETER Experiment Name: At_2mM_SA_P Parameter: Age (day) Value: 14
  misc_feature: MA Experiment 20000182 PARAMETER Experiment Name: At_2mM_SA_P Parameter: Organism Value: A. thaliana
  misc_feature: MA Experiment 20000182 PARAMETER Experiment Name: At_2mM_SA_P Parameter: Plant Line Value: WS
  misc_feature: MA Experiment 20000182 PARAMETER Experiment Name: At_2mM_SA_P Parameter: Timepoint (hr) Value: 6
  misc_feature: MA Experiment 20000182 PARAMETER Experiment Name: At_2mM_SA_P Parameter: Tissue Value: Aerial
  misc_feature: MA Experiment 20000182 PARAMETER Experiment Name: At_2mM_SA_P Parameter: Treatment Value: 2mM SA vs. No Treatment
  misc_feature: MA Experiment ID: 20000184 Result: Down-regulated in Transcription
  misc_feature: MA Experiment 20000184 PARAMETER Experiment Name: At_Shoots__P Parameter: Age (day) Value: 7
  misc_feature: MA Experiment 20000184 PARAMETER Experiment Name: At_Shoots__P Parameter: Tissue Value: Shoots vs. Whole Plant
  misc_feature: MA Experiment ID: 20000265 Result: Down-regulated in Transcription
  misc_feature: MA Experiment 20000265 PARAMETER Experiment Name: At_Open_Flower_P Parameter: Age (day) Value: 21
  misc_feature: MA Experiment 20000265 PARAMETER Experiment Name: At_Open_Flower_P Parameter: Plant Line Value: WS
  misc_feature: MA Experiment 20000265 PARAMETER Experiment Name: At_Open_Flower_P Parameter: Tissue Value: Closed Flower vs. Whole Plant
  misc_feature: MA Experiment ID: 20000438 Result: Down-regulated in Transcription
  misc_feature: MA Experiment 20000438 PARAMETER Experiment Name: At_Shoots__P Parameter: Age (day) Value: 14
  misc_feature: MA Experiment 20000438 PARAMETER Experiment Name: At_Shoots__P Parameter: Tissue Value: Shoots vs. Whole Plant
  misc_feature: MA Experiment ID: 20000794 Result: Down-regulated in Transcription
  misc_feature: MA Experiment 20000794 PARAMETER Experiment Name: At_Petals_P Parameter: Age (day) Value: 23-25 days
  misc_feature: MA Experiment 20000794 PARAMETER Experiment Name: At_Petals_P Parameter: Plant Line Value: WS
  misc_feature: MA Experiment 20000794 PARAMETER Experiment Name: At_Petals_P Parameter: Tissue Value: Petals vs. Whole plant
  misc_feature: MA Experiment ID: 20001451 Result: Down-regulated in Transcription
  misc_feature: MA Experiment 20001451 PARAMETER Experiment Name: At_Far-red-induction_P Parameter: Age (day) Value: 7
  misc_feature: MA Experiment 20001451 PARAMETER Experiment Name: At_Far-red-induction_P Parameter: Light Value: Far-red vs. White
  misc_feature: MA Experiment 20001451 PARAMETER Experiment Name: At_Far-red-induction_P Parameter: Organism Value: A. thaliana
  misc_feature: MA Experiment 20001451 PARAMETER Experiment Name: At_Far-red-induction_P Parameter: Plant Line Value: Columbia
  misc_feature: MA Experiment 20001451 PARAMETER Experiment Name: At_Far-red-induction_P Parameter: Timepoint (hr) Value: 24
  misc_feature: MA Experiment 20001451 PARAMETER Experiment Name: At_Far-red-induction_P Parameter: Tissue Value: Whole Plant
acatatttgaaagctttcacggcttctgcgatatttcagctcatctaaatctgcagaatcctatttctttttttccttgagtttctctctctcgccggatataaaccctatttttggtcggaattgttgttcgaattcgaatggggactccggaatttccagatctggggaaacactgctccgtcgatgtttgcaagcaaatcgatttcttgcctttcacctgcgaccgttgcctacaggtgttttgtttggatcatcgaagctatatgaaacatagttgtccaaaaggcgatagagaagatgtgactgtagttatctgcccactctgtgctaaaggagtccgattaaacccaaacgaagacccaaatataacatgggagaaacatgtcaataccgactgtgacccatcaaactacgaaaaagctacaaagaagaagaaatgtcccgttccaagatgcaaggagtacctaactttctccaacaccatcaagtgccgagattgcaatgtcgatcactgcttgaaacatcgttttggacctgatcacacttgccctggaccaagaaaactcccattcatgggtttcttgagtagtagtaccaccagaaaagaagctaagacaacaagacccaacaaagctcatccatcaacttcatcatcttcttcttcttcgagatggtctaatctcctatcttcagcagaagcaggaattagcaggctcggtaatgacattagccagaagctacagttttcgagcagcaaagataatggtatcgtggaggtgtgtccacagtgcggtgcgaaattctcttcggttacttctcttgtggaacatgtagagaaaacacatgagaggaacaagaagcagaatcatggcaatgtcacggtcgatgtctgccctagatgtagcagaggattccgcgatccagtagatcttgtgaaccatatcgaaagagatcaccgaggcacttcgaaagcataggaacatatgcgtttacaagccacacatcacaacataacttgtgaaaggtactcaaacatctttgtatttttcttttcatatttgtactggttttaaacaaccaaaaaaaatgtcacattctttgaaaagtcatggactcatgtccagaagtgtagccagaagtgtagtagactaatgttatcattatccttgggccttggcccttgggctttgggtgatatggttttttcaatg

SEQ ID NO: 89381 - protein, 279 aa, Arabidopsis thaliana
  peptide (1)..(279): Ceres Seq. ID no. 12718326
  misc_feature (101)..(145): Pfam Name: AN1-like Zinc finger Pfam Description: AN1-like Zinc finger
  misc_feature (1)..(279): Homolog of NCBI NO: 30688811 NR Description: zinc finger protein (PMZ) -related [Arabidopsis >gi|17529076|gb|AAL38748.1| unknown protein [Arabidopsis >gi|20465575|gb|AAM20270.1| unknown protein [Arabidopsis
  misc_feature (1)..(279): Homolog of NCBI NO: 33146779 NR Description: putative arsenite inducible RNA associated
  misc_feature (1)..(241): Homolog of NCBI NO: 15230311 NR Description: putative protein; protein id: At3g57480.1
  misc_feature (2)..(177): Homolog of NCBI NO: 15232930 NR Description: zinc finger protein (PMZ), putative; protein id:
  misc_feature (5)..(217): Homolog of NCBI NO: 21312112 NR Description: RIKEN cDNA 1110060O18 [Mus musculus]
  misc_feature (5)..(217): Homolog of NCBI NO: 15079311 NR Description: RIKEN cDNA 1110060O18 gene [Mus musculus]
  misc_feature (5)..(174): Homolog of NCBI NO: 33416395 NR Description: Unknown (protein for MGC:66295) [Danio rerio]
  misc_feature (5)..(169): Homolog of NCBI NO: 19111158 NR Description: arsenite inducible RNA associated protein [Mus >gi|9651711|gb|AAF91234.1|AF224494_1 arsenite inducible RNA
  misc_feature (5)..(217): Homolog of NCBI NO: 34876869 NR Description: similar to RIKEN cDNA 1110060O18 [Rattus
  misc_feature (5)..(255): Homolog of NCBI NO: 20270357 NR Description: hypothetical protein BC018415 [Homo sapiens]
MGTPEFPDLGKHCSVDVCKQIDFLPFTCDRCLQVFCLDHRSYMKHSCPKGDREDVTVVICPLCAKGVRLNPNEDPNITWEKHVNTDCDPSNYEKATKKKKCPVPRCKEYLTFSNTIKCRDCNVDHCLKHRFGPDHTCPGPRKLPFMGFLSSSTTRKEAKTTRPNKAHPSTSSSSSSSRWSNLLSSAEAGISRLGNDISQKLQFSSSKDNGIVEVCPQCGAKFSSVTSLVEHVEKTHERNKKQNHGNVTVDVCPRCSRGFRDPVDLVNHIERDHRGTSKA

SEQ ID NO: 89382 - protein, 237 aa, Arabidopsis thaliana
  peptide (1)..(237): Ceres Seq. ID no. 12718327
  misc_feature (59)..(103): Pfam Name: AN1-like Zinc finger Pfam Description: AN1-like Zinc finger
  misc_feature (1)..(237): Homolog of NCBI NO: 30688811 NR Description: zinc finger protein (PMZ) -related [Arabidopsis >gi|17529076|gb|AAL38748.1| unknown protein [Arabidopsis >gi|20465575|gb|AAM20270.1| unknown protein [Arabidopsis
  misc_feature (1)..(237): Homolog of NCBI NO: 33146779 NR Description: putative arsenite inducible RNA associated
  misc_feature (1)..(199): Homolog of NCBI NO: 15230311 NR Description: putative protein; protein id: At3g57480.1
  misc_feature (1)..(135): Homolog of NCBI NO: 15232930 NR Description: zinc finger protein (PMZ), putative; protein id:
  misc_feature (1)..(175): Homolog of NCBI NO: 21312112 NR Description: RIKEN cDNA 1110060O18 [Mus musculus]
  misc_feature (1)..(175): Homolog of NCBI NO: 15079311 NR Description: RIKEN cDNA 1110060O18 gene [Mus musculus]
  misc_feature (1)..(132): Homolog of NCBI NO: 33416395 NR Description: Unknown (protein for MGC:66295) [Danio rerio]
  misc_feature (1)..(127): Homolog of NCBI NO: 19111158 NR Description: arsenite inducible RNA associated protein [Mus >gi|9651711|gb|AAF91234.1|AF224494_1 arsenite inducible RNA
  misc_feature (1)..(175): Homolog of NCBI NO: 34876869 NR Description: similar to RIKEN cDNA 1110060O18 [Rattus
  misc_feature (1)..(213): Homolog of NCBI NO: 20270357 NR Description: hypothetical protein BC018415 [Homo sapiens]
MKHSCPKGDREDVTVVICPLCAKGVRLNPNEDPNITWEKHVNTDCDPSNYEKATKKKKCPVPRCKEYLTFSNTIKCRDCNVDHCLKHRFGPDHTCPGPRKLPFMGFLSSSTTRKEAKTTRPNKAHPSTSSSSSSSRWSNLLSSAEAGISRLGNDISQKLQFSSSKDNGIVEVCPQCGAKFSSVTSLVEHVEKTHERNKKQNHGNVTVDVCPRCSRGFRDPVDLVNHIERDHRGTSKA

SEQ ID NO: 89383 - DNA, 1593 bp, Arabidopsis thaliana
  misc_feature (1)..(1593): Ceres Seq. ID no. 12718332
  misc_feature: MA Experiment ID: 20000184 Result: Down-regulated in Transcription
  misc_feature: MA Experiment 20000184 PARAMETER Experiment Name: At_Shoots__P Parameter: Age (day) Value: 7
  misc_feature: MA Experiment 20000184 PARAMETER Experiment Name: At_Shoots__P Parameter: Tissue Value: Shoots vs. Whole Plant
  misc_feature: MA Experiment ID: 20000264 Result: Up-regulated in Transcription
  misc_feature: MA Experiment 20000264 PARAMETER Experiment Name: At_Open_Flower_P Parameter: Age (day) Value: 21
  misc_feature: MA Experiment 20000264 PARAMETER Experiment Name: At_Open_Flower_P Parameter: Plant Line Value: WS
  misc_feature: MA Experiment 20000264 PARAMETER Experiment Name: At_Open_Flower_P Parameter: Tissue Value: Open Flower vs. Whole Plant
  misc_feature: MA Experiment ID: 20000265 Result: Up-regulated in Transcription
  misc_feature: MA Experiment 20000265 PARAMETER Experiment Name: At_Open_Flower_P Parameter: Age (day) Value: 21
  misc_feature: MA Experiment 20000265 PARAMETER Experiment Name: At_Open_Flower_P Parameter: Plant Line Value: WS
  misc_feature: MA Experiment 20000265 PARAMETER Experiment Name: At_Open_Flower_P Parameter: Tissue Value: Closed Flower vs. Whole Plant
  misc_feature: MA Experiment ID: 20000286 Result: Up-regulated in Transcription
  misc_feature: MA Experiment 20000286 PARAMETER Experiment Name: At_Open_Flower_P Parameter: Age (day) Value: 21
  misc_feature: MA Experiment 20000286 PARAMETER Experiment Name: At_Open_Flower_P Parameter: Plant Line Value: WS
  misc_feature: MA Experiment 20000286 PARAMETER Experiment Name: At_Open_Flower_P Parameter: Tissue Value: Half Open vs. Whole Plant
  misc_feature: MA Experiment ID: 20000794 Result: Up-regulated in Transcription
  misc_feature: MA Experiment 20000794 PARAMETER Experiment Name: At_Petals_P Parameter: Age (day) Value: 23-25 days
  misc_feature: MA Experiment 20000794 PARAMETER Experiment Name: At_Petals_P Parameter: Plant Line Value: WS
  misc_feature: MA Experiment 20000794 PARAMETER Experiment Name: At_Petals_P Parameter: Tissue Value: Petals vs. Whole plant
  misc_feature: MA Experiment ID: 20001910 Result: Up-regulated in Transcription
  misc_feature: MA Experiment 20001910 PARAMETER Experiment Name: At_Drought_Reproduction_P Parameter: Age (day) Value: 37
  misc_feature: MA Experiment 20001910 PARAMETER Experiment Name: At_Drought_Reproduction_P Parameter: Organism Value: A. thaliana
  misc_feature: MA Experiment 20001910 PARAMETER Experiment Name: At_Drought_Reproduction_P Parameter: Plant Line Value: WS
  misc_feature: MA Experiment 20001910 PARAMETER Experiment Name: At_Drought_Reproduction_P Parameter: Timepoint (day) Value: 7
  misc_feature: MA Experiment 20001910 PARAMETER Experiment Name: At_Drought_Reproduction_P Parameter: Tissue Value: Flowers
  misc_feature: MA Experiment 20001910 PARAMETER Experiment Name: At_Drought_Reproduction_P Parameter: Treatment Value: Drought vs. No Drought
atgggaaattgttgtggaacggctggatcgttgattcaagataagcagaagaaaggttttaaattgccaaatcctttctcaaacgagtacggcaaccaccacgatggccttaagcttatcgtgttgaaggaaccaacgggtcatgagatcaagcagaaatataaattaggtcgtgagttaggtcgaggagagttcggtgtgacgtatctgtgcaccgagatcgagaccggagagattttcgcatgcaaatcaatcttaaagaagaagctgaaaacgtcgattgatatagaggacgttaagagagaagttgagatcatgaggcaaatgcctgaacatcctaatattgttactttgaaagagacttatgaggatgataaagctgtgcatttggttatggagctttgtgaaggcggtgagcttttcgataggattgttgctagagggcattatacggagagagctgctgcttcggttattaaaacgatcatcgaggttgttcagatgtgtcataagcatggagtaatgcacagagatttaaaacctgagaacttcttgtttgcaaacaagaaggaaactgcatctttgaaggctattgattttggtctctctgttttctttaaaccaggcgagagatttaacgaaattgttgggagtccttactacatggctcctgaggtattaaggaggagttatggacaagaaattgacatttggagcgcaggagtgattctttacatattgctctgtggtgttccacctttttgggcagaaaccgaacatggagtcgcaaaagcaattcttaaatctgtaattgactttaaaagagacccctggcctaaagtttctgataatgcaaaagatctgatcaaaaagatgcttcatcctgatccaaggcgtcgtctaactgctcaacaagtgcttgatcatccgtggatacagaatggtaagaatgcttccaatgtatcattgggtgaaaccgtaagagcaaggcttaagcaattctctgttatgaacaagctcaagaaaagggcactcagggttatcgctgagcatctatcggttgaagaaacatcttgcataaaagaaagattccaagtaatggatacaagcaatagaggaaagattactatcaccgagctaggaatcggattgcagaaactcgggattgttgttcctcaagatgacattcaaatattgatggacgcgggagatgttgataaagatggatatttagacgtcaatgaatttgtagccatatcggtacacatcaggaagttaggcaacgacgagcacttaaagaaagcttttacgttctttgacaaaaacaagagtggttatatcgaaatagaggagttaagagatgctttggcagatgatgttgacactactagtgaagaagttgttgaagccattattcttgatgtcgataccaataaggatgggaaaataagttacgacgaatttgcaacgatgatgaaaacgggaacggattggagaaaagcttcgaggcagtactcgagggacctgtttaagtgtcttagtcttaagctcatgcaagatgggtccttgcagtctaatggagatacaaagtag

SEQ ID NO: 89384 - protein, 530 aa, Arabidopsis thaliana
  peptide (1)..(530): Ceres Seq. ID no. 12718333
  misc_feature (54)..(312): Pfam Name: Protein kinase domain Pfam Description: Protein kinase domain
  misc_feature (1)..(530): Homolog of NCBI NO: 15227452 NR Description: putative calcium-dependent protein kinase; id: At2g41860.1 [Arabidopsis thaliana] >gi|25287680|pir||A84847
  misc_feature (1)..(530): Homolog of NCBI NO: 30694663 NR Description: calcium-dependent protein kinase, putative (CDPK)
  misc_feature (1)..(525): Homolog of NCBI NO: 11259874 NR Description: calcium-dependent protein kinase - Arabidopsis
  misc_feature (1)..(530): Homolog of NCBI NO: 2665890 NR Description: calcium-dependent protein kinase [Fragaria x
  misc_feature (1)..(529): Homolog of NCBI NO: 18416872 NR Description: calcium-dependent protein kinase-like protein; id: At5g12480.1, supported by cDNA: gi_13605616, supported by gi_1399276 [Arabidopsis thaliana] >gi|1399277|gb|AAB03247.1|
  misc_feature (1)..(528): Homolog of NCBI NO: 15239742 NR Description: calcium-dependent protein kinase; protein id: supported by cDNA: gi_836941 [Arabidopsis thaliana]
  misc_feature (13)..(524): Homolog of NCBI NO: 34899838 NR Description: putative calcium-dependent protein kinase [Oryza
  misc_feature (1)..(523): Homolog of NCBI NO: 30699042 NR Description: calcium-dependent protein kinase, putative (CDPK)
  misc_feature (15)..(523): Homolog of NCBI NO: 14484895 NR Description: calcium-dependent protein kinase [Funaria
  misc_feature (1)..(523): Homolog of NCBI NO: 28416563 NR Description: At1g18890 [Arabidopsis thaliana]
MGNCCGTAGSLIQDKQKKGFKLPNPFSNEYGNHHDGLKLIVLKEPTGHEIKQKYKLGRELGRGEFGVTYLCTEIETGEIFACKSILKKKLKTSIDIEDVKREVEIMRQMPEHPNIVTLKETYEDDKAVHLVMELCEGGELFDRIVARGHYTERAAASVIKTIIEVVQMCHKHGVMHRDLKPENFLFANKKETASLKAIDFGLSVFFKPGERFNEIVGSPYYMAPEVLRRSYGQEIDIWSAGVILYILLCGVPPFWAETEHGVAKAILKSVIDFKRDPWPKVSDNAKDLIKKMLHPDPRRRLTAQQVLDHPWIQNGKNASNVSLGETVRARLKQFSVMNKLKKRALRVIAEHLSVEETSCIKERFQVMDTSNRGKITITELGIGLQKLGIVVPQDDIQILMDAGDVDKDGYLDVNEFVAISVHIRKLGNDEHLKKAFTFFDKNKSGYIEIEELRDALADDVDTTSEEVVEAIILDVDTNKDGKISYDEFATMMKTGTDWRKASRQYSRDLFKCLSLKLMQDGSLQSNGDTK

SEQ ID NO: 89385 - protein, 425 aa, Arabidopsis thaliana
  peptide (1)..(425): Ceres Seq. ID no. 12718334
  misc_feature (1)..(207): Pfam Name: Protein kinase domain Pfam Description: Protein kinase domain
  misc_feature (1)..(425): Homolog of NCBI NO: 15227452 NR Description: putative calcium-dependent protein kinase; id: At2g41860.1 [Arabidopsis thaliana] >gi|25287680|pir||A84847
  misc_feature (1)..(425): Homolog of NCBI NO: 30694663 NR Description: calcium-dependent protein kinase, putative (CDPK)
  misc_feature (1)..(420): Homolog of NCBI NO: 11259874 NR Description: calcium-dependent protein kinase - Arabidopsis
  misc_feature (1)..(425): Homolog of NCBI NO: 2665890 NR Description: calcium-dependent protein kinase [Fragaria x
  misc_feature (1)..(424): Homolog of NCBI NO: 18416872 NR Description: calcium-dependent protein kinase-like protein; id: At5g12480.1, supported by cDNA: gi_13605616, supported by gi_1399276 [Arabidopsis thaliana] >gi|1399277|gb|AAB03247.1|
  misc_feature (1)..(423): Homolog of NCBI NO: 15239742 NR Description: calcium-dependent protein kinase; protein id: supported by cDNA: gi_836941 [Arabidopsis thaliana]
  misc_feature (1)..(419): Homolog of NCBI NO: 34899838 NR Description: putative calcium-dependent protein kinase [Oryza
  misc_feature (1)..(418): Homolog of NCBI NO: 30699042 NR Description: calcium-dependent protein kinase, putative (CDPK)
  misc_feature (1)..(418): Homolog of NCBI NO: 14484895 NR Description: calcium-dependent protein kinase [Funaria
  misc_feature (1)..(418): Homolog of NCBI NO: 28416563 NR Description: At1g18890 [Arabidopsis thaliana]
MRQMPEHPNIVTLKETYEDDKAVHLVMELCEGGELFDRIVARGHYTERAAASVIKTIIEVVQMCHKHGVMHRDLKPENFLFANKKETASLKAIDFGLSVFFKPGERFNEIVGSPYYMAPEVLRRSYGQEIDIWSAGVILYILLCGVPPFWAETEHGVAKAILKSVIDFKRDPWPKVSDNAKDLIKKMLHPDPRRRLTAQQVLDHPWIQNGKNASNVSLGETVRARLKQFSVMNKLKKRALRVIAEHLSVEETSCIKERFQVMDTSNRGKITITELGIGLQKLGIVVPQDDIQILMDAGDVDKDGYLDVNEFVAISVHIRKLGNDEHLKKAFTFFDKNKSGYIEIEELRDALADDVDTTSEEVVEAIILDVDTNKDGKISYDEFATMMKTGTDWRKASRQYSRDLFKCLSLKLMQDGSLQSNGDTK

SEQ ID NO: 89386 - protein, 422 aa, Arabidopsis thaliana
  peptide (1)..(422): Ceres Seq. ID no. 12718335
  misc_feature (1)..(204): Pfam Name: Protein kinase domain Pfam Description: Protein kinase domain
  misc_feature (1)..(422): Homolog of NCBI NO: 15227452 NR Description: putative calcium-dependent protein kinase; id: At2g41860.1 [Arabidopsis thaliana] >gi|25287680|pir||A84847
  misc_feature (1)..(422): Homolog of NCBI NO: 30694663 NR Description: calcium-dependent protein kinase, putative (CDPK)
  misc_feature (1)..(417): Homolog of NCBI NO: 11259874 NR Description: calcium-dependent protein kinase - Arabidopsis
  misc_feature (1)..(422): Homolog of NCBI NO: 2665890 NR Description: calcium-dependent protein kinase [Fragaria x
  misc_feature (1)..(421): Homolog of NCBI NO: 18416872 NR Description: calcium-dependent protein kinase-like protein; id: At5g12480.1, supported by cDNA: gi_13605616, supported by gi_1399276 [Arabidopsis thaliana] >gi|1399277|gb|AAB03247.1|
  misc_feature (1)..(420): Homolog of NCBI NO: 15239742 NR Description: calcium-dependent protein kinase; protein id: supported by cDNA: gi_836941 [Arabidopsis thaliana]
  misc_feature (1)..(416): Homolog of NCBI NO: 34899838 NR Description: putative calcium-dependent protein kinase [Oryza
  misc_feature (1)..(415): Homolog of NCBI NO: 30699042 NR Description: calcium-dependent protein kinase, putative (CDPK)
  misc_feature (1)..(415): Homolog of NCBI NO: 14484895 NR Description: calcium-dependent protein kinase [Funaria
  misc_feature (1)..(415): Homolog of NCBI NO: 28416563 NR Description: At1g18890 [Arabidopsis thaliana]
MPEHPNIVTLKETYEDDKAVHLVMELCEGGELFDRIVARGHYTERAAASVIKTIIEVVQMCHKHGVMHRDLKPENFLFANKKETASLKAIDFGLSVFFKPGERFNEIVGSPYYMAPEVLRRSYGQEIDIWSAGVILYILLCGVPPFWAETEHGVAKAILKSVIDFKRDPWPKVSDNAKDLIKKMLHPDPRRRLTAQQVLDHPWIQNGKNASNVSLGETVRARLKQFSVMNKLKKRALRVIAEHLSVEETSCIKERFQVMDTSNRGKITITELGIGLQKLGIVVPQDDIQILMDAGDVDKDGYLDVNEFVAISVHIRKLGNDEHLKKAFTFFDKNKSGYIEIEELRDALADDVDTTSEEVVEAIILDVDTNKDGKISYDEFATMMKTGTDWRKASRQYSRDLFKCLSLKLMQDGSLQSNGDTK

SEQ ID NO: 89387 - DNA, 1098 bp, Arabidopsis thaliana
  misc_feature (1)..(1098): Ceres Seq. ID no. 12718356
  misc_feature: MA Experiment ID: 20000307 Result: Up-regulated in Transcription
  misc_feature: MA Experiment 20000307 PARAMETER Experiment Name: At_Germinating_Seeds_Sub_P Parameter: Age (hr) Value: 24 vs. 0
  misc_feature: MA Experiment 20000307 PARAMETER Experiment Name: At_Germinating_Seeds_Sub_P Parameter: Organism Value: A. thaliana
  misc_feature: MA Experiment 20000307 PARAMETER Experiment Name: At_Germinating_Seeds_Sub_P Parameter: Plant Line Value: WS
  misc_feature: MA Experiment 20000307 PARAMETER Experiment Name: At_Germinating_Seeds_Sub_P Parameter: Tissue Value: Germinating Seeds
  misc_feature: MA Experiment ID: 20000314 Result: Up-regulated in Transcription
  misc_feature: MA Experiment 20000314 PARAMETER Experiment Name: At_14day_Shoots-Roots_Sub_P Parameter: Age (day) Value: 14
  misc_feature: MA Experiment 20000314 PARAMETER Experiment Name: At_14day_Shoots-Roots_Sub_P Parameter: Organism Value: A. thaliana
  misc_feature: MA Experiment 20000314 PARAMETER Experiment Name: At_14day_Shoots-Roots_Sub_P Parameter: Plant Line Value: WS
  misc_feature: MA Experiment 20000314 PARAMETER Experiment Name: At_14day_Shoots-Roots_Sub_P Parameter: Tissue Value: Roots vs. Whole Plant
  misc_feature: MA Experiment ID: 20000440 Result: Up-regulated in Transcription
  misc_feature: MA Experiment 20000440 PARAMETER Experiment Name: At_Closed-Flower__Sub_P Parameter: Tissue Value: Closed Flower vs. Whole Plant
atgttttgttgcggtggtgcggatgaggaacccgccggtccgcccgcaaaccagtatgcagcccctcctaacaaagccggaaatcccaattttggcggtgggaatagaggggaaccgaggaatccgaatgcaccgagatcaggagctcctgcaaaggttttgcccatagagatcccttctgttgcattggatgagttgaacagaatggcgggtaacttcggaaacaaggcactgatcggtgaaggttcttatggacgtgtcttctgcggcaagtttaaaggagaagctgttgctatcaagaaacttgatgctagttcttctgaagaacctgactcagatttcacctcacagttatcggtggtatcgcggctcaaacacgaccattttgtggagttgctggggtactgcttggaggcaaataatcgcattctcatttaccagtttgcaactaaaggttctttacatgatgtattacacgggagaaagggagtgcaaggggctgagccaggaccggtgctgaactggaaccaaagggtaaagattgcatatggagcagccaaagggcttgagttccttcacgagaaggtccagccaccaatagtccatagggacgtgaggtcgagcaatgtcttgttgtttgatgactttgtggccaaaatggctgatttcaacttgaccaatgcttcctccgataccgcggctaggcttcattctactcgtgttttgggaacattcggctaccacgctccagagtatgcaatgacaggacagataacgcagaagagtgatgtgtatagttttggtgttgtgctattggagctcttgacaggaagaaaacccgtagatcataccatgcctaaaggccaacaaagtcttgttacttgggcaacaccgagactaagtgaagacaaagtgaaacaatgcatagatcctaagcttaacaatgactttcctcccaaagcagtcgccaagttggcagccgtggcggccttgtgtgttcagtatgaggcagatttccgaccaaacatgaccatcgttgtcaaggcacttcagcctcttctaaactctaaaccggccggtcctgagtctacgtcctaa

SEQ ID NO: 89388 - protein, 365 aa, Arabidopsis thaliana
  peptide (1)..(365): Ceres Seq. ID no. 12718357
  misc_feature (1)..(365): Homolog of NCBI NO: 15227478 NR Description: putative protein kinase; protein id: At2g41970.1
  misc_feature (1)..(363): Homolog of NCBI NO: 38488409 NR Description: protein kinase 2 [Nicotiana tabacum]
  misc_feature (1)..(365): Homolog of NCBI NO: 38488407 NR Description: protein kinase 1 [Nicotiana tabacum]
  misc_feature (1)..(360): Homolog of NCBI NO: 34902310 NR Description: Putative protein kinase [Oryza sativa (japonica group)] >gi|24308632|gb|AAN52755.1| Putative protein kinase
MFCCGGADEEPAGPPANQYAAPPNKAGNPNFGGGNRGEPRNPNAPRSGAPAKVLPIEIPSVALDELNRMAGNFGNKALIGEGSYGRVFCGKFKGEAVAIKKLDASSSEEPDSDFTSQLSVVSRLKHDHFVELLGYCLEANNRILIYQFATKGSLHDVLHGRKGVQGAEPGPVLNWNQRVKIAYGAAKGLEFLHEKVQPPIVHRDVRSSNVLLFDDFVAKMADFNLTNASSDTAARLHSTRVLGTFGYHAPEYAMTGQITQKSDVYSFGVVLLELLTGRKPVDHTMPKGQQSLVTWATPRLSEDKVKQCIDPKLNNDFPPKAVAKLAAVAALCVQYEADFRPNMTIVVKALQPLLNSKPAGPESTS

SEQ ID NO: 89389 - protein, 297 aa, Arabidopsis thaliana
  peptide (1)..(297): Ceres Seq. ID no. 12718358
  misc_feature (1)..(297): Homolog of NCBI NO: 15227478 NR Description: putative protein kinase; protein id: At2g41970.1
  misc_feature (1)..(295): Homolog of NCBI NO: 38488409 NR Description: protein kinase 2 [Nicotiana tabacum]
  misc_feature (1)..(297): Homolog of NCBI NO: 38488407 NR Description: protein kinase 1 [Nicotiana tabacum]
  misc_feature (1)..(292): Homolog of NCBI NO: 34902310 NR Description: Putative protein kinase [Oryza sativa (japonica group)] >gi|24308632|gb|AAN52755.1| Putative protein kinase
MAGNFGNKALIGEGSYGRVFCGKFKGEAVAIKKLDASSSEEPDSDFTSQLSVVSRLKHDHFVELLGYCLEANNRILIYQFATKGSLHDVLHGRKGVQGAEPGPVLNWNQRVKIAYGAAKGLEFLHEKVQPPIVHRDVRSSNVLLFDDFVAKMADFNLTNASSDTAARLHSTRVLGTFGYHAPEYAMTGQITQKSDVYSFGVVLLELLTGRKPVDHTMPKGQQSLVTWATPRLSEDKVKQCIDPKLNNDFPPKAVAKLAAVAALCVQYEADFRPNMTIVVKALQPLLNSKPAGPESTS

SEQ ID NO: 89390 - DNA, 1143 bp, Arabidopsis thaliana
  misc_feature (1)..(1143): Ceres Seq. ID no. 12718425
  misc_feature: MA Experiment ID: 20000180 Result: Down-regulated in Transcription
  misc_feature: MA Experiment 20000180 PARAMETER Experiment Name: At_Germinating_Seeds_P Parameter: Age (hr) Value: 24 vs. 0
  misc_feature: MA Experiment 20000180 PARAMETER Experiment Name: At_Germinating_Seeds_P Parameter: Tissue Value: Germinating Seeds
  misc_feature: MA Experiment ID: 20000184 Result: Down-regulated in Transcription
  misc_feature: MA Experiment 20000184 PARAMETER Experiment Name: At_Shoots__P Parameter: Age (day) Value: 7
  misc_feature: MA Experiment 20000184 PARAMETER Experiment Name: At_Shoots__P Parameter: Tissue Value: Shoots vs. Whole Plant
  misc_feature: MA Experiment ID: 20000264 Result: Down-regulated in Transcription
  misc_feature: MA Experiment 20000264 PARAMETER Experiment Name: At_Open_Flower_P Parameter: Age (day) Value: 21
  misc_feature: MA Experiment 20000264 PARAMETER Experiment Name: At_Open_Flower_P Parameter: Plant Line Value: WS
  misc_feature: MA Experiment 20000264 PARAMETER Experiment Name: At_Open_Flower_P Parameter: Tissue Value: Open Flower vs. Whole Plant
  misc_feature: MA Experiment ID: 20000265 Result: Down-regulated in Transcription
  misc_feature: MA Experiment 20000265 PARAMETER Experiment Name: At_Open_Flower_P Parameter: Age (day) Value: 21
  misc_feature: MA Experiment 20000265 PARAMETER Experiment Name: At_Open_Flower_P Parameter: Plant Line Value: WS
  misc_feature: MA Experiment 20000265 PARAMETER Experiment Name: At_Open_Flower_P Parameter: Tissue Value: Closed Flower vs. Whole Plant
  misc_feature: MA Experiment ID: 20000267 Result: Down-regulated in Transcription
  misc_feature: MA Experiment 20000267 PARAMETER Experiment Name: At_Drought_P Parameter: Age (day) Value: 7
  misc_feature: MA Experiment 20000267 PARAMETER Experiment Name: At_Drought_P Parameter: Organism Value: A. thaliana
  misc_feature: MA Experiment 20000267 PARAMETER Experiment Name: At_Drought_P Parameter: Plant Line Value: WS
  misc_feature: MA Experiment 20000267 PARAMETER Experiment Name: At_Drought_P Parameter: Timepoint (hr) Value: 6
  misc_feature: MA Experiment 20000267 PARAMETER Experiment Name: At_Drought_P Parameter: Tissue Value: Whole Plant
  misc_feature: MA Experiment 20000267 PARAMETER Experiment Name: At_Drought_P Parameter: Treatment Value: Drought vs. No Drought
  misc_feature: MA Experiment ID: 20000286 Result: Down-regulated in Transcription
  misc_feature: MA Experiment 20000286 PARAMETER Experiment Name: At_Open_Flower_P Parameter: Age (day) Value: 21
  misc_feature: MA Experiment 20000286 PARAMETER Experiment Name: At_Open_Flower_P Parameter: Plant Line Value: WS
  misc_feature: MA Experiment 20000286 PARAMETER Experiment Name: At_Open_Flower_P Parameter: Tissue Value: Half Open vs. Whole Plant
  misc_feature: MA Experiment ID: 20000436 Result: Down-regulated in Transcription
  misc_feature: MA Experiment 20000436 PARAMETER Experiment Name: At_Drought_P Parameter: Age (day) Value: 7
  misc_feature: MA Experiment 20000436 PARAMETER Experiment Name: At_Drought_P Parameter: Organism Value: A. thaliana
  misc_feature: MA Experiment 20000436 PARAMETER Experiment Name: At_Drought_P Parameter: Plant Line Value: WS
  misc_feature: MA Experiment 20000436 PARAMETER Experiment Name: At_Drought_P Parameter: Timepoint (hr) Value: 12
  misc_feature: MA Experiment 20000436 PARAMETER Experiment Name: At_Drought_P Parameter: Tissue Value: Whole Plant
  misc_feature: MA Experiment 20000436 PARAMETER Experiment Name: At_Drought_P Parameter: Treatment Value: Drought vs. No Drought
  misc_feature: MA Experiment ID: 20000437 Result: Down-regulated in Transcription
  misc_feature: MA Experiment 20000437 PARAMETER Experiment Name: At_Drought_P Parameter: Age (day) Value: 8
  misc_feature: MA Experiment 20000437 PARAMETER Experiment Name: At_Drought_P Parameter: Organism Value: A. thaliana
  misc_feature: MA Experiment 20000437 PARAMETER Experiment Name: At_Drought_P Parameter: Plant Line Value: WS
  misc_feature: MA Experiment 20000437 PARAMETER Experiment Name: At_Drought_P Parameter: Timepoint (hr) Value: 24
  misc_feature: MA Experiment 20000437 PARAMETER Experiment Name: At_Drought_P Parameter: Tissue Value: Whole Plant
  misc_feature: MA Experiment 20000437 PARAMETER Experiment Name: At_Drought_P Parameter: Treatment Value: Drought vs. No Drought
  misc_feature: MA Experiment ID: 20001248 Result: Up-regulated in Transcription
  misc_feature: MA Experiment 20001248 PARAMETER Experiment Name: At_Far-red-induction_P Parameter: Age (day) Value: 7
  misc_feature: MA Experiment 20001248 PARAMETER Experiment Name: At_Far-red-induction_P Parameter: Light Value: Far-red vs. White
  misc_feature: MA Experiment 20001248 PARAMETER Experiment Name: At_Far-red-induction_P Parameter: Organism Value: A. thaliana
  misc_feature: MA Experiment 20001248 PARAMETER Experiment Name: At_Far-red-induction_P Parameter: Plant Line Value: Columbia
  misc_feature: MA Experiment 20001248 PARAMETER Experiment Name: At_Far-red-induction_P Parameter: Timepoint (hr) Value: 4
  misc_feature: MA Experiment 20001248 PARAMETER Experiment Name: At_Far-red-induction_P Parameter: Tissue Value: Whole Plant
  misc_feature: MA Experiment ID: 20001451 Result: Down-regulated in Transcription
  misc_feature: MA Experiment 20001451 PARAMETER Experiment Name: At_Far-red-induction_P Parameter: Age (day) Value: 7
  misc_feature: MA Experiment 20001451 PARAMETER Experiment Name: At_Far-red-induction_P Parameter: Light Value: Far-red vs. White
  misc_feature: MA Experiment 20001451 PARAMETER Experiment Name: At_Far-red-induction_P Parameter: Organism Value: A. thaliana
  misc_feature: MA Experiment 20001451 PARAMETER Experiment Name: At_Far-red-induction_P Parameter: Plant Line Value: Columbia
  misc_feature: MA Experiment 20001451 PARAMETER Experiment Name: At_Far-red-induction_P Parameter: Timepoint (hr) Value: 24
  misc_feature: MA Experiment 20001451 PARAMETER Experiment Name: At_Far-red-induction_P Parameter: Tissue Value: Whole Plant
atggattcaaataatcatctctacgacccgaatcccaccgggtcgggtcttcttcgttttagatcagctccgagctctgttctcgccgcttttgttgacgacgacaagattggtttcgactccgataggttgctttcaagattcgtgacctctaatggcgttaacggagatctgggttcacctaaattcgaggataagtctccggtttcgttaacgaacacctctgtttcatacgccgccactctgccgccaccgccgcagcttgagccgtcgagttttctgggtttgccgccgcattacccgaggcagagtaaagggataatgaactcggttggtttggatcagtttctcggtatcaataatcatcacaccaaaccagttgaatctaatcttctccgtcaaagcagctctccagccggaatgtttactaatctctctgaccaaaacgagttaaagcactttggactcaacaaatctaataagtgtttactatatacttacaaatttgcaggttatggttcaatgaggaatttgatgaattacgaagaagatgaagagagtccatctaattccaatggattaagacgccattgcagtctctcttcaaggccaccttcttcacttggaatgctttctcaaatacctgaaatcgcacccgaaactaattttccatatagccattggaatgatccatccagctttattgataacttatcctcacttaaaagagaagccgaggacgatggaaaattgtttctcggagctcagaacggagagtccgggaatcgtatgcagttactgtcgcatcatttgagcctaccaaagtcatcatcgacagcctcggacatggtttcagtggataagtatcttcagctacaagattctgttccttgtaaaatcagagccaaacgtggttgcgctacacatcctcgaagcatcgctgaacgggtaagaagaacgcggataagcgagcgaatgaggaagttacaagagcttgttcctaacatggacaagcaaaccaacacttcggatatgttggatttagctgtggattacatcaaagatttacaaagacagtataagattttaaacgacaacagagctaactgtaagtgtatgaacaaggagaagaagtcaatatag

SEQ ID NO: 89391 - protein, 380 aa, Arabidopsis thaliana
  peptide (1)..(380): Ceres Seq. ID no. 12718426
  misc_feature (309)..(357): Pfam Name: Helix-loop-helix DNA-binding domain Pfam Description: Helix-loop-helix DNA-binding domain
  misc_feature (1)..(380): Homolog of NCBI NO: 15227914 NR Description: bHLH protein; protein id: At2g42280.1
  misc_feature (226)..(378): Homolog of NCBI NO: 19401700 NR Description: transcription factor RAU1 [Oryza sativa]
  misc_feature (171)..(372): Homolog of NCBI NO: 18403381 NR Description: expressed protein; protein id: At1g51140.1, by cDNA: gi_14334499, supported by cDNA: gi_17104810 [Arabidopsis
  misc_feature (221)..(372): Homolog of NCBI NO: 6166283 NR Description: helix-loop-helix protein 1A [Pinus taeda]
  misc_feature (222)..(375): Homolog of NCBI NO: 34907702 NR Description: P0035F12.11 [Oryza sativa (japonica
  misc_feature (106)..(379): Homolog of NCBI NO: 18390573 NR Description: bHLH protein; protein id: At1g05805.1, supported cDNA: 21406. [Arabidopsis thaliana] >gi|24030386|gb|AAN41354.1|
  misc_feature (106)..(379): Homolog of NCBI NO: 21554238 NR Description: Contains similarity to bHLH transcription factor
  misc_feature (246)..(376): Homolog of NCBI NO: 38345229 NR Description: OSJNBa0084K20.3 [Oryza sativa (japonica
  misc_feature (129)..(378): Homolog of NCBI NO: 15219606 NR Description: bHLH protein; protein id: At1g35460.1, supported cDNA: gi_15724177, supported by cDNA: gi_20127087, supported by
  misc_feature (129)..(378): Homolog of NCBI NO: 15233768 NR Description: putative protein; protein id: At4g09180.1
MDSNNHLYDPNPTGSGLLRFRSAPSSVLAAFVDDDKIGFDSDRLLSRFVTSNGVNGDLGSPKFEDKSPVSLTNTSVSYAATLPPPPQLEPSSFLGLPPHYPRQSKGIMNSVGLDQFLGINNHHTKPVESNLLRQSSSPAGMFTNLSDQNELKHFGLNKSNKCLLYTYKFAGYGSMRNLMNYEEDEESPSNSNGLRRHCSLSSRPPSSLGMLSQIPEIAPETNFPYSHWNDPSSFIDNLSSLKREAEDDGKLFLGAQNGESGNRMQLLSHHLSLPKSSSTASDMVSVDKYLQLQDSVPCKIRAKRGCATHPRSIAERVRRTRISERMRKLQELVPNMDKQTNTSDMLDLAVDYIKDLQRQYKILNDNRANCKCMNKEKKSI

SEQ ID NO: 89392 - protein, 273 aa, Arabidopsis thaliana
  peptide (1)..(273): Ceres Seq. ID no. 12718427
  misc_feature (202)..(250): Pfam Name: Helix-loop-helix DNA-binding domain Pfam Description: Helix-loop-helix DNA-binding domain
  misc_feature (1)..(273): Homolog of NCBI NO: 15227914 NR Description: bHLH protein; protein id: At2g42280.1
  misc_feature (119)..(271): Homolog of NCBI NO: 19401700 NR Description: transcription factor RAU1 [Oryza sativa]
  misc_feature (64)..(265): Homolog of NCBI NO: 18403381 NR Description: expressed protein; protein id: At1g51140.1, by cDNA: gi_14334499, supported by cDNA: gi_17104810 [Arabidopsis
  misc_feature (114)..(265): Homolog of NCBI NO: 6166283 NR Description: helix-loop-helix protein 1A [Pinus taeda]
  misc_feature (115)..(268): Homolog of NCBI NO: 34907702 NR Description: P0035F12.11 [Oryza sativa (japonica
  misc_feature (1)..(272): Homolog of NCBI NO: 18390573 NR Description: bHLH protein; protein id: At1g05805.1, supported cDNA: 21406. [Arabidopsis thaliana] >gi|24030386|gb|AAN41354.1|
  misc_feature (1)..(272): Homolog of NCBI NO: 21554238 NR Description: Contains similarity to bHLH transcription factor
  misc_feature (139)..(269): Homolog of NCBI NO: 38345229 NR Description: OSJNBa0084K20.3 [Oryza sativa (japonica
  misc_feature (22)..(271): Homolog of NCBI NO: 15219606 NR Description: bHLH protein; protein id: At1g35460.1, supported cDNA: gi_15724177, supported by cDNA: gi_20127087, supported by
  misc_feature (22)..(271): Homolog of NCBI NO: 15233768 NR Description: putative protein; protein id: At4g09180.1
MNSVGLDQFLGINNHHTKPVESNLLRQSSSPAGMFTNLSDQNELKHFGLNKSNKCLLYTYKFAGYGSMRNLMNYEEDEESPSNSNGLRRHCSLSSRPPSSLGMLSQIPEIAPETNFPYSHWNDPSSFIDNLSSLKREAEDDGKLFLGAQNGESGNRMQLLSHHLSLPKSSSTASDMVSVDKYLQLQDSVPCKIRAKRGCATHPRSIAERVRRTRISERMRKLQELVPNMDKQTNTSDMLDLAVDYIKDLQRQYKILNDNRANCKCMNKEKKSI

SEQ ID NO: 89393 - protein, 240 aa, Arabidopsis thaliana
  peptide (1)..(240): Ceres Seq. ID no. 12718428
  misc_feature (169)..(217): Pfam Name: Helix-loop-helix DNA-binding domain Pfam Description: Helix-loop-helix DNA-binding domain
  misc_feature (1)..(240): Homolog of NCBI NO: 15227914 NR Description: bHLH protein; protein id: At2g42280.1
  misc_feature (86)..(238): Homolog of NCBI NO: 19401700 NR Description: transcription factor RAU1 [Oryza sativa]
  misc_feature (31)..(232): Homolog of NCBI NO: 18403381 NR Description: expressed protein; protein id: At1g51140.1, by cDNA: gi_14334499, supported by cDNA: gi_17104810 [Arabidopsis
  misc_feature (81)..(232): Homolog of NCBI NO: 6166283 NR Description: helix-loop-helix protein 1A [Pinus taeda]
  misc_feature (82)..(235): Homolog of NCBI NO: 34907702 NR Description: P0035F12.11 [Oryza sativa (japonica
  misc_feature (1)..(239): Homolog of NCBI NO: 18390573 NR Description: bHLH protein; protein id: At1g05805.1, supported cDNA: 21406. [Arabidopsis thaliana] >gi|24030386|gb|AAN41354.1|
  misc_feature (1)..(239): Homolog of NCBI NO: 21554238 NR Description: Contains similarity to bHLH transcription factor
  misc_feature (106)..(236): Homolog of NCBI NO: 38345229 NR Description: OSJNBa0084K20.3 [Oryza sativa (japonica
  misc_feature (1)..(238): Homolog of NCBI NO: 15219606 NR Description: bHLH protein; protein id: At1g35460.1, supported cDNA: gi_15724177, supported by cDNA: gi_20127087, supported by
  misc_feature (1)..(238): Homolog of NCBI NO: 15233768 NR Description: putative protein; protein id: At4g09180.1
MFTNLSDQNELKHFGLNKSNKCLLYTYKFAGYGSMRNLMNYEEDEESPSNSNGLRRHCSLSSRPPSSLGMLSQIPEIAPETNFPYSHWNDPSSFIDNLSSLKREAEDDGKLFLGAQNGESGNRMQLLSHHLSLPKSSSTASDMVSVDKYLQLQDSVPCKIRAKRGCATHPRSIAERVRRTRISERMRKLQELVPNMDKQTNTSDMLDLAVDYIKDLQRQYKILNDNRANCKCMNKEKKSI

SEQ ID NO: 89394 - DNA, 1458 bp, Arabidopsis thaliana
  misc_feature (1)..(1458): Ceres Seq. ID no. 12718491
  misc_feature: MA Experiment ID: 20000180 Result: Up-regulated in Transcription
  misc_feature: MA Experiment 20000180 PARAMETER Experiment Name: At_Germinating_Seeds_P Parameter: Age (hr) Value: 24 vs. 0
  misc_feature: MA Experiment 20000180 PARAMETER Experiment Name: At_Germinating_Seeds_P Parameter: Tissue Value: Germinating Seeds
  misc_feature: MA Experiment ID: 20000184 Result: Up-regulated in Transcription
  misc_feature: MA Experiment 20000184 PARAMETER Experiment Name: At_Shoots__P Parameter: Age (day) Value: 7
  misc_feature: MA Experiment 20000184 PARAMETER Experiment Name: At_Shoots__P Parameter: Tissue Value: Shoots vs. Whole Plant
  misc_feature: MA Experiment ID: 20000185 Result: Up-regulated in Transcription
  misc_feature: MA Experiment 20000185 PARAMETER Experiment Name: At_Roots__P Parameter: Age (day) Value: 7 vs. 21
  misc_feature: MA Experiment 20000185 PARAMETER Experiment Name: At_Roots__P Parameter: Organism Value: A. thaliana
  misc_feature: MA Experiment 20000185 PARAMETER Experiment Name: At_Roots__P Parameter: Tissue Value: Roots vs. Whole Plant
  misc_feature: MA Experiment ID: 20000227 Result: Up-regulated in Transcription
  misc_feature: MA Experiment 20000227 PARAMETER Experiment Name: At_Root-Tips-vs-Tops_P Parameter: Tissue Value: Root Tips vs. Root Tops
  misc_feature: MA Experiment ID: 20000439 Result: Up-regulated in Transcription
  misc_feature: MA Experiment 20000439 PARAMETER Experiment Name: At_Roots__P Parameter: Age (day) Value: 14 vs. 21
  misc_feature: MA Experiment 20000439 PARAMETER Experiment Name: At_Roots__P Parameter: Organism Value: A. thaliana
  misc_feature: MA Experiment 20000439 PARAMETER Experiment Name: At_Roots__P Parameter: Tissue Value: Roots vs. Whole Plant
  misc_feature: MA Experiment ID: 20001558 Result: Up-regulated in Transcription
  misc_feature: MA Experiment 20001558 PARAMETER Experiment Name: At_Drought_Soil_Dry_P Parameter: Age (day) Value: 27
  misc_feature: MA Experiment 20001558 PARAMETER Experiment Name: At_Drought_Soil_Dry_P Parameter: Organism Value: A. thaliana
  misc_feature: MA Experiment 20001558 PARAMETER Experiment Name: At_Drought_Soil_Dry_P Parameter: Plant Line Value: WS
  misc_feature: MA Experiment 20001558 PARAMETER Experiment Name: At_Drought_Soil_Dry_P Parameter: Post Timepoint (hr) Value: 6
  misc_feature: MA Experiment 20001558 PARAMETER Experiment Name: At_Drought_Soil_Dry_P Parameter: Post-Treatment Value: Re-Water vs. No Drought
  misc_feature: MA Experiment 20001558 PARAMETER Experiment Name: At_Drought_Soil_Dry_P Parameter: Timepoint (day) Value: 13
  misc_feature: MA Experiment 20001558 PARAMETER Experiment Name: At_Drought_Soil_Dry_P Parameter: Treatment Value: Drought vs. No Drought
atggttttagaaccaaacttcgttctctcatgggtcttcttatgcatagctgcaacaatctccagcacacttttcttcttccgcaagaaacatcaccgattcataacaaagaagattcagaagaaaaagaagcttcttcctggagaaatggggcttccatggattggtgaaacaatggatttctacaaagctcagaaaagcaacagagtttttgaggattttgtaaatccaaggatcatcaaacatgggaacatcttcaagacaagaatcatgggatcaccaacaatagtagtcaatggagctgaagccaataggctcatattatccaacgagtttagcttggtggtgagctcgtggccttcatcttctgttcaactaatgggcatgaactgcatcatggctaaacaaggcgagaagcatcgggtcctcagagggattgtagctaatagtcttagctacattgggttagagtccttaatacctaagctctgtgataccgttaagtttcatcatgaaaccgaatggcgaggcaaggaagagattagcctctaccgttcggcaaaagttctcactttcactgtagtatttgagtgtttgtatgggataaaagtggagattgggatgttagaggtctttgagagggttttagaaggtgttttcgctttgccggttgagtttccttgttctaagtttgctagagcaaagaaagcaaggctagagatagagacatttctagttgggaaggtcagggagaagcgaagagaaatggaaaaagagggagctgagaagccaaacacaacgcttttctcgaggctagtagaagagttgatcaaaggtgtgataaccgaagaagaggttgtagataatatggttttgctagtgtttgcagctcatgacacaacctcttacgccatgtccatgactttcaagatgttagctcagcacccaacttgtcgtgacactctccttcaagaacatgctcaaataaaagcaaacaaaggggaaggagaatatcttacagtggaagatgtgaaaaagatgaagtatagttggcaagttgttcgtgaaacaatgcgattatcccctccaatcttcggttctttcagaaaagcagtggctgatattgactatggaggatacacaatccccaaaggctggaagatactctggaccacttatggaactcattataatcctgaaatatttcaagatccaatgagttttgatccaacaagatttgataagccaatacaggcatatacatatctaccatttggaggtggaccaaggctttgtgcaggtcaccaactagccaaaatcagcattctcgttttcatgcattttgttgtgacaggttttgactggtccttagtctacccagatgagacaattagcatggatcctctcccatttccgtcccttggaatgccaatcaaaatttctcccaaggtgtcatag

SEQ ID NO: 89395 - protein, 485 aa, Arabidopsis thaliana
  peptide (1)..(485): Ceres Seq. ID no. 12718492
  misc_feature (233)..(484): Pfam Name: Cytochrome P450 Pfam Description: Cytochrome P450
  misc_feature (1)..(485): Homolog of NCBI NO: 15228011 NR Description: taxane 13 alpha-hydroxylase(cytochrome P450
  misc_feature (10)..(480): Homolog of NCBI NO: 28380196 NR Description: Taxane 13-alpha-hydroxylase
  misc_feature (34)..(483): Homolog of NCBI NO: 30350220 NR Description: taxane 14b-hydroxylase [Taxus cuspidata]
  misc_feature (8)..(483): Homolog of NCBI NO: 28380205 NR Description: Taxane 10-beta-hydroxylase
  misc_feature (44)..(483): Homolog of NCBI NO: 24266823 NR Description: 5-alpha-taxadienol-10-beta-hydroxylase [Taxus
  misc_feature (12)..(483): Homolog of NCBI NO: 15239304 NR Description: cytochrome p450 family; protein id: At5g36110.1
  misc_feature (42)..(480): Homolog of NCBI NO: 33146520 NR Description: putative 5-alpha-taxadienol-10-beta-hydroxylase
  misc_feature (33)..(485): Homolog of NCBI NO: 34395222 NR Description: putative taxane 14b-hydroxylase [Oryza sativa
  misc_feature (33)..(485): Homolog of NCBI NO: 34901920 NR Description: putative Cytochrome P450 [Oryza sativa (japonica
  misc_feature (10)..(483): Homolog of NCBI NO: 30694740 NR Description: cytochrome P450 family [Arabidopsis thaliana] cytochrome P450 [Arabidopsis thaliana] AT5g45340/K9E15_12 [Arabidopsis thaliana]
MVLEPNFVLSWVFLCIAATISSTLFFFRKKHHRFITKKIQKKKKLLPGEMGLPWIGETMDFYKAQKSNRVFEDFVNPRIIKHGNIFKTRIMGSPTIVVNGAEANRLILSNEFSLVVSSWPSSSVQLMGMNCIMAKQGEKHRVLRGIVANSLSYIGLESLIPKLCDTVKFHHETEWRGKEEISLYRSAKVLTFTVVFECLYGIKVEIGMLEVFERVLEGVFALPVEFPCSKFARAKKARLEIETFLVGKVREKRREMEKEGAEKPNTTLFSRLVEELIKGVITEEEVVDNMVLLVFAAHDTTSYAMSMTFKMLAQHPTCRDTLLQEHAQIKANKGEGEYLTVEDVKKMKYSWQVVRETMRLSPPIFGSFRKAVADIDYGGYTIPKGWKILWTTYGTHYNPEIFQDPMSFDPTRFDKPIQAYTYLPFGGGPRLCAGHQLAKISILVFMHFVVTGFDWSLVYPDETISMDPLPFPSLGMPIKISPKVS

SEQ ID NO: 89396 - protein, 436 aa, Arabidopsis thaliana
  peptide (1)..(436): Ceres Seq. ID no. 12718493
  misc_feature (184)..(435): Pfam Name: Cytochrome P450 Pfam Description: Cytochrome P450
  misc_feature (1)..(436): Homolog of NCBI NO: 15228011 NR Description: taxane 13 alpha-hydroxylase(cytochrome P450
  misc_feature (1)..(431): Homolog of NCBI NO: 28380196 NR Description: Taxane 13-alpha-hydroxylase
  misc_feature (1)..(434): Homolog of NCBI NO: 30350220 NR Description: taxane 14b-hydroxylase [Taxus cuspidata]
  misc_feature (1)..(434): Homolog of NCBI NO: 28380205 NR Description: Taxane 10-beta-hydroxylase
  misc_feature (1)..(434): Homolog of NCBI NO: 24266823 NR Description: 5-alpha-taxadienol-10-beta-hydroxylase [Taxus
  misc_feature (1)..(434): Homolog of NCBI NO: 15239304 NR Description: cytochrome p450 family; protein id: At5g36110.1
  misc_feature (1)..(431): Homolog of NCBI NO: 33146520 NR Description: putative 5-alpha-taxadienol-10-beta-hydroxylase
  misc_feature (1)..(436): Homolog of NCBI NO: 34395222 NR Description: putative taxane 14b-hydroxylase [Oryza sativa
  misc_feature (1)..(436): Homolog of NCBI NO: 34901920 NR Description: putative Cytochrome P450 [Oryza sativa (japonica
  misc_feature (1)..(434): Homolog of NCBI NO: 30694740 NR Description: cytochrome P450 family [Arabidopsis thaliana] cytochrome P450 [Arabidopsis thaliana] AT5g45340/K9E15_12 [Arabidopsis thaliana]
MGLPWIGETMDFYKAQKSNRVFEDFVNPRIIKHGNIFKTRIMGSPTIVVNGAEANRLILSNEFSLVVSSWPSSSVQLMGMNCIMAKQGEKHRVLRGIVANSLSYIGLESLIPKLCDTVKFHHETEWRGKEEISLYRSAKVLTFTVVFECLYGIKVEIGMLEVFERVLEGVFALPVEFPCSKFARAKKARLEIETFLVGKVREKRREMEKEGAEKPNTTLFSRLVEELIKGVITEEEVVDNMVLLVFAAHDTTSYAMSMTFKMLAQHPTCRDTLLQEHAQIKANKGEGEYLTVEDVKKMKYSWQVVRETMRLSPPIFGSFRKAVADIDYGGYTIPKGWKILWTTYGTHYNPEIFQDPMSFDPTRFDKPIQAYTYLPFGGGPRLCAGHQLAKISILVFMHFVVTGFDWSLVYPDETISMDPLPFPSLGMPIKISPKVS

SEQ ID NO: 89397 - protein, 427 aa, Arabidopsis thaliana
  peptide (1)..(427): Ceres Seq. ID no. 12718494
  misc_feature (175)..(426): Pfam Name: Cytochrome P450 Pfam Description: Cytochrome P450
  misc_feature (1)..(427): Homolog of NCBI NO: 15228011 NR Description: taxane 13 alpha-hydroxylase(cytochrome P450
  misc_feature (1)..(422): Homolog of NCBI NO: 28380196 NR Description: Taxane 13-alpha-hydroxylase
  misc_feature (1)..(425): Homolog of NCBI NO: 30350220 NR Description: taxane 14b-hydroxylase [Taxus cuspidata]
  misc_feature (1)..(425): Homolog of NCBI NO: 28380205 NR Description: Taxane 10-beta-hydroxylase
  misc_feature (1)..(425): Homolog of NCBI NO: 24266823 NR Description: 5-alpha-taxadienol-10-beta-hydroxylase [Taxus
  misc_feature (1)..(425): Homolog of NCBI NO: 15239304 NR Description: cytochrome p450 family; protein id: At5g36110.1
  misc_feature (1)..(422): Homolog of NCBI NO: 33146520 NR Description: putative 5-alpha-taxadienol-10-beta-hydroxylase
  misc_feature (1)..(427): Homolog of NCBI NO: 34395222 NR Description: putative taxane 14b-hydroxylase [Oryza sativa
  misc_feature (1)..(427): Homolog of NCBI NO: 34901920 NR Description: putative Cytochrome P450 [Oryza sativa (japonica
  misc_feature (1)..(425): Homolog of NCBI NO: 30694740 NR Description: cytochrome P450 family [Arabidopsis thaliana] cytochrome P450 [Arabidopsis thaliana] AT5g45340/K9E15_12 [Arabidopsis thaliana]
MDFYKAQKSNRVFEDFVNPRIIKHGNIFKTRIMGSPTIVVNGAEANRLILSNEFSLVVSSWPSSSVQLMGMNCIMAKQGEKHRVLRGIVANSLSYIGLESLIPKLCDTVKFHHETEWRGKEEISLYRSAKVLTFTVVFECLYGIKVEIGMLEVFERVLEGVFALPVEFPCSKFARAKKARLEIETFLVGKVREKRREMEKEGAEKPNTTLFSRLVEELIKGVITEEEVVDNMVLLVFAAHDTTSYAMSMTFKMLAQHPTCRDTLLQEHAQIKANKGEGEYLTVEDVKKMKYSWQVVRETMRLSPPIFGSFRKAVADIDYGGYTIPKGWKILWTTYGTHYNPEIFQDPMSFDPTRFDKPIQAYTYLPFGGGPRLCAGHQLAKISILVFMHFVVTGFDWSLVYPDETISMDPLPFPSLGMPIKISPKVS

SEQ ID NO: 89398 - DNA, 1680 bp, Arabidopsis thaliana
  misc_feature (1)..(1680): Ceres Seq. ID no. 12718499
  misc_feature: MA Experiment ID: 20000264 Result: Up-regulated in Transcription
  misc_feature: MA Experiment 20000264 PARAMETER Experiment Name: At_Open_Flower_P Parameter: Age (day) Value: 21
  misc_feature: MA Experiment 20000264 PARAMETER Experiment Name: At_Open_Flower_P Parameter: Plant Line Value: WS
  misc_feature: MA Experiment 20000264 PARAMETER Experiment Name: At_Open_Flower_P Parameter: Tissue Value: Open Flower vs. Whole Plant
  misc_feature: MA Experiment ID: 20000265 Result: Up-regulated in Transcription
  misc_feature: MA Experiment 20000265 PARAMETER Experiment Name: At_Open_Flower_P Parameter: Age (day) Value: 21
  misc_feature: MA Experiment 20000265 PARAMETER Experiment Name: At_Open_Flower_P Parameter: Plant Line Value: WS
  misc_feature: MA Experiment 20000265 PARAMETER Experiment Name: At_Open_Flower_P Parameter: Tissue Value: Closed Flower vs. Whole Plant
  misc_feature: MA Experiment ID: 20000286 Result: Up-regulated in Transcription
  misc_feature: MA Experiment 20000286 PARAMETER Experiment Name: At_Open_Flower_P Parameter: Age (day) Value: 21
  misc_feature: MA Experiment 20000286 PARAMETER Experiment Name: At_Open_Flower_P Parameter: Plant Line Value: WS
  misc_feature: MA Experiment 20000286 PARAMETER Experiment Name: At_Open_Flower_P Parameter: Tissue Value: Half Open vs. Whole Plant
  misc_feature: MA Experiment ID: 20000495 Result: Down-regulated in Transcription
  misc_feature: MA Experiment 20000495 PARAMETER Experiment Name: At_Guard_Cells_P Parameter: Harvest Date Value: 8/2/2002
  misc_feature: MA Experiment 20000495 PARAMETER Experiment Name: At_Guard_Cells_P Parameter: Organism Value: A. thaliana
  misc_feature: MA Experiment 20000495 PARAMETER Experiment Name: At_Guard_Cells_P Parameter: Tissue Value: Guard Cells vs. Leaves
atgtctccgacgatcttatccttctccggtgtgacggtgccggcgatgccgtcatcaggttccctctccggcaacacttatctccgattgatagacacacaatgtagtacgatgagagaacttaagcaaatccacgccagtctcatcaaaaccggtttaatttccgatactgttaccgcgagccgtgtcctcgccttctgctgtgcgtctccgtcagacatgaattacgcttatttggtattcactaggatcaatcacaagaacccatttgtctggaacactataatccgtggtttctcacggagctcgtttccagagatggctatttcgattttcattgacatgttgtgttcttctccgtctgtgaagccgcagagattgacttatccttcggtgttcaaagcttatggtagacttggccaagctcgtgatgggaggcaattacatgggatggttattaaagagggacttgaagacgactcgtttatacggaatacgatgttgcatatgtacgtgacttgtgggtgtttgattgaagcttggagaatctttctggggatgataggttttgatgttgttgcttggaattcaatgattatgggttttgcgaaatgtggattgattgatcaggcgcagaacctgtttgatgaaatgccgcagagaaatggagtttcttggaattcgatgattagtgggtttgtgaggaatggtagatttaaggatgcgttggatatgtttcgagagatgcaggagaaagatgtgaaacctgatgggtttacaatggtgagtctgttgaatgcttgtgcgtaccttggagcaagtgagcaagggagatggatacatgagtacatagtgaggaatcggtttgaattgaatagtatagttgttacagcactcatagatatgtactgtaagtgtgggtgcattgaggaaggtctaaatgtgtttgagtgtgctcctaagaagcagttatcgtgttggaattcgatgattcttggtctagctaataacggattcgaggaaagggccatggatttgttctcggagttagagcgttctggcttggaaccagattcagtcagcttcattggtgttttaacagcttgtgctcactccggggaagtacatagagctgatgaatttttcagattgatgaaagaaaaatatatgattgagccatcaataaaacactatactttaatggttaatgtgctgggtggagcggggctcctcgaagaagcagaagcattgataaagaatatgccggtggaagaagacactgttatatggagttctttgctttctgcctgcaggaaaatcggtaatgttgagatggctaaacgagcagcaaaatgtttgaagaagctcgatccagatgaaacgtgtggttatgttctcttgtctaatgcttatgcttcttatggcttgttcgaagaggcagttgagcagaggcttttgatgaaggaaagacaaatggagaaagaagttggctgcagttcgattgaagtggattttgaagttcatgagtttatatcttgtgggggaacgcatcctaaatccgcagagatttacagtttactcgatatcttaaactgggatgtctctacaattaaatcaggtttcgctgaattgtttgatgctacaactaggattggtttcacttatctggcagagaaataa

SEQ ID NO: 89399 - protein, 559 aa, Arabidopsis thaliana
  peptide (1)..(559): Ceres Seq. ID no. 12718500
  misc_feature (162)..(196): Pfam Name: PPR repeat Pfam Description: PPR repeat
  misc_feature (1)..(559): Homolog of NCBI NO: 15228028 NR Description: hypothetical protein; protein id: At2g42920.1
  misc_feature (73)..(527): Homolog of NCBI NO: 15239745 NR Description: selenium-binding protein-like; protein id:
  misc_feature (19)..(525): Homolog of NCBI NO: 15239979 NR Description: selenium-binding protein-like; protein id:
  misc_feature (35)..(527): Homolog of NCBI NO: 37534112 NR Description: putative selenium-binding protein-like [Oryza
  misc_feature (28)..(523): Homolog of NCBI NO: 15240085 NR Description: selenium-binding protein-like; protein id:
  misc_feature (44)..(528): Homolog of NCBI NO: 34910298 NR Description: P0013F10.8 [Oryza sativa (japonica
  misc_feature (32)..(543): Homolog of NCBI NO: 15227199 NR Description: hypothetical protein; protein id: At2g22410.1, by cDNA: gi_18086348 [Arabidopsis thaliana]
  misc_feature (191)..(528): Homolog of NCBI NO: 34906110 NR Description: P0020E09.15 [Oryza sativa (japonica
  misc_feature (74)..(211): Homolog of NCBI NO: 34906110 NR Description: P0020E09.15 [Oryza sativa (japonica
  misc_feature (76)..(559): Homolog of NCBI NO: 15229340 NR Description: putative protein; protein id: At3g62890.1
MSPTILSFSGVTVPAMPSSGSLSGNTYLRLIDTQCSTMRELKQIHASLIKTGLISDTVTASRVLAFCCASPSDMNYAYLVFTRINHKNPFVWNTIIRGFSRSSFPEMAISIFIDMLCSSPSVKPQRLTYPSVFKAYGRLGQARDGRQLHGMVIKEGLEDDSFIRNTMLHMYVTCGCLIEAWRIFLGMIGFDVVAWNSMIMGFAKCGLIDQAQNLFDEMPQRNGVSWNSMISGFVRNGRFKDALDMFREMQEKDVKPDGFTMVSLLNACAYLGASEQGRWIHEYIVRNRFELNSIVVTALIDMYCKCGCIEEGLNVFECAPKKQLSCWNSMILGLANNGFEERAMDLFSELERSGLEPDSVSFIGVLTACAHSGEVHRADEFFRLMKEKYMIEPSIKHYTLMVNVLGGAGLLEEAEALIKNMPVEEDTVIWSSLLSACRKIGNVEMAKRAAKCLKKLDPDETCGYVLLSNAYASYGLFEEAVEQRLLMKERQMEKEVGCSSIEVDFEVHEFISCGGTHPKSAEIYSLLDILNWDVSTIKSGFAELFDATTRIGFTYLAEK

SEQ ID NO: 89400 - protein, 544 aa, Arabidopsis thaliana
  peptide (1)..(544): Ceres Seq. ID no. 12718501
  misc_feature (147)..(181): Pfam Name: PPR repeat Pfam Description: PPR repeat
  misc_feature (1)..(544): Homolog of NCBI NO: 15228028 NR Description: hypothetical protein; protein id: At2g42920.1
  misc_feature (58)..(512): Homolog of NCBI NO: 15239745 NR Description: selenium-binding protein-like; protein id:
  misc_feature (4)..(510): Homolog of NCBI NO: 15239979 NR Description: selenium-binding protein-like; protein id:
  misc_feature (20)..(512): Homolog of NCBI NO: 37534112 NR Description: putative selenium-binding protein-like [Oryza
  misc_feature (13)..(508): Homolog of NCBI NO: 15240085 NR Description: selenium-binding protein-like; protein id:
  misc_feature (29)..(513): Homolog of NCBI NO: 34910298 NR Description: P0013F10.8 [Oryza sativa (japonica
  misc_feature (17)..(528): Homolog of NCBI NO: 15227199 NR Description: hypothetical protein; protein id: At2g22410.1, by cDNA: gi_18086348 [Arabidopsis thaliana]
  misc_feature (176)..(513): Homolog of NCBI NO: 34906110 NR Description: P0020E09.15 [Oryza sativa (japonica
  misc_feature (59)..(196): Homolog of NCBI NO: 34906110 NR Description: P0020E09.15 [Oryza sativa (japonica
  misc_feature (61)..(544): Homolog of NCBI NO: 15229340 NR Description: putative protein; protein id: At3g62890.1
MPSSGSLSGNTYLRLIDTQCSTMRELKQIHASLIKTGLISDTVTASRVLAFCCASPSDMNYAYLVFTRINHKNPFVWNTIIRGFSRSSFPEMAISIFIDMLCSSPSVKPQRLTYPSVFKAYGRLGQARDGRQLHGMVIKEGLEDDSFIRNTMLHMYVTCGCLIEAWRIFLGMIGFDVVAWNSMIMGFAKCGLIDQAQNLFDEMPQRNGVSWNSMISGFVRNGRFKDALDMFREMQEKDVKPDGFTMVSLLNACAYLGASEQGRWIHEYIVRNRFELNSIVVTALIDMYCKCGCIEEGLNVFECAPKKQLSCWNSMILGLANNGFEERAMDLFSELERSGLEPDSVSFIGVLTACAHSGEVHRADEFFRLMKEKYMIEPSIKHYTLMVNVLGGAGLLEEAEALIKNMPVEEDTVIWSSLLSACRKIGNVEMAKRAAKCLKKLDPDETCGYVLLSNAYASYGLFEEAVEQRLLMKERQMEKEVGCSSIEVDFEVHEFISCGGTHPKSAEIYSLLDILNWDVSTIKSGFAELFDATTRIGFTYLAEK

SEQ ID NO: 89401 - protein, 522 aa, Arabidopsis thaliana
  peptide (1)..(522): Ceres Seq. ID no. 12718502
  misc_feature (125)..(159): Pfam Name: PPR repeat Pfam Description: PPR repeat
  misc_feature (1)..(522): Homolog of NCBI NO: 15228028 NR Description: hypothetical protein; protein id: At2g42920.1
  misc_feature (36)..(490): Homolog of NCBI NO: 15239745 NR Description: selenium-binding protein-like; protein id:
  misc_feature (1)..(488): Homolog of NCBI NO: 15239979 NR Description: selenium-binding protein-like; protein id:
  misc_feature (1)..(490): Homolog of NCBI NO: 37534112 NR Description: putative selenium-binding protein-like [Oryza
  misc_feature (1)..(486): Homolog of NCBI NO: 15240085 NR Description: selenium-binding protein-like; protein id:
  misc_feature (7)..(491): Homolog of NCBI NO: 34910298 NR Description: P0013F10.8 [Oryza sativa (japonica
  misc_feature (1)..(506): Homolog of NCBI NO: 15227199 NR Description: hypothetical protein; protein id: At2g22410.1, by cDNA: gi_18086348 [Arabidopsis thaliana]
  misc_feature (154)..(491): Homolog of NCBI NO: 34906110 NR Description: P0020E09.15 [Oryza sativa (japonica
  misc_feature (37)..(174): Homolog of NCBI NO: 34906110 NR Description: P0020E09.15 [Oryza sativa (japonica
  misc_feature (39)..(522): Homolog of NCBI NO: 15229340 NR Description: putative protein; protein id: At3g62890.1
MRELKQIHASLIKTGLISDTVTASRVLAFCCASPSDMNYAYLVFTRINHKNPFVWNTIIRGFSRSSFPEMAISIFIDMLCSSPSVKPQRLTYPSVFKAYGRLGQARDGRQLHGMVIKEGLEDDSFIRNTMLHMYVTCGCLIEAWRIFLGMIGFDVVAWNSMIMGFAKCGLIDQAQNLFDEMPQRNGVSWNSMISGFVRNGRFKDALDMFREMQEKDVKPDGFTMVSLLNACAYLGASEQGRWIHEYIVRNRFELNSIVVTALIDMYCKCGCIEEGLNVFECAPKKQLSCWNSMILGLANNGFEERAMDLFSELERSGLEPDSVSFIGVLTACAHSGEVHRADEFFRLMKEKYMIEPSIKHYTLMVNVLGGAGLLEEAEALIKNMPVEEDTVIWSSLLSACRKIGNVEMAKRAAKCLKKLDPDETCGYVLLSNAYASYGLFEEAVEQRLLMKERQMEKEVGCSSIEVDFEVHEFISCGGTHPKSAEIYSLLDILNWDVSTIKSGFAELFDATTRIGFTYLAEK

SEQ ID NO: 89402 - DNA, 1485 bp, Arabidopsis thaliana
  misc_feature (1)..(1485): Ceres Seq. ID no. 12718507
  misc_feature: MA Experiment ID: 20000440 Result: Up-regulated in Transcription
  misc_feature: MA Experiment 20000440 PARAMETER Experiment Name: At_Closed-Flower__Sub_P Parameter: Tissue Value: Closed Flower vs. Whole Plant
atgccacctgagagttctttaaacgctgaaatgtccaagaagatatcattttttggtttgaagggtttgaagttgtgggtatgggtatgtttggtagttggagtattcatagttatgattctctgcatcttgtctctatggatcacattccgtcggaaatctagaaggtcttcaagcaagtttcctttcaaccaaataccacatgtgtccaaagatatcagagtcgacagggctgggtttcagaatcctcaccccgaaagtttatatatagaaatgaatgataaatccactggaaaaacgatgatgtctcacttgggaagaaccaagtctagtgataatgacactttgagtcaatgtagctctgtgaatcaccatgagagagcttgtagttctcattctggtgaagaaggaggctttggaagtgctgggagacagtatggaggaggacctgtaacagcatctcctttggttggtttaccagaaatatcccatcttggttggggacactggtttactcttagggatcttgagctagcaaccaaccgttttgctccagtgaatgtgcttggagagggtggttatggagtagtttataggggtaaacttgttaatggtaccgaggttgctgtaaagaagcttctgaacaatctagggcaagctgagaaggaatttcgggtagaagttgaggctattggtcatgtacggcacaagaatcttgttaggcttttaggatattgcatagagggagttcatcggatgcttgtttatgagtatgttaatagtggtaacttagaacaatggctacatggagcaatgcggcaacatggaaatctcacttgggaagcacggatgaaaatcattactggtactgcacaagcgcttgcttacttgcatgaagcaatagaaccaaaagtggtccacagagacataaaagcaagtaatatattgattgatgatgagtttaatgcaaaactctctgactttgggttagccaagctcttggactcgggtgagagtcacatcactaccagagtcatgggtacctttggatatgtagcaccagaatatgctaatacaggtcttttaaacgaaaagagtgatatatatagctttggtgtcttgcttcttgaagctataactggtcgagatccagttgattatggtcgtcctgctaatgaggtgaatcttgttgaatggctaaagatgatggttggaacaagaagagcagaagaagttgtggatccaagacttgaacctagacctagtaaaagtgctttgaaacgtgcactcttggtttcccttagatgtgttgatcctgaagcagagaaacgtcctagaatgagtcaggttgcgcgcatgcttgaatctgatgaacacccttttcacaaggagaggaggaacaaaaggagcaaaaccgcgggcatggagattgttgagaccaaagacgaatctcttggtcctagtggctcagagacaaagccttag

SEQ ID NO: 89403 - protein, 494 aa, Arabidopsis thaliana
  peptide (1)..(494): Ceres Seq. ID no. 12718508
  misc_feature (183)..(454): Pfam Name: Protein kinase domain Pfam Description: Protein kinase domain
  misc_feature (1)..(494): Homolog of NCBI NO: 15228043 NR Description: putative protein kinase; protein id: At2g42960.1
  misc_feature (1)..(494): Homolog of NCBI NO: 15231637 NR Description: receptor-like protein kinase; protein id:
  misc_feature (1)..(484): Homolog of NCBI NO: 37535714 NR Description: putative kinase [Oryza sativa (japonica
  misc_feature (2)..(484): Homolog of NCBI NO: 34894708 NR Description: Putative protein kinase [Oryza sativa (japonica group)] >gi|12328581|dbj|BAB21240.1| Putative protein kinase
  misc_feature (7)..(493): Homolog of NCBI NO: 18405946 NR Description: expressed protein; protein id: At1g56720.1,
  misc_feature (7)..(493): Homolog of NCBI NO: 21593085 NR Description: Putative protein kinase [Arabidopsis thaliana]
  misc_feature (7)..(493): Homolog of NCBI NO: 25404144 NR Description: probable protein kinase F25P12.84 [imported] - thaliana >gi|9954741|gb|AAG09092.1|AC009323_3 Putative protein
  misc_feature (20)..(465): Homolog of NCBI NO: 15217511 NR Description: putative ser/thr protein kinase; protein id: [Arabidopsis thaliana] >gi|25402546|pir||G86227 hypothetical
  misc_feature (5)..(471): Homolog of NCBI NO: 15238840 NR Description: Ser/Thr specific protein kinase - like protein;
  misc_feature (154)..(473): Homolog of NCBI NO: 22331140 NR Description: serine/threonine protein kinase, putative; id: At3g17420.1, supported by cDNA: gi_17529287, supported by gi_20465832 [Arabidopsis thaliana] >gi|11994680|dbj|BAB02918.1|
MPPESSLNAEMSKKISFFGLKGLKLWVWVCLVVGVFIVMILCILSLWITFRRKSRRSSSKFPFNQIPHVSKDIRVDRAGFQNPHPESLYIEMNDKSTGKTMMSHLGRTKSSDNDTLSQCSSVNHHERACSSHSGEEGGFGSAGRQYGGGPVTASPLVGLPEISHLGWGHWFTLRDLELATNRFAPVNVLGEGGYGVVYRGKLVNGTEVAVKKLLNNLGQAEKEFRVEVEAIGHVRHKNLVRLLGYCIEGVHRMLVYEYVNSGNLEQWLHGAMRQHGNLTWEARMKIITGTAQALAYLHEAIEPKVVHRDIKASNILIDDEFNAKLSDFGLAKLLDSGESHITTRVMGTFGYVAPEYANTGLLNEKSDIYSFGVLLLEAITGRDPVDYGRPANEVNLVEWLKMMVGTRRAEEVVDPRLEPRPSKSALKRALLVSLRCVDPEAEKRPRMSQVARMLESDEHPFHKERRNKRSKTAGMEIVETKDESLGPSGSETKP

SEQ ID NO: 89404 - protein, 484 aa, Arabidopsis thaliana
  peptide (1)..(484): Ceres Seq. ID no. 12718509
  misc_feature (173)..(444): Pfam Name: Protein kinase domain Pfam Description: Protein kinase domain
  misc_feature (1)..(484): Homolog of NCBI NO: 15228043 NR Description: putative protein kinase; protein id: At2g42960.1
  misc_feature (1)..(484): Homolog of NCBI NO: 15231637 NR Description: receptor-like protein kinase; protein id:
  misc_feature (1)..(474): Homolog of NCBI NO: 37535714 NR Description: putative kinase [Oryza sativa (japonica
  misc_feature (1)..(474): Homolog of NCBI NO: 34894708 NR Description: Putative protein kinase [Oryza sativa (japonica group)] >gi|12328581|dbj|BAB21240.1| Putative protein kinase
  misc_feature (1)..(483): Homolog of NCBI NO: 18405946 NR Description: expressed protein; protein id: At1g56720.1,
  misc_feature (1)..(483): Homolog of NCBI NO: 21593085 NR Description: Putative protein kinase [Arabidopsis thaliana]
  misc_feature (1)..(483): Homolog of NCBI NO: 25404144 NR Description: probable protein kinase F25P12.84 [imported] - thaliana >gi|9954741|gb|AAG09092.1|AC009323_3 Putative protein
  misc_feature (10)..(455): Homolog of NCBI NO: 15217511 NR Description: putative ser/thr protein kinase; protein id: [Arabidopsis thaliana] >gi|25402546|pir||G86227 hypothetical
  misc_feature (1)..(461): Homolog of NCBI NO: 15238840 NR Description: Ser/Thr specific protein kinase - like protein;
  misc_feature (144)..(463): Homolog of NCBI NO: 22331140 NR Description: serine/threonine protein kinase, putative; id: At3g17420.1, supported by cDNA: gi_17529287, supported by gi_20465832 [Arabidopsis thaliana] >gi|11994680|dbj|BAB02918.1|
MSKKISFFGLKGLKLWVWVCLVVGVFIVMILCILSLWITFRRKSRRSSSKFPFNQIPHVSKDIRVDRAGFQNPHPESLYIEMNDKSTGKTMMSHLGRTKSSDNDTLSQCSSVNHHERACSSHSGEEGGFGSAGRQYGGGPVTASPLVGLPEISHLGWGHWFTLRDLELATNRFAPVNVLGEGGYGVVYRGKLVNGTEVAVKKLLNNLGQAEKEFRVEVEAIGHVRHKNLVRLLGYCIEGVHRMLVYEYVNSGNLEQWLHGAMRQHGNLTWEARMKIITGTAQALAYLHEAIEPKVVHRDIKASNILIDDEFNAKLSDFGLAKLLDSGESHITTRVMGTFGYVAPEYANTGLLNEKSDIYSFGVLLLEAITGRDPVDYGRPANEVNLVEWLKMMVGTRRAEEVVDPRLEPRPSKSALKRALLVSLRCVDPEAEKRPRMSQVARMLESDEHPFHKERRNKRSKTAGMEIVETKDESLGPSGSETKP

SEQ ID NO: 89405 - protein, 456 aa, Arabidopsis thaliana
  peptide (1)..(456): Ceres Seq. ID no. 12718510
  misc_feature (145)..(416): Pfam Name: Protein kinase domain Pfam Description: Protein kinase domain
  misc_feature (1)..(456): Homolog of NCBI NO: 15228043 NR Description: putative protein kinase; protein id: At2g42960.1
  misc_feature (1)..(456): Homolog of NCBI NO: 15231637 NR Description: receptor-like protein kinase; protein id:
  misc_feature (1)..(446): Homolog of NCBI NO: 37535714 NR Description: putative kinase [Oryza sativa (japonica
  misc_feature (1)..(446): Homolog of NCBI NO: 34894708 NR Description: Putative protein kinase [Oryza sativa (japonica group)] >gi|12328581|dbj|BAB21240.1| Putative protein kinase
  misc_feature (1)..(455): Homolog of NCBI NO: 18405946 NR Description: expressed protein; protein id: At1g56720.1,
  misc_feature (1)..(455): Homolog of NCBI NO: 21593085 NR Description: Putative protein kinase [Arabidopsis thaliana]
  misc_feature (1)..(455): Homolog of NCBI NO: 25404144 NR Description: probable protein kinase F25P12.84 [imported] - thaliana >gi|9954741|gb|AAG09092.1|AC009323_3 Putative protein
  misc_feature (1)..(427): Homolog of NCBI NO: 15217511 NR Description: putative ser/thr protein kinase; protein id: [Arabidopsis thaliana] >gi|25402546|pir||G86227 hypothetical
  misc_feature (1)..(433): Homolog of NCBI NO: 15238840 NR Description: Ser/Thr specific protein kinase - like protein;
  misc_feature (116)..(435): Homolog of NCBI NO: 22331140 NR Description: serine/threonine protein kinase, putative; id: At3g17420.1, supported by cDNA: gi_17529287, supported by gi_20465832 [Arabidopsis thaliana] >gi|11994680|dbj|BAB02918.1|
MILCILSLWITFRRKSRRSSSKFPFNQIPHVSKDIRVDRAGFQNPHPESLYIEMNDKSTGKTMMSHLGRTKSSDNDTLSQCSSVNHHERACSSHSGEEGGFGSAGRQYGGGPVTASPLVGLPEISHLGWGHWFTLRDLELATNRFAPVNVLGEGGYGVVYRGKLVNGTEVAVKKLLNNLGQAEKEFRVEVEAIGHVRHKNLVRLLGYCIEGVHRMLVYEYVNSGNLEQWLHGAMRQHGNLTWEARMKIITGTAQALAYLHEAIEPKVVHRDIKASNILIDDEFNAKLSDFGLAKLLDSGESHITTRVMGTFGYVAPEYANTGLLNEKSDIYSFGVLLLEAITGRDPVDYGRPANEVNLVEWLKMMVGTRRAEEVVDPRLEPRPSKSALKRALLVSLRCVDPEAEKRPRMSQVARMLESDEHPFHKERRNKRSKTAGMEIVETKDESLGPSGSETKP

SEQ ID NO: 89406 - DNA, 1584 bp, Arabidopsis thaliana
  misc_feature (1)..(1584): Ceres Seq. ID no. 12718514
  misc_feature: MA Experiment ID: 20000315 Result: Down-regulated in Transcription
  misc_feature: MA Experiment 20000315 PARAMETER Experiment Name: At_14day_Shoots-Roots_Sub_P Parameter: Age (day) Value: 14
  misc_feature: MA Experiment 20000315 PARAMETER Experiment Name: At_14day_Shoots-Roots_Sub_P Parameter: Organism Value: A. thaliana
  misc_feature: MA Experiment 20000315 PARAMETER Experiment Name: At_14day_Shoots-Roots_Sub_P Parameter: Plant Line Value: WS
  misc_feature: MA Experiment 20000315 PARAMETER Experiment Name: At_14day_Shoots-Roots_Sub_P Parameter: Tissue Value: Shoots vs. Whole Plant
  misc_feature: MA Experiment ID: 20000355 Result: Down-regulated in Transcription
  misc_feature: MA Experiment 20000355 PARAMETER Experiment Name: At_Siliques_Sub_P Parameter: Age (day) Value: 21
  misc_feature: MA Experiment 20000355 PARAMETER Experiment Name: At_Siliques_Sub_P Parameter: Organism Value: A. thaliana
  misc_feature: MA Experiment 20000355 PARAMETER Experiment Name: At_Siliques_Sub_P Parameter: Plant Line Value: WS
  misc_feature: MA Experiment 20000355 PARAMETER Experiment Name: At_Siliques_Sub_P Parameter: Tissue Value: Less Than 5mm Siliques vs. Whole Plant
  misc_feature: MA Experiment ID: 20000440 Result: Down-regulated in Transcription
  misc_feature: MA Experiment 20000440 PARAMETER Experiment Name: At_Closed-Flower__Sub_P Parameter: Tissue Value: Closed Flower vs. Whole Plant
  misc_feature: MA Experiment ID: 20000634 Result: Up-regulated in Transcription
  misc_feature: MA Experiment 20000634 PARAMETER Experiment Name: At_10percent_PEG_Sub_P Parameter: Age (day) Value: 12
  misc_feature: MA Experiment 20000634 PARAMETER Experiment Name: At_10percent_PEG_Sub_P Parameter: Organism Value: A. thaliana
  misc_feature: MA Experiment 20000634 PARAMETER Experiment Name: At_10percent_PEG_Sub_P Parameter: Plant Line Value: WS
  misc_feature: MA Experiment 20000634 PARAMETER Experiment Name: At_10percent_PEG_Sub_P Parameter: Timepoint (day) Value: 12
  misc_feature: MA Experiment 20000634 PARAMETER Experiment Name: At_10percent_PEG_Sub_P Parameter: Tissue Value: Whole Plant
  misc_feature: MA Experiment 20000634 PARAMETER Experiment Name: At_10percent_PEG_Sub_P Parameter: Treatment Value: 10% PEG vs. No Treatment
atgtcgaccaaactcagtatatttcttcttggcctgattttgttctctgtctcaccattttccggagactgtagaactctttcagggaaacatgagcattactcttcatcccttaacatgtttaattcccaagatacgatgcgtttcagttctgcttcttcttcaacaagcaacgattgcggtttctcctccaaggaacatgatccttccaaggaacataccagagaatcggtgaagcctcaatcaaggattaaacaagaaacaaagagaacaacacattcagttgttgatcttcaaatccaagacctcacaagaattaagacgcttcatgctcggttcaacaaatcgaagaaacagaaaaacgagaaggttaggaagaagattacctcagatatttctttggtgggagctccagaggtttcaccggggaagctgatagcaacacttgagtctggtatgacgctcggttctggtgaatacttcatggacgtgcttgtgggcacaccaccaaaacacttctcattgattcttgacacagggagtgacttaaactggctccaatgccttccttgctacgactgtttccatcaaaacggtatgttttatgatccaaaaacgtccgcttcattcaagaacataacatgcaatgaccctagatgcagccttatctcatcacccgatcctccagtacagtgcgaatcagataaccaatcgtgcccttatttctactggtatggagacaggtcgaacacaactggagatttcgcggttgagactttcaccgttaatctcacgaccactgagggaggaagctcagagtacaaggtgggaaatatgatgtttgggtgtggccattggaaccgaggtctcttcagtggtgcttcaggtctgcttgggttaggaagaggacctctttcgttttcttctcagcttcagtctctctatggccattccttttcctactgtcttgtcgatagaaacagcaacaccaatgtaagcagcaagttgatatttggagaagacaaagatttgctgaaccacacaaatctgaacttcacttcttttgtgaacgggaaggagaattcagtggagacattttactatatacagatcaaatccattctagtcggcggcaaagctctagacatacctgaagaaacatggaatatctcatcagatggtgatggtggaaccatcattgattctggtacaaccttaagctatttcgcagaacctgcatatgagatcatcaaaaacaagtttgcagagaaaatgaaagaaaactacccaatatttagagatttcccggtccttgatccttgcttcaatgtatctggcatagaggagaacaacatccacctacctgagctcgggattgcatttgtagacggcacagtttggaatttccctgctgagaactccttcatttggttgagcgaggatttggtttgcttggcaattctaggaactccaaaatctaccttctcgatcatcggaaactaccagcaacagaatttccatatactctatgatacaaagaggtctaggctagggttcacacccacaaagtgtgcggacatataa

SEQ ID NO: 89407 - protein, 527 aa, Arabidopsis thaliana
  peptide (1)..(527): Ceres Seq. ID no. 12718515
  misc_feature (107)..(522): Pfam Name: Eukaryotic aspartyl protease Pfam Description: Eukaryotic aspartyl protease
  misc_feature (1)..(527): Homolog of NCBI NO: 15228044 NR Description: putative chloroplast nucleoid DNA binding protein id: At2g42980.1 [Arabidopsis thaliana] putative chloroplast nucleoid DNA binding protein [Arabidopsis
  misc_feature (47)..(527): Homolog of NCBI NO: 25408826 NR Description: hypothetical protein At2g42980 [imported] -
  misc_feature (1)..(527): Homolog of NCBI NO: 15231625 NR Description: putative protein; protein id: At3g59080.1, by cDNA: gi_15983375, supported by cDNA: gi_20466703 [Arabidopsis
  misc_feature (151)..(525): Homolog of NCBI NO: 15230868 NR Description: hypothetical protein; protein id: At3g25700.1
  misc_feature (146)..(524): Homolog of NCBI NO: 15290061 NR Description: nucleoid DNA-binding protein cnd41-like protein
  misc_feature (76)..(524): Homolog of NCBI NO: 15228618 NR Description: putative protein; protein id: At3g61820.1, by cDNA: gi_14532549 [Arabidopsis thaliana]
  misc_feature (156)..(527): Homolog of NCBI NO: 30678047 NR Description: chloroplast nucleoid DNA binding protein -related
  misc_feature (162)..(527): Homolog of NCBI NO: 20197342 NR Description: putative chloroplast nucleoid DNA binding protein
  misc_feature (121)..(525): Homolog of NCBI NO: 11358588 NR Description: nucleoid DNA-binding protein cnd41-like protein -
  misc_feature (121)..(525): Homolog of NCBI NO: 22326716 NR Description: nucleoid DNA-binding protein cnd41 - like protein id: At5g10770.1, supported by cDNA: gi_18700102 thaliana] >gi|18700103|gb|AAL77663.1| AT5g10770/T30N20_40
MSTKLSIFLLGLILFSVSPFSGDCRTLSGKHEHYSSSLNMFNSQDTMRFSSASSSTSNDCGFSSKEHDPSKEHTRESVKPQSRIKQETKRTTHSVVDLQIQDLTRIKTLHARFNKSKKQKNEKVRKKITSDISLVGAPEVSPGKLIATLESGMTLGSGEYFMDVLVGTPPKHFSLILDTGSDLNWLQCLPCYDCFHQNGMFYDPKTSASFKNITCNDPRCSLISSPDPPVQCESDNQSCPYFYWYGDRSNTTGDFAVETFTVNLTTTEGGSSEYKVGNMMFGCGHWNRGLFSGASGLLGLGRGPLSFSSQLQSLYGHSFSYCLVDRNSNTNVSSKLIFGEDKDLLNHTNLNFTSFVNGKENSVETFYYIQIKSILVGGKALDIPEETWNISSDGDGGTIIDSGTTLSYFAEPAYEIIKNKFAEKMKENYPIFRDFPVLDPCFNVSGIEENNIHLPELGIAFVDGTVWNFPAENSFIWLSEDLVCLAILGTPKSTFSIIGNYQQQNFHILYDTKRSRLGFTPTKCADI

SEQ ID NO: 89408 - protein, 488 aa, Arabidopsis thaliana
  peptide (1)..(488): Ceres Seq. ID no. 12718516
  misc_feature (68)..(483): Pfam Name: Eukaryotic aspartyl protease Pfam Description: Eukaryotic aspartyl protease
  misc_feature (1)..(488): Homolog of NCBI NO: 15228044 NR Description: putative chloroplast nucleoid DNA binding protein id: At2g42980.1 [Arabidopsis thaliana] putative chloroplast nucleoid DNA binding protein [Arabidopsis
  misc_feature (8)..(488): Homolog of NCBI NO: 25408826 NR Description: hypothetical protein At2g42980 [imported] -
  misc_feature (1)..(488): Homolog of NCBI NO: 15231625 NR Description: putative protein; protein id: At3g59080.1, by cDNA: gi_15983375, supported by cDNA: gi_20466703 [Arabidopsis
  misc_feature (112)..(486): Homolog of NCBI NO: 15230868 NR Description: hypothetical protein; protein id: At3g25700.1
  misc_feature (107)..(485): Homolog of NCBI NO: 15290061 NR Description: nucleoid DNA-binding protein cnd41-like protein
  misc_feature (37)..(485): Homolog of NCBI NO: 15228618 NR Description: putative protein; protein id: At3g61820.1, by cDNA: gi_14532549 [Arabidopsis thaliana]
  misc_feature (117)..(488): Homolog of NCBI NO: 30678047 NR Description: chloroplast nucleoid DNA binding protein -related
  misc_feature (123)..(488): Homolog of NCBI NO: 20197342 NR Description: putative chloroplast nucleoid DNA binding protein
  misc_feature (82)..(486): Homolog of NCBI NO: 11358588 NR Description: nucleoid DNA-binding protein cnd41-like protein -
  misc_feature (82)..(486): Homolog of NCBI NO: 22326716 NR Description: nucleoid DNA-binding protein cnd41 - like protein id: At5g10770.1, supported by cDNA: gi_18700102 thaliana] >gi|18700103|gb|AAL77663.1| AT5g10770/T30N20_40
MFNSQDTMRFSSASSSTSNDCGFSSKEHDPSKEHTRESVKPQSRIKQETKRTTHSVVDLQIQDLTRIKTLHARFNKSKKQKNEKVRKKITSDISLVGAPEVSPGKLIATLESGMTLGSGEYFMDVLVGTPPKHFSLILDTGSDLNWLQCLPCYDCFHQNGMFYDPKTSASFKNITCNDPRCSLISSPDPPVQCESDNQSCPYFYWYGDRSNTTGDFAVETFTVNLTTTEGGSSEYKVGNMMFGCGHWNRGLFSGASGLLGLGRGPLSFSSQLQSLYGHSFSYCLVDRNSNTNVSSKLIFGEDKDLLNHTNLNFTSFVNGKENSVETFYYIQIKSILVGGKALDIPEETWNISSDGDGGTIIDSGTTLSYFAEPAYEIIKNKFAEKMKENYPIFRDFPVLDPCFNVSGIEENNIHLPELGIAFVDGTVWNFPAENSFIWLSEDLVCLAILGTPKSTFSIIGNYQQQNFHILYDTKRSRLGFTPTKCADI

SEQ ID NO: 89409 - protein, 481 aa, Arabidopsis thaliana
  peptide (1)..(481): Ceres Seq. ID no. 12718517
  misc_feature (61)..(476): Pfam Name: Eukaryotic aspartyl protease Pfam Description: Eukaryotic aspartyl protease
  misc_feature (1)..(481): Homolog of NCBI NO: 15228044 NR Description: putative chloroplast nucleoid DNA binding protein id: At2g42980.1 [Arabidopsis thaliana] putative chloroplast nucleoid DNA binding protein [Arabidopsis
  misc_feature (1)..(481): Homolog of NCBI NO: 25408826 NR Description: hypothetical protein At2g42980 [imported] -
  misc_feature (1)..(481): Homolog of NCBI NO: 15231625 NR Description: putative protein; protein id: At3g59080.1, by cDNA: gi_15983375, supported by cDNA: gi_20466703 [Arabidopsis
  misc_feature (105)..(479): Homolog of NCBI NO: 15230868 NR Description: hypothetical protein; protein id: At3g25700.1
  misc_feature (100)..(478): Homolog of NCBI NO: 15290061 NR Description: nucleoid DNA-binding protein cnd41-like protein
  misc_feature (30)..(478): Homolog of NCBI NO: 15228618 NR Description: putative protein; protein id: At3g61820.1, by cDNA: gi_14532549 [Arabidopsis thaliana]
  misc_feature (110)..(481): Homolog of NCBI NO: 30678047 NR Description: chloroplast nucleoid DNA binding protein -related
  misc_feature (116)..(481): Homolog of NCBI NO: 20197342 NR Description: putative chloroplast nucleoid DNA binding protein
  misc_feature (75)..(479): Homolog of NCBI NO: 11358588 NR Description: nucleoid DNA-binding protein cnd41-like protein -
  misc_feature (75)..(479): Homolog of NCBI NO: 22326716 NR Description: nucleoid DNA-binding protein cnd41 - like protein id: At5g10770.1, supported by cDNA: gi_18700102 thaliana] >gi|18700103|gb|AAL77663.1| AT5g10770/T30N20_40
MRFSSASSSTSNDCGFSSKEHDPSKEHTRESVKPQSRIKQETKRTTHSVVDLQIQDLTRIKTLHARFNKSKKQKNEKVRKKITSDISLVGAPEVSPGKLIATLESGMTLGSGEYFMDVLVGTPPKHFSLILDTGSDLNWLQCLPCYDCFHQNGMFYDPKTSASFKNITCNDPRCSLISSPDPPVQCESDNQSCPYFYWYGDRSNTTGDFAVETFTVNLTTTEGGSSEYKVGNMMFGCGHWNRGLFSGASGLLGLGRGPLSFSSQLQSLYGHSFSYCLVDRNSNTNVSSKLIFGEDKDLLNHTNLNFTSFVNGKENSVETFYYIQIKSILVGGKALDIPEETWNISSDGDGGTIIDSGTTLSYFAEPAYEIIKNKFAEKMKENYPIFRDFPVLDPCFNVSGIEENNIHLPELGIAFVDGTVWNFPAENSFIWLSEDLVCLAILGTPKSTFSIIGNYQQQNFHILYDTKRSRLGFTPTKCADI

SEQ ID NO: 89410 - DNA, 1014 bp, Arabidopsis thaliana
  misc_feature (1)..(1014): Ceres Seq. ID no. 12718529
  misc_feature: MA Experiment ID: 20001807 Result: Up-regulated in Transcription
  misc_feature: MA Experiment 20001807 PARAMETER Experiment Name: At_50mM_NH4NO3_L-to-H_Sub_P Parameter: Timepoint (hr) Value: 6
  misc_feature: MA Experiment 20001807 PARAMETER Experiment Name: At_50mM_NH4NO3_L-to-H_Sub_P Parameter: Tissue Value: Leaf
  misc_feature: MA Experiment 20001807 PARAMETER Experiment Name: At_50mM_NH4NO3_L-to-H_Sub_P Parameter: Treatment Value: 50mM NH4NO3 vs 100mM Mannitol
actcaacaaagtaaagaaacaatggcgtattctcttcctacatttccccaagccttaccttgctcgtcaaccaaaacttcttcctccttggctaccttccgatctcctttcttaagattcaatggttccacttccttaatcccctcctctatctccatcacttcacgtggcacatcctccccgaccatcatcccacgtgctgccgcctcagaatccgactctaacgaagccctagccaacacaaccttccacggcctctgctatgtcttgaaagacaacatagacaccgaccagatcatcccagcaggagccgcttgcaccttcccatcgaaccagcaagagcgtgatgagatcgccgctcacgctctctctggtctaccagacttccacaaaacacggttcattgagccaggagagaacagatcaaagtactcaatcataatcggcggcgaaaactttggttgcggatcgtcacgtgaacatgctccggtctgtcttggagcagctggagctaaagccatagttgctgagtcttacgcaagaatctttttccgtaactcggttgctacaggagaggtgtttccgctcgagtcagaggttagagtctgtgaggagtgtaagacaggagatacggtgacgatcgagctgagtgatagtggtggtttattgactaatcacacgaccggtaaaaactataagctgaagtcgatcggtgatgctggaccggttattgatgctggtggtatttttgcttatgcgaggatgatgggaatgattccatcattagcttaatcctcttccataaccatgatggtgttcttgtatgcataactatttgatgaatatttgtgttttagagttttctattttcttaacttttttatgtttgtttgatttggtattgttgttgttacctaaagaataagaaatcaaaagcaaaatagaccgacatgttccaagatatgtgaatatggtgagtgtttactaaattatgcgaatattgttgttgcaacc

SEQ ID NO: 89411 - protein, 263 aa, Arabidopsis thaliana
  peptide (1)..(263): Ceres Seq. ID no. 12718530
  misc_feature (8)..(263): Homolog of NCBI NO: 15224222 NR Description: 3-isopropylmalate dehydratase, small subunit; id: At2g43100.1, supported by cDNA: gi_16974632, supported by
  misc_feature (13)..(261): Homolog of NCBI NO: 15231608 NR Description: 3-isopropylmalate dehydratase-like protein (small protein id: At3g58990.1, supported by cDNA: gi_17529161
  misc_feature (13)..(263): Homolog of NCBI NO: 15224221 NR Description: 3-isopropylmalate dehydratase, small subunit; id: At2g43090.1, supported by cDNA: 31507., supported by cDNA:
  misc_feature (59)..(261): Homolog of NCBI NO: 14140144 NR Description: putative protein [Oryza sativa]
  misc_feature (85)..(259): Homolog of NCBI NO: 23041579 NR Description: hypothetical protein [Trichodesmium erythraeum
  misc_feature (80)..(261): Homolog of NCBI NO: 21673448 NR Description: 3-isopropylmalate dehydratase, small subunit,
  misc_feature (85)..(254): Homolog of NCBI NO: 14521550 NR Description: 3-isopropylmalate dehydratase, small subunit
  misc_feature (85)..(254): Homolog of NCBI NO: 18977311 NR Description: putative 3-isopropylmalate dehydratase small
  misc_feature (89)..(239): Homolog of NCBI NO: 15896420 NR Description: 3-isopropylmalate dehydratase, small subunit
  misc_feature (85)..(252): Homolog of NCBI NO: 15643321 NR Description: 3-isopropylmalate dehydratase, small subunit
TQQSKETMAYSLPTFPQALPCSSTKTSSSLATFRSPFLRFNGSTSLIPSSISITSRGTSSPTIIPRAAASESDSNEALANTTFHGLCYVLKDNIDTDQIIPAGAACTFPSNQQERDEIAAHALSGLPDFHKTRFIEPGENRSKYSIIIGGENFGCGSSREHAPVCLGAAGAKAIVAESYARIFFRNSVATGEVFPLESEVRVCEECKTGDTVTIELSDSGGLLTNHTTGKNYKLKSIGDAGPVIDAGGIFAYARMMGMIPSLA

SEQ ID NO: 89412 - protein, 256 aa, Arabidopsis thaliana
  peptide (1)..(256): Ceres Seq. ID no. 12718531
  misc_feature (1)..(256): Homolog of NCBI NO: 15224222 NR Description: 3-isopropylmalate dehydratase, small subunit; id: At2g43100.1, supported by cDNA: gi_16974632, supported by
  misc_feature (6)..(254): Homolog of NCBI NO: 15231608 NR Description: 3-isopropylmalate dehydratase-like protein (small protein id: At3g58990.1, supported by cDNA: gi_17529161
  misc_feature (6)..(256): Homolog of NCBI NO: 15224221 NR Description: 3-isopropylmalate dehydratase, small subunit; id: At2g43090.1, supported by cDNA: 31507., supported by cDNA:
  misc_feature (52)..(254): Homolog of NCBI NO: 14140144 NR Description: putative protein [Oryza sativa]
  misc_feature (78)..(252): Homolog of NCBI NO: 23041579 NR Description: hypothetical protein [Trichodesmium erythraeum
  misc_feature (73)..(254): Homolog of NCBI NO: 21673448 NR Description: 3-isopropylmalate dehydratase, small subunit,
  misc_feature (78)..(247): Homolog of NCBI NO: 14521550 NR Description: 3-isopropylmalate dehydratase, small subunit
  misc_feature (78)..(247): Homolog of NCBI NO: 18977311 NR Description: putative 3-isopropylmalate dehydratase small
  misc_feature (82)..(232): Homolog of NCBI NO: 15896420 NR Description: 3-isopropylmalate dehydratase, small subunit
  misc_feature (78)..(245): Homolog of NCBI NO: 15643321 NR Description: 3-isopropylmalate dehydratase, small subunit
MAYSLPTFPQALPCSSTKTSSSLATFRSPFLRFNGSTSLIPSSISITSRGTSSPTIIPRAAASESDSNEALANTTFHGLCYVLKDNIDTDQIIPAGAACTFPSNQQERDEIAAHALSGLPDFHKTRFIEPGENRSKYSIIIGGENFGCGSSREHAPVCLGAAGAKAIVAESYARIFFRNSVATGEVFPLESEVRVCEECKTGDTVTIELSDSGGLLTNHTTGKNYKLKSIGDAGPVIDAGGIFAYARMMGMIPSLA

SEQ ID NO: 89413 - DNA, 639 bp, Arabidopsis thaliana
  misc_feature (1)..(639): Ceres Seq. ID no. 12718536
  misc_feature: MA Experiment ID: 20000184 Result: Up-regulated in Transcription
  misc_feature: MA Experiment 20000184 PARAMETER Experiment Name: At_Shoots__P Parameter: Age (day) Value: 7
  misc_feature: MA Experiment 20000184 PARAMETER Experiment Name: At_Shoots__P Parameter: Tissue Value: Shoots vs. Whole Plant
  misc_feature: MA Experiment ID: 20000185 Result: Up-regulated in Transcription
  misc_feature: MA Experiment 20000185 PARAMETER Experiment Name: At_Roots__P Parameter: Age (day) Value: 7 vs. 21
  misc_feature: MA Experiment 20000185 PARAMETER Experiment Name: At_Roots__P Parameter: Organism Value: A. thaliana
  misc_feature: MA Experiment 20000185 PARAMETER Experiment Name: At_Roots__P Parameter: Tissue Value: Roots vs. Whole Plant
  misc_feature: MA Experiment ID: 20000439 Result: Up-regulated in Transcription
  misc_feature: MA Experiment 20000439 PARAMETER Experiment Name: At_Roots__P Parameter: Age (day) Value: 14 vs. 21
  misc_feature: MA Experiment 20000439 PARAMETER Experiment Name: At_Roots__P Parameter: Organism Value: A. thaliana
  misc_feature: MA Experiment 20000439 PARAMETER Experiment Name: At_Roots__P Parameter: Tissue Value: Roots vs. Whole Plant
atggcgactccggcatggagtcatgccaaggctcaatgggtagtcgccatgttggcgttactcgttggctcggctatggctaccgaaccttattactatagctctcctccaccaccgtatgagtataaatctccacctcctccggttaaatctcctccaccgccttatgaatataaatcaccaccacctccggttaagtctcctccaccaccgtattactatcattcaccgccgccgccagtgaaatcccctccccctccttatgtttacagctctcctcctcctccggtgaagtcccctcctcccccatactactaccattcaccgcctcctccggtgaagtctcctcctcctccatactactaccattcaccacctcctccggtgaaatccccaccaccaccatattactaccattcaccacctcctccggtgaaatccccaccaccaccatactactaccattcacctcctcctcctgtgaaatctcctcctcctccatattattaccactccccacctcctccggtgaaatccccaccaccaccatacctttacagctctccaccaccaccggtaaaatctcccccacctcctgtctacatctacgcttctcccccacctcccacacattactag

SEQ ID NO: 89414 - protein, 212 aa, Arabidopsis thaliana
  peptide (1)..(212): Ceres Seq. ID no. 12718537
  misc_feature (43)..(209): Pfam Name: Formin Homology 2 Domain Pfam Description: Formin Homology 2 Domain
  misc_feature (1)..(212): Homolog of NCBI NO: 15224236 NR Description: putative extensin; protein id: At2g43150.1
  misc_feature (1)..(209): Homolog of NCBI NO: 227927 NR Description: extensin
  misc_feature (10)..(209): Homolog of NCBI NO: 227927 NR Description: extensin
  misc_feature (30)..(206): Homolog of NCBI NO: 7211797 NR Description: CRANTZ hydroxyproline-rich glycoprotein [Manihot
  misc_feature (30)..(209): Homolog of NCBI NO: 7211797 NR Description: CRANTZ hydroxyproline-rich glycoprotein [Manihot
  misc_feature (19)..(209): Homolog of NCBI NO: 7211797 NR Description: CRANTZ hydroxyproline-rich glycoprotein [Manihot
  misc_feature (30)..(209): Homolog of NCBI NO: 227927 NR Description: extensin
  misc_feature (30)..(209): Homolog of NCBI NO: 227927 NR Description: extensin
  misc_feature (30)..(209): Homolog of NCBI NO: 227927 NR Description: extensin
  misc_feature (35)..(209): Homolog of NCBI NO: 227927 NR Description: extensin
MATPAWSHAKAQWVVAMLALLVGSAMATEPYYYSSPPPPYEYKSPPPPVKSPPPPYEYKSPPPPVKSPPPPYYYHSPPPPVKSPPPPYVYSSPPPPVKSPPPPYYYHSPPPPVKSPPPPYYYHSPPPPVKSPPPPYYYHSPPPPVKSPPPPYYYHSPPPPVKSPPPPYYYHSPPPPVKSPPPPYLYSSPPPPVKSPPPPVYIYASPPPPTHY

SEQ ID NO: 89415 - protein, 196 aa, Arabidopsis thaliana
  peptide (1)..(196): Ceres Seq. ID no. 12718538
  misc_feature (27)..(193): Pfam Name: Formin Homology 2 Domain Pfam Description: Formin Homology 2 Domain
  misc_feature (1)..(196): Homolog of NCBI NO: 15224236 NR Description: putative extensin; protein id: At2g43150.1
  misc_feature (1)..(193): Homolog of NCBI NO: 227927 NR Description: extensin
  misc_feature (1)..(193): Homolog of NCBI NO: 227927 NR Description: extensin
  misc_feature (14)..(190): Homolog of NCBI NO: 7211797 NR Description: CRANTZ hydroxyproline-rich glycoprotein [Manihot
  misc_feature (14)..(193): Homolog of NCBI NO: 7211797 NR Description: CRANTZ hydroxyproline-rich glycoprotein [Manihot
  misc_feature (3)..(193): Homolog of NCBI NO: 7211797 NR Description: CRANTZ hydroxyproline-rich glycoprotein [Manihot
  misc_feature (14)..(193): Homolog of NCBI NO: 227927 NR Description: extensin
  misc_feature (14)..(193): Homolog of NCBI NO: 227927 NR Description: extensin
  misc_feature (14)..(193): Homolog of NCBI NO: 227927 NR Description: extensin
  misc_feature (19)..(193): Homolog of NCBI NO: 227927 NR Description: extensin
MLALLVGSAMATEPYYYSSPPPPYEYKSPPPPVKSPPPPYEYKSPPPPVKSPPPPYYYHSPPPPVKSPPPPYVYSSPPPPVKSPPPPYYYHSPPPPVKSPPPPYYYHSPPPPVKSPPPPYYYHSPPPPVKSPPPPYYYHSPPPPVKSPPPPYYYHSPPPPVKSPPPPYLYSSPPPPVKSPPPPVYIYASPPPPTHY

SEQ ID NO: 89416 - protein, 187 aa, Arabidopsis thaliana
  peptide (1)..(187): Ceres Seq. ID no. 12718539
  misc_feature (18)..(184): Pfam Name: Formin Homology 2 Domain Pfam Description: Formin Homology 2 Domain
  misc_feature (1)..(187): Homolog of NCBI NO: 15224236 NR Description: putative extensin; protein id: At2g43150.1
  misc_feature (1)..(184): Homolog of NCBI NO: 227927 NR Description: extensin
  misc_feature (1)..(184): Homolog of NCBI NO: 227927 NR Description: extensin
  misc_feature (5)..(181): Homolog of NCBI NO: 7211797 NR Description: CRANTZ hydroxyproline-rich glycoprotein [Manihot
  misc_feature (5)..(184): Homolog of NCBI NO: 7211797 NR Description: CRANTZ hydroxyproline-rich glycoprotein [Manihot
  misc_feature (1)..(184): Homolog of NCBI NO: 7211797 NR Description: CRANTZ hydroxyproline-rich glycoprotein [Manihot
  misc_feature (5)..(184): Homolog of NCBI NO: 227927 NR Description: extensin
  misc_feature (5)..(184): Homolog of NCBI NO: 227927 NR Description: extensin
  misc_feature (5)..(184): Homolog of NCBI NO: 227927 NR Description: extensin
  misc_feature (10)..(184): Homolog of NCBI NO: 227927 NR Description: extensin
MATEPYYYSSPPPPYEYKSPPPPVKSPPPPYEYKSPPPPVKSPPPPYYYHSPPPPVKSPPPPYVYSSPPPPVKSPPPPYYYHSPPPPVKSPPPPYYYHSPPPPVKSPPPPYYYHSPPPPVKSPPPPYYYHSPPPPVKSPPPPYYYHSPPPPVKSPPPPYLYSSPPPPVKSPPPPVYIYASPPPPTHY

SEQ ID NO: 89417 - DNA, 1479 bp, Arabidopsis thaliana
  misc_feature (1)..(1479): Ceres Seq. ID no. 12718544
  misc_feature: MA Experiment ID: 20000184 Result: Down-regulated in Transcription
  misc_feature: MA Experiment 20000184 PARAMETER Experiment Name: At_Shoots__P Parameter: Age (day) Value: 7
  misc_feature: MA Experiment 20000184 PARAMETER Experiment Name: At_Shoots__P Parameter: Tissue Value: Shoots vs. Whole Plant
  misc_feature: MA Experiment ID: 20000495 Result: Down-regulated in Transcription
  misc_feature: MA Experiment 20000495 PARAMETER Experiment Name: At_Guard_Cells_P Parameter: Harvest Date Value: 8/2/2002
  misc_feature: MA Experiment 20000495 PARAMETER Experiment Name: At_Guard_Cells_P Parameter: Organism Value: A. thaliana
  misc_feature: MA Experiment 20000495 PARAMETER Experiment Name: At_Guard_Cells_P Parameter: Tissue Value: Guard Cells vs. Leaves
  misc_feature: MA Experiment ID: 20000794 Result: Up-regulated in Transcription
  misc_feature: MA Experiment 20000794 PARAMETER Experiment Name: At_Petals_P Parameter: Age (day) Value: 23-25 days
  misc_feature: MA Experiment 20000794 PARAMETER Experiment Name: At_Petals_P Parameter: Plant Line Value: WS
  misc_feature: MA Experiment 20000794 PARAMETER Experiment Name: At_Petals_P Parameter: Tissue Value: Petals vs. Whole plant
atggcggcacttagcttttgcagctcttctcctcctcgaattcttcataaacaatccaaatcgagttttttcccttcttctgcctcttcttctttcacacaaaccgtcggagaattatttgcgaaccccttctctgtctcaagacgatttcgtggcgccgttaactccaccgtagtttccgatgaatcgggaaacgcgaaacttccatcttctccggcgaagaagctaaggaatattatgcaatcccctggtgttcttcagggtccatgttgcttcgatgctcttagtgccaaactcatcgaacgagctgggtttccttactgtatcacctctgcgtctcggcttggtttaccggataagggtctaatttcttatggagaaatggttgatcaaggtcaacaaattactcaatctgtatcaattccggtgattggagacggtggcaatggatacggtaatgccatgaatgttaagagaaccgtcaaaggatatattaaagctggctttgcaggaattatcatcaatgatgaagtttgttgtgaaaatactaagagtgagagaagagtggtttctagagaggaagcagtgatgcgtgttaaagctgcggttgatgcacgtagagagtgtgattcggacattgtaattgtagctcaaactgattcccgtgaagcgatatctctggaggaatcactcattagggcaagagcttttacagatgctggagctgatgttctctccgttgattctcttgtttctagagaagagatgaaagcattctgcaatgtctatccactagttcctaaattggctaatatgcttgaaagcggaggaaaaattccaattctaaacccgctggagctagaagagattggatataagctagtggcgtatccaatttcattgattggagtatctattcaagcaatgcaggacgctctattggcaatcaagggtgggcgaattcctccaccaggaagcatggcgtctttagaagaaattggagagattcttggttttgacacttacgaggaagaagagaagcggtacgctacctcgtcatcagatagaggtgagacatggaagttttcagttgtaacatctttgggaaatgtcaaatcaataactaaatatatgttttatccttttcaagaagtgagcagcagtagcgtctatcgtaatcaacgggtggctaaagatgatccagaacagagagaggacctgattgttgaagtcataacacctgaggtttataatgaaccaagaaaccccttttcgcggatctggtcacgatctttgaggatcaaaatcatcggacgcgatgggtttgagaaactcgatgtcagaattccggtaagtccactttcgagggccatttttcgtgttttatctgagctgatgcaaaacttgtcttatggttggaacaggccggattcttggaaggtgtcacaaacattgttccaggtattcaaaaactcctaa

SEQ ID NO: 89418 - protein, 492 aa, Arabidopsis thaliana
  peptide (1)..(492): Ceres Seq. ID no. 12718545
  misc_feature (55)..(304): Pfam Name: Isocitrate lyase family Pfam Description: Isocitrate lyase family
  misc_feature (1)..(492): Homolog of NCBI NO: 25408843 NR Description: probable carboxyphosphonoenolpyruvate mutase - Arabidopsis thaliana >gi|3763927|gb|AAC64307.1| putative
  misc_feature (1)..(395): Homolog of NCBI NO: 30689278 NR Description: carboxyphosphonoenolpyruvate mutase -related thaliana] >gi|26450281|dbj|BAC42257.1| putative mutase [Arabidopsis thaliana] >gi|28827730|gb|AAO50709.1|
  misc_feature (1)..(395): Homolog of NCBI NO: 30689282 NR Description: carboxyphosphonoenolpyruvate mutase -related
  misc_feature (43)..(376): Homolog of NCBI NO: 32490267 NR Description: OSJNBb0116K07.9 [Oryza sativa (japonica
  misc_feature (397)..(450): Homolog of NCBI NO: 32490267 NR Description: OSJNBb0116K07.9 [Oryza sativa (japonica
  misc_feature (53)..(351): Homolog of NCBI NO: 38347227 NR Description: OSJNBa0044M19.9 [Oryza sativa (japonica
  misc_feature (211)..(488): Homolog of NCBI NO: 30689282 NR Description: carboxyphosphonoenolpyruvate mutase -related
  misc_feature (57)..(342): Homolog of NCBI NO: 40747280 NR Description: hypothetical protein AN9369.2 [Aspergillus
  misc_feature (71)..(350): Homolog of NCBI NO: 23043034 NR Description: hypothetical protein [Trichodesmium erythraeum
  misc_feature (40)..(348): Homolog of NCBI NO: 40739091 NR Description: hypothetical protein AN6882.2 [Aspergillus
MAALSFCSSSPPRILHKQSKSSFFPSSASSSFTQTVGELFANPFSVSRRFRGAVNSTVVSDESGNAKLPSSPAKKLRNIMQSPGVLQGPCCFDALSAKLIERAGFPYCITSASRLGLPDKGLISYGEMVDQGQQITQSVSIPVIGDGGNGYGNAMNVKRTVKGYIKAGFAGIIINDEVCCENTKSERRVVSREEAVMRVKAAVDARRECDSDIVIVAQTDSREAISLEESLIRARAFTDAGADVLSVDSLVSREEMKAFCNVYPLVPKLANMLESGGKIPILNPLELEEIGYKLVAYPISLIGVSIQAMQDALLAIKGGRIPPPGSMASLEEIGEILGFDTYEEEEKRYATSSSDRGETWKFSVVTSLGNVKSITKYMFYPFQEVSSSSVYRNQRVAKDDPEQREDLIVEVITPEVYNEPRNPFSRIWSRSLRIKIIGRDGFEKLDVRIPVSPLSRAIFRVLSELMQNLSYGWNRPDSWKVSQTLFQVFKNS

SEQ ID NO: 89419 - protein, 413 aa, Arabidopsis thaliana
  peptide (1)..(413): Ceres Seq. ID no. 12718546
  misc_feature (1)..(225): Pfam Name: Isocitrate lyase family Pfam Description: Isocitrate lyase family
  misc_feature (1)..(413): Homolog of NCBI NO: 25408843 NR Description: probable carboxyphosphonoenolpyruvate mutase - Arabidopsis thaliana >gi|3763927|gb|AAC64307.1| putative
  misc_feature (1)..(316): Homolog of NCBI NO: 30689278 NR Description: carboxyphosphonoenolpyruvate mutase -related thaliana] >gi|26450281|dbj|BAC42257.1| putative mutase [Arabidopsis thaliana] >gi|28827730|gb|AAO50709.1|
  misc_feature (1)..(316): Homolog of NCBI NO: 30689282 NR Description: carboxyphosphonoenolpyruvate mutase -related
  misc_feature (1)..(297): Homolog of NCBI NO: 32490267 NR Description: OSJNBb0116K07.9 [Oryza sativa (japonica
  misc_feature (318)..(371): Homolog of NCBI NO: 32490267 NR Description: OSJNBb0116K07.9 [Oryza sativa (japonica
  misc_feature (1)..(272): Homolog of NCBI NO: 38347227 NR Description: OSJNBa0044M19.9 [Oryza sativa (japonica
  misc_feature (132)..(409): Homolog of NCBI NO: 30689282 NR Description: carboxyphosphonoenolpyruvate mutase -related
  misc_feature (1)..(263): Homolog of NCBI NO: 40747280 NR Description: hypothetical protein AN9369.2 [Aspergillus
  misc_feature (1)..(271): Homolog of NCBI NO: 23043034 NR Description: hypothetical protein [Trichodesmium erythraeum
  misc_feature (1)..(269): Homolog of NCBI NO: 40739091 NR Description: hypothetical protein AN6882.2 [Aspergillus
MQSPGVLQGPCCFDALSAKLIERAGFPYCITSASRLGLPDKGLISYGEMVDQGQQITQSVSIPVIGDGGNGYGNAMNVKRTVKGYIKAGFAGIIINDEVCCENTKSERRVVSREEAVMRVKAAVDARRECDSDIVIVAQTDSREAISLEESLIRARAFTDAGADVLSVDSLVSREEMKAFCNVYPLVPKLANMLESGGKIPILNPLELEEIGYKLVAYPISLIGVSIQAMQDALLAIKGGRIPPPGSMASLEEIGEILGFDTYEEEEKRYATSSSDRGETWKFSVVTSLGNVKSITKYMFYPFQEVSSSSVYRNQRVAKDDPEQREDLIVEVITPEVYNEPRNPFSRIWSRSLRIKIIGRDGFEKLDVRIPVSPLSRAIFRVLSELMQNLSYGWNRPDSWKVSQTLFQVFKNS

SEQ ID NO: 89420 - protein, 365 aa, Arabidopsis thaliana
  peptide (1)..(365): Ceres Seq. ID no. 12718547
  misc_feature (1)..(177): Pfam Name: Isocitrate lyase family Pfam Description: Isocitrate lyase family
  misc_feature (1)..(365): Homolog of NCBI NO: 25408843 NR Description: probable carboxyphosphonoenolpyruvate mutase - Arabidopsis thaliana >gi|3763927|gb|AAC64307.1| putative
  misc_feature (1)..(268): Homolog of NCBI NO: 30689278 NR Description: carboxyphosphonoenolpyruvate mutase -related thaliana] >gi|26450281|dbj|BAC42257.1| putative mutase [Arabidopsis thaliana] >gi|28827730|gb|AAO50709.1|
  misc_feature (1)..(268): Homolog of NCBI NO: 30689282 NR Description: carboxyphosphonoenolpyruvate mutase -related
  misc_feature (1)..(249): Homolog of NCBI NO: 32490267 NR Description: OSJNBb0116K07.9 [Oryza sativa (japonica
  misc_feature (270)..(323): Homolog of NCBI NO: 32490267 NR Description: OSJNBb0116K07.9 [Oryza sativa (japonica
  misc_feature (1)..(224): Homolog of NCBI NO: 38347227 NR Description: OSJNBa0044M19.9 [Oryza sativa (japonica
  misc_feature (84)..(361): Homolog of NCBI NO: 30689282 NR Description: carboxyphosphonoenolpyruvate mutase -related
  misc_feature (1)..(215): Homolog of NCBI NO: 40747280 NR Description: hypothetical protein AN9369.2 [Aspergillus
  misc_feature (1)..(223): Homolog of NCBI NO: 23043034 NR Description: hypothetical protein [Trichodesmium erythraeum
  misc_feature (1)..(221): Homolog of NCBI NO: 40739091 NR Description: hypothetical protein AN6882.2 [Aspergillus
MVDQGQQITQSVSIPVIGDGGNGYGNAMNVKRTVKGYIKAGFAGIIINDEVCCENTKSERRVVSREEAVMRVKAAVDARRECDSDIVIVAQTDSREAISLEESLIRARAFTDAGADVLSVDSLVSREEMKAFCNVYPLVPKLANMLESGGKIPILNPLELEEIGYKLVAYPISLIGVSIQAMQDALLAIKGGRIPPPGSMASLEEIGEILGFDTYEEEEKRYATSSSDRGETWKFSVVTSLGNVKSITKYMFYPFQEVSSSSVYRNQRVAKDDPEQREDLIVEVITPEVYNEPRNPFSRIWSRSLRIKIIGRDGFEKLDVRIPVSPLSRAIFRVLSELMQNLSYGWNRPDSWKVSQTLFQVFKNS

SEQ ID NO: 89421 - DNA, 1836 bp, Arabidopsis thaliana
  misc_feature (1)..(1836): Ceres Seq. ID no. 12718548
  misc_feature: MA Experiment ID: 20000169 Result: Down-regulated in Transcription
  misc_feature: MA Experiment 20000169 PARAMETER Experiment Name: At_100uM_ABA_P Parameter: Age (day) Value: 14
  misc_feature: MA Experiment 20000169 PARAMETER Experiment Name: At_100uM_ABA_P Parameter: Organism Value: A. thaliana
  misc_feature: MA Experiment 20000169 PARAMETER Experiment Name: At_100uM_ABA_P Parameter: Plant Line Value: WS
  misc_feature: MA Experiment 20000169 PARAMETER Experiment Name: At_100uM_ABA_P Parameter: Timepoint (hr) Value: 6
  misc_feature: MA Experiment 20000169 PARAMETER Experiment Name: At_100uM_ABA_P Parameter: Tissue Value: Aerial
  misc_feature: MA Experiment 20000169 PARAMETER Experiment Name: At_100uM_ABA_P Parameter: Treatment Value: 100uM ABA vs. No Treatment
  misc_feature: MA Experiment ID: 20000439 Result: Up-regulated in Transcription
  misc_feature: MA Experiment 20000439 PARAMETER Experiment Name: At_Roots__P Parameter: Age (day) Value: 14 vs. 21
  misc_feature: MA Experiment 20000439 PARAMETER Experiment Name: At_Roots__P Parameter: Organism Value: A. thaliana
  misc_feature: MA Experiment 20000439 PARAMETER Experiment Name: At_Roots__P Parameter: Tissue Value: Roots vs. Whole Plant
atgaatccatcacaacaacacttaccaaagctatgtcctaagcgcctattcctcttcttcactccattcttattgttctctctctattacatcctcaccactatcaaaaccatcaccatctcttcccaagatcgtcaccatcctccacagcttcatgtaccttccatttcccattactactcccttccagaaacttcagaaaaccgatcgtcaccacctccactactactaccaccaccaccatcatcctcatcatcgttatcttcttactttccactctgtcccaagaacttcaccaactacttgccttgccacgatccatcaacagcacgacagtacagcattgagagacactatcggagagagaggcactgtcctgacatagcccaagagaagttcaggtgtttggtcccaaagcccactggctacaaaacgccttttccatggcctgagagtagaaaatatgcttggtttaggaacgtaccattcaagaggctagctgagttgaaaaagactcagaattgggttagacttgaaggagaccgttttgttttcccaggaggcgggacttctttccccggtggtgtgaaggactatgttgatgtgattctgagtgttttgcctttggcttctgggagtatcaggactgttctcgatattggatgtggagtagcgagttttggagcctttttgctgaactataagattttgacaatgtccattgcaccgagggatatacatgaggctcaagttcagttcgcattagaacgtggactccctgctatgctcggtgttttaagcacttataagctgccttacccgtcgaggtcttttgacatggtccattgttctagatgccttgtcaattggacttcctatgatgggctttacttgatggaggtggatcgtgttttacgtcctgagggatactgggtgttgtctggaccccctgtagcatcaagggttaaatttaagaaccagaagagagattccaaggagttgcagaaccagatggagaaactaaatgatgtttttagaagactttgttgggagaagattgctgaaagttacccggttgtcatctggagaaagccttctaatcatttgcagtgtaggaaaagactaaaagctcttaagtttcctggattatgctcttctagtgaccctgacgctgcgtggtataaagagatggagccgtgcatcactcctcttccagatgttaacgacacaaacaagaccgttctcaaaaactggcctgagagactaaaccatgtgcctcgaatgaaaaccgggtcgatacagggaacaactattgccggcttcaaagctgacacgaacctgtggcaaagaagagttttgtactatgacaccaagtttaagtttctcagcaatggaaaatacagaaacgtcattgatatgaacgcaggattaggtggttttgctgcagctttgatcaaatatccaatgtgggttatgaatgtggttccatttgatcttaaaccgaacacactcggtgttgtgtatgatcgcggtctcattggaacttacatgaactggtgtgaagctttatctacataccctcgaacctatgacctgattcatgccaatggtgtattcagtttgtacttggacaaatgtgacattgttgatatactcttggagatgcagaggattcttagaccagaaggagcagttataatacgagaccgttttgatgttcttgtcaaagtgaaagccataaccaatcaaatgagatggaatgggacaatgtatccagaagataatagtgttttcgatcatggaacaatactaatcgtagataactcaattaaataa

SEQ ID NO: 89422 - protein, 611 aa, Arabidopsis thaliana
  peptide (1)..(611): Ceres Seq. ID no. 12718549
  misc_feature (100)..(608): Pfam Name: Putative methyltransferase Pfam Description: Putative methyltransferase
  misc_feature (91)..(605): Homolog of NCBI NO: 37535962 NR Description: unknown protein [Oryza sativa (japonica
  misc_feature (82)..(605): Homolog of NCBI NO: 24413975 NR Description: hypothetical protein~similar to Oryza sativa
  misc_feature (79)..(588): Homolog of NCBI NO: 15225560 NR Description: hypothetical protein; protein id: At2g45750.1
  misc_feature (80)..(606): Homolog of NCBI NO: 15236921 NR Description: hypothetical protein; protein id: At4g00750.1
  misc_feature (90)..(609): Homolog of NCBI NO: 18398763 NR Description: unknown protein; protein id: At1g33170.1
  misc_feature (289)..(609): Homolog of NCBI NO: 9665165 NR Description: Unknown Protein [Arabidopsis thaliana]
  misc_feature (90)..(290): Homolog of NCBI NO: 9665165 NR Description: Unknown Protein [Arabidopsis thaliana]
  misc_feature (2)..(605): Homolog of NCBI NO: 15235080 NR Description: putative protein; protein id: At4g10440.1
  misc_feature (82)..(606): Homolog of NCBI NO: 18396075 NR Description: expressed protein; protein id: At1g26850.1, by cDNA: gi_14335101 [Arabidopsis thaliana] At1g26850/T2P11_4 [Arabidopsis thaliana]
  misc_feature (84)..(606): Homolog of NCBI NO: 6752888 NR Description: unknown [Malus x domestica]
MNPSQQHLPKLCPKRLFLFFTPFLLFSLYYILTTIKTITISSQDRHHPPQLHVPSISHYYSLPETSENRSSPPPLLLPPPPSSSSSLSSYFPLCPKNFTNYLPCHDPSTARQYSIERHYRRERHCPDIAQEKFRCLVPKPTGYKTPFPWPESRKYAWFRNVPFKRLAELKKTQNWVRLEGDRFVFPGGGTSFPGGVKDYVDVILSVLPLASGSIRTVLDIGCGVASFGAFLLNYKILTMSIAPRDIHEAQVQFALERGLPAMLGVLSTYKLPYPSRSFDMVHCSRCLVNWTSYDGLYLMEVDRVLRPEGYWVLSGPPVASRVKFKNQKRDSKELQNQMEKLNDVFRRLCWEKIAESYPVVIWRKPSNHLQCRKRLKALKFPGLCSSSDPDAAWYKEMEPCITPLPDVNDTNKTVLKNWPERLNHVPRMKTGSIQGTTIAGFKADTNLWQRRVLYYDTKFKFLSNGKYRNVIDMNAGLGGFAAALIKYPMWVMNVVPFDLKPNTLGVVYDRGLIGTYMNWCEALSTYPRTYDLIHANGVFSLYLDKCDIVDILLEMQRILRPEGAVIIRDRFDVLVKVKAITNQMRWNGTMYPEDNSVFDHGTILIVDNSIK

SEQ ID NO: 89423 - protein, 373 aa, Arabidopsis thaliana
  peptide (1)..(373): Ceres Seq. ID no. 12718550
  misc_feature (1)..(370): Pfam Name: Putative methyltransferase Pfam Description: Putative methyltransferase
  misc_feature (1)..(367): Homolog of NCBI NO: 37535962 NR Description: unknown protein [Oryza sativa (japonica
  misc_feature (1)..(367): Homolog of NCBI NO: 24413975 NR Description: hypothetical protein~similar to Oryza sativa
  misc_feature (1)..(350): Homolog of NCBI NO: 15225560 NR Description: hypothetical protein; protein id: At2g45750.1
  misc_feature (1)..(368): Homolog of NCBI NO: 15236921 NR Description: hypothetical protein; protein id: At4g00750.1
  misc_feature (1)..(371): Homolog of NCBI NO: 18398763 NR Description: unknown protein; protein id: At1g33170.1
  misc_feature (51)..(371): Homolog of NCBI NO: 9665165 NR Description: Unknown Protein [Arabidopsis thaliana]
  misc_feature (1)..(52): Homolog of NCBI NO: 9665165 NR Description: Unknown Protein [Arabidopsis thaliana]
  misc_feature (1)..(367): Homolog of NCBI NO: 15235080 NR Description: putative protein; protein id: At4g10440.1
  misc_feature (1)..(368): Homolog of NCBI NO: 18396075 NR Description: expressed protein; protein id: At1g26850.1, by cDNA: gi_14335101 [Arabidopsis thaliana] At1g26850/T2P11_4 [Arabidopsis thaliana]
  misc_feature (1)..(368): Homolog of NCBI NO: 6752888 NR Description: unknown [Malus x domestica]
MSIAPRDIHEAQVQFALERGLPAMLGVLSTYKLPYPSRSFDMVHCSRCLVNWTSYDGLYLMEVDRVLRPEGYWVLSGPPVASRVKFKNQKRDSKELQNQMEKLNDVFRRLCWEKIAESYPVVIWRKPSNHLQCRKRLKALKFPGLCSSSDPDAAWYKEMEPCITPLPDVNDTNKTVLKNWPERLNHVPRMKTGSIQGTTIAGFKADTNLWQRRVLYYDTKFKFLSNGKYRNVIDMNAGLGGFAAALIKYPMWVMNVVPFDLKPNTLGVVYDRGLIGTYMNWCEALSTYPRTYDLIHANGVFSLYLDKCDIVDILLEMQRILRPEGAVIIRDRFDVLVKVKAITNQMRWNGTMYPEDNSVFDHGTILIVDNSIK

SEQ ID NO: 89424 - protein, 350 aa, Arabidopsis thaliana
  peptide (1)..(350): Ceres Seq. ID no. 12718551
  misc_feature (1)..(347): Pfam Name: Putative methyltransferase Pfam Description: Putative methyltransferase
  misc_feature (1)..(344): Homolog of NCBI NO: 37535962 NR Description: unknown protein [Oryza sativa (japonica
  misc_feature (1)..(344): Homolog of NCBI NO: 24413975 NR Description: hypothetical protein~similar to Oryza sativa
  misc_feature (1)..(327): Homolog of NCBI NO: 15225560 NR Description: hypothetical protein; protein id: At2g45750.1
  misc_feature (1)..(345): Homolog of NCBI NO: 15236921 NR Description: hypothetical protein; protein id: At4g00750.1
  misc_feature (1)..(348): Homolog of NCBI NO: 18398763 NR Description: unknown protein; protein id: At1g33170.1
  misc_feature (28)..(348): Homolog of NCBI NO: 9665165 NR Description: Unknown Protein [Arabidopsis thaliana]
  misc_feature (1)..(29): Homolog of NCBI NO: 9665165 NR Description: Unknown Protein [Arabidopsis thaliana]
  misc_feature (1)..(344): Homolog of NCBI NO: 15235080 NR Description: putative protein; protein id: At4g10440.1
  misc_feature (1)..(345): Homolog of NCBI NO: 18396075 NR Description: expressed protein; protein id: At1g26850.1, by cDNA: gi_14335101 [Arabidopsis thaliana] At1g26850/T2P11_4 [Arabidopsis thaliana]
  misc_feature (1)..(345): Homolog of NCBI NO: 6752888 NR Description: unknown [Malus x domestica]
MLGVLSTYKLPYPSRSFDMVHCSRCLVNWTSYDGLYLMEVDRVLRPEGYWVLSGPPVASRVKFKNQKRDSKELQNQMEKLNDVFRRLCWEKIAESYPVVIWRKPSNHLQCRKRLKALKFPGLCSSSDPDAAWYKEMEPCITPLPDVNDTNKTVLKNWPERLNHVPRMKTGSIQGTTIAGFKADTNLWQRRVLYYDTKFKFLSNGKYRNVIDMNAGLGGFAAALIKYPMWVMNVVPFDLKPNTLGVVYDRGLIGTYMNWCEALSTYPRTYDLIHANGVFSLYLDKCDIVDILLEMQRILRPEGAVIIRDRFDVLVKVKAITNQMRWNGTMYPEDNSVFDHGTILIVDNSIK

SEQ ID NO: 89425 - DNA, 1669 bp, Arabidopsis thaliana
  misc_feature (1)..(1669): Ceres Seq. ID no. 12718560
  misc_feature: MA Experiment ID: 20000184 Result: Down-regulated in Transcription
  misc_feature: MA Experiment 20000184 PARAMETER Experiment Name: At_Shoots__P Parameter: Age (day) Value: 7
  misc_feature: MA Experiment 20000184 PARAMETER Experiment Name: At_Shoots__P Parameter: Tissue Value: Shoots vs. Whole Plant
  misc_feature: MA Experiment ID: 20000234 Result: Up-regulated in Transcription
  misc_feature: MA Experiment 20000234 PARAMETER Experiment Name: At_Siliques_P Parameter: Age (day) Value: 21
  misc_feature: MA Experiment 20000234 PARAMETER Experiment Name: At_Siliques_P Parameter: Organism Value: A. thaliana
  misc_feature: MA Experiment 20000234 PARAMETER Experiment Name: At_Siliques_P Parameter: Plant Line Value: WS
  misc_feature: MA Experiment 20000234 PARAMETER Experiment Name: At_Siliques_P Parameter: Tissue Value: Less Than 5mm Siliques vs. Whole Plant
  misc_feature: MA Experiment ID: 20000264 Result: Up-regulated in Transcription
  misc_feature: MA Experiment 20000264 PARAMETER Experiment Name: At_Open_Flower_P Parameter: Age (day) Value: 21
  misc_feature: MA Experiment 20000264 PARAMETER Experiment Name: At_Open_Flower_P Parameter: Plant Line Value: WS
  misc_feature: MA Experiment 20000264 PARAMETER Experiment Name: At_Open_Flower_P Parameter: Tissue Value: Open Flower vs. Whole Plant
  misc_feature: MA Experiment ID: 20000265 Result: Up-regulated in Transcription
  misc_feature: MA Experiment 20000265 PARAMETER Experiment Name: At_Open_Flower_P Parameter: Age (day) Value: 21
  misc_feature: MA Experiment 20000265 PARAMETER Experiment Name: At_Open_Flower_P Parameter: Plant Line Value: WS
  misc_feature: MA Experiment 20000265 PARAMETER Experiment Name: At_Open_Flower_P Parameter: Tissue Value: Closed Flower vs. Whole Plant
  misc_feature: MA Experiment ID: 20000286 Result: Up-regulated in Transcription
  misc_feature: MA Experiment 20000286 PARAMETER Experiment Name: At_Open_Flower_P Parameter: Age (day) Value: 21
  misc_feature: MA Experiment 20000286 PARAMETER Experiment Name: At_Open_Flower_P Parameter: Plant Line Value: WS
  misc_feature: MA Experiment 20000286 PARAMETER Experiment Name: At_Open_Flower_P Parameter: Tissue Value: Half Open vs. Whole Plant
  misc_feature: MA Experiment ID: 20000438 Result: Down-regulated in Transcription
  misc_feature: MA Experiment 20000438 PARAMETER Experiment Name: At_Shoots__P Parameter: Age (day) Value: 14
  misc_feature: MA Experiment 20000438 PARAMETER Experiment Name: At_Shoots__P Parameter: Tissue Value: Shoots vs. Whole Plant
  misc_feature: MA Experiment ID: 20000794 Result: Up-regulated in Transcription
  misc_feature: MA Experiment 20000794 PARAMETER Experiment Name: At_Petals_P Parameter: Age (day) Value: 23-25 days
  misc_feature: MA Experiment 20000794 PARAMETER Experiment Name: At_Petals_P Parameter: Plant Line Value: WS
  misc_feature: MA Experiment 20000794 PARAMETER Experiment Name: At_Petals_P Parameter: Tissue Value: Petals vs. Whole plant
  misc_feature: MA Experiment ID: 20001757 Result: Down-regulated in Transcription
  misc_feature: MA Experiment 20001757 PARAMETER Experiment Name: At_50mM_NH4NO3_L-to-H_P Parameter: Timepoint (hr) Value: 6
  misc_feature: MA Experiment 20001757 PARAMETER Experiment Name: At_50mM_NH4NO3_L-to-H_P Parameter: Tissue Value: Leaf
  misc_feature: MA Experiment 20001757 PARAMETER Experiment Name: At_50mM_NH4NO3_L-to-H_P Parameter: Treatment Value: 50mM NH4NO3 vs 100mM Mannitol
  misc_feature: MA Experiment ID: 20001910 Result: Up-regulated in Transcription
  misc_feature: MA Experiment 20001910 PARAMETER Experiment Name: At_Drought_Reproduction_P Parameter: Age (day) Value: 37
  misc_feature: MA Experiment 20001910 PARAMETER Experiment Name: At_Drought_Reproduction_P Parameter: Organism Value: A. thaliana
  misc_feature: MA Experiment 20001910 PARAMETER Experiment Name: At_Drought_Reproduction_P Parameter: Plant Line Value: WS
  misc_feature: MA Experiment 20001910 PARAMETER Experiment Name: At_Drought_Reproduction_P Parameter: Timepoint (day) Value: 7
  misc_feature: MA Experiment 20001910 PARAMETER Experiment Name: At_Drought_Reproduction_P Parameter: Tissue Value: Flowers
  misc_feature: MA Experiment 20001910 PARAMETER Experiment Name: At_Drought_Reproduction_P Parameter: Treatment Value: Drought vs. No Drought
gtagttatttgggattccaaatttttttcattcctaaatttctccacgagctcatcacctcctttcgtctctgcctctcatttgtctacaaacattttttccttttgattcgtctctctggtttattgctcgttgatcgtttgtttctaaattgcattctgatttctgatggatcgtgattttcatcgtcgtggtcaagtggcgaatgatcgtacacaaagcaactttgttcgattggataaaccgagagctgtagacgatcttgatataggcaagagagggaagatgcgtaggtggttgtgctgttcttgtcgtgtacaagaatcttacccatcagctgaaaataaccgattgaaaacccctcctactcgccattacgactatggacgtaacaacaagaaaacaccagctcctgtgaagcctcctgttttgaaggagcctccgcctattgatgtccccgcaatgtcattggttgagctcaaagaaaagactcagaattttggatcaaaggcattgattggagaaggatcctatggaagagtgtactacgcaaactttaatgatgggaaggccgtggctgtgaaaaagcttgataatgcatctgaacccgaaacaaatgtcgagttcttgactcaggtctctaaagtttcgaggctgaaaagtgacaattttgttcagcttcttggttattgtgtagaagggaaccttcgtgtccttgcttatgagtttgccacaatgagatcattgcacgacatcttacacgggagaaagggagtgcaaggagcacaacctggtccaacacttgagtggatgcaacgagtccgagttgcggttgatgcagctaaaggattagaatacttacacgagaaagttcaacctgcggttatacacagagatattcgatctagcaatgtgcttattttcgaagatttcaaagccaagattgctgactttaatctttccaatcaagctcctgatatggctgctcgtcttcattccactagagttttggggaccttcggttatcatgcaccagaatatgcgatgacaggacagttgacacagaagagtgatgtttacagttttggagttgtgcttttggaacttcttaccgggagaaaaccggttgatcatactatgcctcgtggtcaacagagtcttgtcacttgggctactccaaggctgagtgaagacaaagtgaaacaatgtgttgatccaaaactcaaaggagagtatcctcctaaagcagtggcaaagcttgcagcggttgcagcgttgtgtgtgcaatacgaagcagagtttaggccaaacatgagcattgtagtaaaagctcttcaaccgctcttgaggtcagcaacagctgctgctcctccaacacctcaaccttgattcttctttgtggttcttgcttactgattatcatggcttcaaggttttgtcttcactttattctttctatctaccatggaatgtaaatggttattaaggggaggtggtgaggagcaattgggatttcactccatggaaatgatctgtgttaactgctttttgatgggttgattcttatgaaatattctataacttttgtttgttcgtttgaacatataagctgacacttctctttttttaggcaaattcatgggaaaatagcttgaatatacagaaattt

SEQ ID NO: 89426 - protein, 406 aa, Arabidopsis thaliana
  peptide (1)..(406): Ceres Seq. ID no. 12718561
  misc_feature (1)..(406): Homolog of NCBI NO: 18406188 NR Description: putative protein kinase; protein id: At2g43230.1, by cDNA: gi_15450905 [Arabidopsis thaliana] putative protein kinase [Arabidopsis thaliana]
  misc_feature (40)..(406): Homolog of NCBI NO: 25287594 NR Description: probable protein kinase [imported] - Arabidopsis
  misc_feature (1)..(405): Homolog of NCBI NO: 30694970 NR Description: serine/threonine protein kinase, putative
  misc_feature (12)..(405): Homolog of NCBI NO: 11259776 NR Description: protein kinase-like protein - Arabidopsis thaliana
  misc_feature (40)..(405): Homolog of NCBI NO: 30694972 NR Description: serine/threonine protein kinase, putative
MDRDFHRRGQVANDRTQSNFVRLDKPRAVDDLDIGKRGKMRRWLCCSCRVQESYPSAENNRLKTPPTRHYDYGRNNKKTPAPVKPPVLKEPPPIDVPAMSLVELKEKTQNFGSKALIGEGSYGRVYYANFNDGKAVAVKKLDNASEPETNVEFLTQVSKVSRLKSDNFVQLLGYCVEGNLRVLAYEFATMRSLHDILHGRKGVQGAQPGPTLEWMQRVRVAVDAAKGLEYLHEKVQPAVIHRDIRSSNVLIFEDFKAKIADFNLSNQAPDMAARLHSTRVLGTFGYHAPEYAMTGQLTQKSDVYSFGVVLLELLTGRKPVDHTMPRGQQSLVTWATPRLSEDKVKQCVDPKLKGEYPPKAVAKLAAVAALCVQYEAEFRPNMSIVVKALQPLLRSATAAAPPTPQP

SEQ ID NO: 89427 - protein, 367 aa, Arabidopsis thaliana
  peptide (1)..(367): Ceres Seq. ID no. 12718562
  misc_feature (1)..(367): Homolog of NCBI NO: 18406188 NR Description: putative protein kinase; protein id: At2g43230.1, by cDNA: gi_15450905 [Arabidopsis thaliana] putative protein kinase [Arabidopsis thaliana]
  misc_feature (1)..(367): Homolog of NCBI NO: 25287594 NR Description: probable protein kinase [imported] - Arabidopsis
  misc_feature (1)..(366): Homolog of NCBI NO: 30694970 NR Description: serine/threonine protein kinase, putative
  misc_feature (1)..(366): Homolog of NCBI NO: 11259776 NR Description: protein kinase-like protein - Arabidopsis thaliana
  misc_feature (1)..(366): Homolog of NCBI NO: 30694972 NR Description: serine/threonine protein kinase, putative
MRRWLCCSCRVQESYPSAENNRLKTPPTRHYDYGRNNKKTPAPVKPPVLKEPPPIDVPAMSLVELKEKTQNFGSKALIGEGSYGRVYYANFNDGKAVAVKKLDNASEPETNVEFLTQVSKVSRLKSDNFVQLLGYCVEGNLRVLAYEFATMRSLHDILHGRKGVQGAQPGPTLEWMQRVRVAVDAAKGLEYLHEKVQPAVIHRDIRSSNVLIFEDFKAKIADFNLSNQAPDMAARLHSTRVLGTFGYHAPEYAMTGQLTQKSDVYSFGVVLLELLTGRKPVDHTMPRGQQSLVTWATPRLSEDKVKQCVDPKLKGEYPPKAVAKLAAVAALCVQYEAEFRPNMSIVVKALQPLLRSATAAAPPTPQP

SEQ ID NO: 89428 - protein, 308 aa, Arabidopsis thaliana
  peptide (1)..(308): Ceres Seq. ID no. 12718563
  misc_feature (1)..(308): Homolog of NCBI NO: 18406188 NR Description: putative protein kinase; protein id: At2g43230.1, by cDNA: gi_15450905 [Arabidopsis thaliana] putative protein kinase [Arabidopsis thaliana]
  misc_feature (1)..(308): Homolog of NCBI NO: 25287594 NR Description: probable protein kinase [imported] - Arabidopsis
  misc_feature (1)..(307): Homolog of NCBI NO: 30694970 NR Description: serine/threonine protein kinase, putative
  misc_feature (1)..(307): Homolog of NCBI NO: 11259776 NR Description: protein kinase-like protein - Arabidopsis thaliana
  misc_feature (1)..(307): Homolog of NCBI NO: 30694972 NR Description: serine/threonine protein kinase, putative
MSLVELKEKTQNFGSKALIGEGSYGRVYYANFNDGKAVAVKKLDNASEPETNVEFLTQVSKVSRLKSDNFVQLLGYCVEGNLRVLAYEFATMRSLHDILHGRKGVQGAQPGPTLEWMQRVRVAVDAAKGLEYLHEKVQPAVIHRDIRSSNVLIFEDFKAKIADFNLSNQAPDMAARLHSTRVLGTFGYHAPEYAMTGQLTQKSDVYSFGVVLLELLTGRKPVDHTMPRGQQSLVTWATPRLSEDKVKQCVDPKLKGEYPPKAVAKLAAVAALCVQYEAEFRPNMSIVVKALQPLLRSATAAAPPTPQP

SEQ ID NO: 89429 - DNA, 795 bp, Arabidopsis thaliana
  misc_feature (1)..(795): Ceres Seq. ID no. 12718586
  misc_feature: MA Experiment ID: 20000307 Result: Down-regulated in Transcription
  misc_feature: MA Experiment 20000307 PARAMETER Experiment Name: At_Germinating_Seeds_Sub_P Parameter: Age (hr) Value: 24 vs. 0
  misc_feature: MA Experiment 20000307 PARAMETER Experiment Name: At_Germinating_Seeds_Sub_P Parameter: Organism Value: A. thaliana
  misc_feature: MA Experiment 20000307 PARAMETER Experiment Name: At_Germinating_Seeds_Sub_P Parameter: Plant Line Value: WS
  misc_feature: MA Experiment 20000307 PARAMETER Experiment Name: At_Germinating_Seeds_Sub_P Parameter: Tissue Value: Germinating Seeds
  misc_feature: MA Experiment ID: 20000314 Result: Up-regulated in Transcription
  misc_feature: MA Experiment 20000314 PARAMETER Experiment Name: At_14day_Shoots-Roots_Sub_P Parameter: Age (day) Value: 14
  misc_feature: MA Experiment 20000314 PARAMETER Experiment Name: At_14day_Shoots-Roots_Sub_P Parameter: Organism Value: A. thaliana
  misc_feature: MA Experiment 20000314 PARAMETER Experiment Name: At_14day_Shoots-Roots_Sub_P Parameter: Plant Line Value: WS
  misc_feature: MA Experiment 20000314 PARAMETER Experiment Name: At_14day_Shoots-Roots_Sub_P Parameter: Tissue Value: Roots vs. Whole Plant
  misc_feature: MA Experiment ID: 20000315 Result: Up-regulated in Transcription
  misc_feature: MA Experiment 20000315 PARAMETER Experiment Name: At_14day_Shoots-Roots_Sub_P Parameter: Age (day) Value: 14
  misc_feature: MA Experiment 20000315 PARAMETER Experiment Name: At_14day_Shoots-Roots_Sub_P Parameter: Organism Value: A. thaliana
  misc_feature: MA Experiment 20000315 PARAMETER Experiment Name: At_14day_Shoots-Roots_Sub_P Parameter: Plant Line Value: WS
  misc_feature: MA Experiment 20000315 PARAMETER Experiment Name: At_14day_Shoots-Roots_Sub_P Parameter: Tissue Value: Shoots vs. Whole Plant
  misc_feature: MA Experiment ID: 20000328 Result: Down-regulated in Transcription
  misc_feature: MA Experiment 20000328 PARAMETER Experiment Name: At_42deg_Heat_Sub_P Parameter: Age (day) Value: 14
  misc_feature: MA Experiment 20000328 PARAMETER Experiment Name: At_42deg_Heat_Sub_P Parameter: Organism Value: A. thaliana
  misc_feature: MA Experiment 20000328 PARAMETER Experiment Name: At_42deg_Heat_Sub_P Parameter: Plant Line Value: WS
  misc_feature: MA Experiment 20000328 PARAMETER Experiment Name: At_42deg_Heat_Sub_P Parameter: Temperature (deg C) Value: 42 vs. 22
  misc_feature: MA Experiment 20000328 PARAMETER Experiment Name: At_42deg_Heat_Sub_P Parameter: Timepoint (hr) Value: 6
  misc_feature: MA Experiment 20000328 PARAMETER Experiment Name: At_42deg_Heat_Sub_P Parameter: Tissue Value: Aerial
atggctttcacaaaaatctccttagtccttcttctctgcctcttaggtttcttttctgaaactgtcaagtctcaaaactgcggttgcgctccaaacctctgttgcagtcagttcggttactgtggtaccgacgatgcatactgcggtgttggatgccgatcaggtccttgtagaggtagtggaaccccgaccggagggtcggtcggtagcattgtgacacaaggtttctttaacaatattatcaaccaagctggtaatggttgcgcggggaaaagattctacacccgtgactctttcgttaacgccgctaatactttccccaactttgccaattctgttaccagacgtgaaattgctaccatgtttgctcatttcactcacgagaccggacatttctgctacatagaagagattaacggagcaacacgtaactactgccagagcagcaacacacaatacccatgtgcaccgggaaaaggctacttcggtcgtggtccgatccaactatcatggaactacaactacggagcgtgtggtcaaagtctcggtcttgaccttctacgccagcccgaacttgtgggtagcaacccaactgtagctttcaggacgggtttgtggttttggatgaatagcgtaaggccggttctgaaccaagggtttggagccaccattagagctattaatggaatggaatgtaacggtggtaattccggtgcagtcaacgcaaggattggatactatagagactattgtggacagcttggtgtggaccctggtcctaaccttagttgctaa

SEQ ID NO: 89430 - protein, 264 aa, Arabidopsis thaliana
  peptide (1)..(264): Ceres Seq. ID no. 12718587
  misc_feature (71)..(264): Pfam Name: Chitinase class I Pfam Description: Chitinase class I
  misc_feature (1)..(264): Homolog of NCBI NO: 15224312 NR Description: glycosyl hydrolase family 19 (chitinase); protein At2g43590.1 [Arabidopsis thaliana] >gi|25289343|pir||A84868
  misc_feature (1)..(264): Homolog of NCBI NO: 584929 NR Description: Basic endochitinase CHB4 precursor
  misc_feature (1)..(264): Homolog of NCBI NO: 15224310 NR Description: glycosyl hydrolase family 19 (chitinase); protein At2g43580.1 [Arabidopsis thaliana] >gi|25289342|pir||H84867
  misc_feature (22)..(264): Homolog of NCBI NO: 33414046 NR Description: class IV chitinase [Galega orientalis]
  misc_feature (9)..(264): Homolog of NCBI NO: 33329392 NR Description: class IV chitinase [Vitis vinifera]
  misc_feature (9)..(264): Homolog of NCBI NO: 2306813 NR Description: class IV endochitinase [Vitis vinifera]
  misc_feature (6)..(264): Homolog of NCBI NO: 15232509 NR Description: glycosyl hydrolase family 19 (class IV protein id: At3g54420.1 [Arabidopsis thaliana]
  misc_feature (9)..(264): Homolog of NCBI NO: 2306811 NR Description: class IV endochitinase [Vitis vinifera]
  misc_feature (8)..(264): Homolog of NCBI NO: 15213852 NR Description: chitinase-B [Sorghum halepense]
  misc_feature (6)..(264): Homolog of NCBI NO: 2597826 NR Description: class IV chitinase [Arabidopsis thaliana]
MAFTKISLVLLLCLLGFFSETVKSQNCGCAPNLCCSQFGYCGTDDAYCGVGCRSGPCRGSGTPTGGSVGSIVTQGFFNNIINQAGNGCAGKRFYTRDSFVNAANTFPNFANSVTRREIATMFAHFTHETGHFCYIEEINGATRNYCQSSNTQYPCAPGKGYFGRGPIQLSWNYNYGACGQSLGLDLLRQPELVGSNPTVAFRTGLWFWMNSVRPVLNQGFGATIRAINGMECNGGNSGAVNARIGYYRDYCGQLGVDPGPNLSC

SEQ ID NO: 89431 - protein, 144 aa, Arabidopsis thaliana
  peptide (1)..(144): Ceres Seq. ID no. 12718588
  misc_feature (1)..(144): Pfam Name: Chitinase class I Pfam Description: Chitinase class I
  misc_feature (1)..(144): Homolog of NCBI NO: 15224312 NR Description: glycosyl hydrolase family 19 (chitinase); protein At2g43590.1 [Arabidopsis thaliana] >gi|25289343|pir||A84868
  misc_feature (1)..(144): Homolog of NCBI NO: 584929 NR Description: Basic endochitinase CHB4 precursor
  misc_feature (1)..(144): Homolog of NCBI NO: 15224310 NR Description: glycosyl hydrolase family 19 (chitinase); protein At2g43580.1 [Arabidopsis thaliana] >gi|25289342|pir||H84867
  misc_feature (1)..(144): Homolog of NCBI NO: 33414046 NR Description: class IV chitinase [Galega orientalis]
  misc_feature (1)..(144): Homolog of NCBI NO: 33329392 NR Description: class IV chitinase [Vitis vinifera]
  misc_feature (1)..(144): Homolog of NCBI NO: 2306813 NR Description: class IV endochitinase [Vitis vinifera]
  misc_feature (1)..(144): Homolog of NCBI NO: 15232509 NR Description: glycosyl hydrolase family 19 (class IV protein id: At3g54420.1 [Arabidopsis thaliana]
  misc_feature (1)..(144): Homolog of NCBI NO: 2306811 NR Description: class IV endochitinase [Vitis vinifera]
  misc_feature (1)..(144): Homolog of NCBI NO: 15213852 NR Description: chitinase-B [Sorghum halepense]
  misc_feature (1)..(144): Homolog of NCBI NO: 2597826 NR Description: class IV chitinase [Arabidopsis thaliana]
MFAHFTHETGHFCYIEEINGATRNYCQSSNTQYPCAPGKGYFGRGPIQLSWNYNYGACGQSLGLDLLRQPELVGSNPTVAFRTGLWFWMNSVRPVLNQGFGATIRAINGMECNGGNSGAVNARIGYYRDYCGQLGVDPGPNLSC

SEQ ID NO: 89432 - DNA, 822 bp, Arabidopsis thaliana
  misc_feature (1)..(822): Ceres Seq. ID no. 12718589
  misc_feature: MA Experiment ID: 20000307 Result: Up-regulated in Transcription
  misc_feature: MA Experiment 20000307 PARAMETER Experiment Name: At_Germinating_Seeds_Sub_P Parameter: Age (hr) Value: 24 vs. 0
  misc_feature: MA Experiment 20000307 PARAMETER Experiment Name: At_Germinating_Seeds_Sub_P Parameter: Organism Value: A. thaliana
  misc_feature: MA Experiment 20000307 PARAMETER Experiment Name: At_Germinating_Seeds_Sub_P Parameter: Plant Line Value: WS
  misc_feature: MA Experiment 20000307 PARAMETER Experiment Name: At_Germinating_Seeds_Sub_P Parameter: Tissue Value: Germinating Seeds
atgaccatcaaaaacgtcattttttccctcttcattctagcaattttggccgagaccgtgttctcgcagaactgcatggatactagttgccctggccttaaggaatgttgcagcagatggggtttctgtggcaccaaagatgaatactgcggatttttttgtttcagtggcccttgcaatatcaagggaaaatcatacggatacgactacaacgttgatgccggtccacgtggtaaaatagaaaccgttatcacatcagcgttgttcgatagcatcatgagcaaagtcgaaagcaactgctcggcaaaaggattctacacttatgaggctttcattactgctttcaaatcttttggagcttacaaaggaaaggtggctaaacgtgagatcgctgctatattggctcatttctcatacggatctaaaagtttttgttacaaagaagaaatatcgaacgagagatattgttcaaagagcaagaagtacccttgtgaaccggggaaaaactactatggtcgtggtttgctacaatcaatcacatggaacgagtattacggtgccggcaagcacctcgggctacctctactgaaggatccagatctggtgtctcgtagtccagaagttgctttcaaattcgcaatgtggttctggaatagaaacgtgcgtcccgctttgtacttaggatttggagaaatcacaaagagagttgatggccgtgaatgtggtaactggcgtcgcgatgatacgaagaacaaagttaagcaatacatagagttctgcgagatgcttggagtaactcctgatcaaggtctcgattgttaa

SEQ ID NO: 89433 - protein, 273 aa, Arabidopsis thaliana
  peptide (1)..(273): Ceres Seq. ID no. 12718590
  misc_feature (83)..(273): Pfam Name: Chitinase class I Pfam Description: Chitinase class I
  misc_feature (1)..(273): Homolog of NCBI NO: 15224314 NR Description: glycosyl hydrolase family 19 (chitinase); protein At2g43600.1 [Arabidopsis thaliana] >gi|25289344|pir||B84868
  misc_feature (4)..(273): Homolog of NCBI NO: 15223591 NR Description: glycosyl hydrolase family 19 (chitinase); protein At1g56680.1 [Arabidopsis thaliana] >gi|25289340|pir||F96608
  misc_feature (4)..(273): Homolog of NCBI NO: 15224319 NR Description: glycosyl hydrolase family 19 (chitinase); protein At2g43610.1, supported by cDNA: gi_18252844 [Arabidopsis
  misc_feature (3)..(273): Homolog of NCBI NO: 15224321 NR Description: glycosyl hydrolase family 19 (chitinase); protein At2g43620.1 [Arabidopsis thaliana] >gi|25289346|pir||D84868
  misc_feature (1)..(273): Homolog of NCBI NO: 584929 NR Description: Basic endochitinase CHB4 precursor
  misc_feature (5)..(273): Homolog of NCBI NO: 15224312 NR Description: glycosyl hydrolase family 19 (chitinase); protein At2g43590.1 [Arabidopsis thaliana] >gi|25289343|pir||A84868
  misc_feature (6)..(273): Homolog of NCBI NO: 15224310 NR Description: glycosyl hydrolase family 19 (chitinase); protein At2g43580.1 [Arabidopsis thaliana] >gi|25289342|pir||H84867
  misc_feature (2)..(273): Homolog of NCBI NO: 38345417 NR Description: OSJNBb0091E11.8 [Oryza sativa (japonica
  misc_feature (2)..(273): Homolog of NCBI NO: 2570160 NR Description: chitinase [Chenopodium amaranticolor]
  misc_feature (7)..(273): Homolog of NCBI NO: 2570162 NR Description: chitinase [Chenopodium amaranticolor]
MTIKNVIFSLFILAILAETVFSQNCMDTSCPGLKECCSRWGFCGTKDEYCGFFCFSGPCNIKGKSYGYDYNVDAGPRGKIETVITSALFDSIMSKVESNCSAKGFYTYEAFITAFKSFGAYKGKVAKREIAAILAHFSYGSKSFCYKEEISNERYCSKSKKYPCEPGKNYYGRGLLQSITWNEYYGAGKHLGLPLLKDPDLVSRSPEVAFKFAMWFWNRNVRPALYLGFGEITKRVDGRECGNWRRDDTKNKVKQYIEFCEMLGVTPDQGLDC

SEQ ID NO: 89434 - protein, 248 aa, Arabidopsis thaliana
  peptide (1)..(248): Ceres Seq. ID no. 12718591
  misc_feature (58)..(248): Pfam Name: Chitinase class I Pfam Description: Chitinase class I
  misc_feature (1)..(248): Homolog of NCBI NO: 15224314 NR Description: glycosyl hydrolase family 19 (chitinase); protein At2g43600.1 [Arabidopsis thaliana] >gi|25289344|pir||B84868
  misc_feature (1)..(248): Homolog of NCBI NO: 15223591 NR Description: glycosyl hydrolase family 19 (chitinase); protein At1g56680.1 [Arabidopsis thaliana] >gi|25289340|pir||F96608
  misc_feature (1)..(248): Homolog of NCBI NO: 15224319 NR Description: glycosyl hydrolase family 19 (chitinase); protein At2g43610.1, supported by cDNA: gi_18252844 [Arabidopsis
  misc_feature (1)..(248): Homolog of NCBI NO: 15224321 NR Description: glycosyl hydrolase family 19 (chitinase); protein At2g43620.1 [Arabidopsis thaliana] >gi|25289346|pir||D84868
  misc_feature (1)..(248): Homolog of NCBI NO: 584929 NR Description: Basic endochitinase CHB4 precursor
  misc_feature (1)..(248): Homolog of NCBI NO: 15224312 NR Description: glycosyl hydrolase family 19 (chitinase); protein At2g43590.1 [Arabidopsis thaliana] >gi|25289343|pir||A84868
  misc_feature (1)..(248): Homolog of NCBI NO: 15224310 NR Description: glycosyl hydrolase family 19 (chitinase); protein At2g43580.1 [Arabidopsis thaliana] >gi|25289342|pir||H84867
  misc_feature (1)..(248): Homolog of NCBI NO: 38345417 NR Description: OSJNBb0091E11.8 [Oryza sativa (japonica
  misc_feature (1)..(248): Homolog of NCBI NO: 2570160 NR Description: chitinase [Chenopodium amaranticolor]
  misc_feature (1)..(248): Homolog of NCBI NO: 2570162 NR Description: chitinase [Chenopodium amaranticolor]
MDTSCPGLKECCSRWGFCGTKDEYCGFFCFSGPCNIKGKSYGYDYNVDAGPRGKIETVITSALFDSIMSKVESNCSAKGFYTYEAFITAFKSFGAYKGKVAKREIAAILAHFSYGSKSFCYKEEISNERYCSKSKKYPCEPGKNYYGRGLLQSITWNEYYGAGKHLGLPLLKDPDLVSRSPEVAFKFAMWFWNRNVRPALYLGFGEITKRVDGRECGNWRRDDTKNKVKQYIEFCEMLGVTPDQGLDC

SEQ ID NO: 89435 - protein, 181 aa, Arabidopsis thaliana
  peptide (1)..(181): Ceres Seq. ID no. 12718592
  misc_feature (1)..(181): Pfam Name: Chitinase class I Pfam Description: Chitinase class I
  misc_feature (1)..(181): Homolog of NCBI NO: 15224314 NR Description: glycosyl hydrolase family 19 (chitinase); protein At2g43600.1 [Arabidopsis thaliana] >gi|25289344|pir||B84868
  misc_feature (1)..(181): Homolog of NCBI NO: 15223591 NR Description: glycosyl hydrolase family 19 (chitinase); protein At1g56680.1 [Arabidopsis thaliana] >gi|25289340|pir||F96608
  misc_feature (1)..(181): Homolog of NCBI NO: 15224319 NR Description: glycosyl hydrolase family 19 (chitinase); protein At2g43610.1, supported by cDNA: gi_18252844 [Arabidopsis
  misc_feature (1)..(181): Homolog of NCBI NO: 15224321 NR Description: glycosyl hydrolase family 19 (chitinase); protein At2g43620.1 [Arabidopsis thaliana] >gi|25289346|pir||D84868
  misc_feature (1)..(181): Homolog of NCBI NO: 584929 NR Description: Basic endochitinase CHB4 precursor
  misc_feature (1)..(181): Homolog of NCBI NO: 15224312 NR Description: glycosyl hydrolase family 19 (chitinase); protein At2g43590.1 [Arabidopsis thaliana] >gi|25289343|pir||A84868
  misc_feature (1)..(181): Homolog of NCBI NO: 15224310 NR Description: glycosyl hydrolase family 19 (chitinase); protein At2g43580.1 [Arabidopsis thaliana] >gi|25289342|pir||H84867
  misc_feature (1)..(181): Homolog of NCBI NO: 38345417 NR Description: OSJNBb0091E11.8 [Oryza sativa (japonica
  misc_feature (1)..(181): Homolog of NCBI NO: 2570160 NR Description: chitinase [Chenopodium amaranticolor]
  misc_feature (1)..(181): Homolog of NCBI NO: 2570162 NR Description: chitinase [Chenopodium amaranticolor]
MSKVESNCSAKGFYTYEAFITAFKSFGAYKGKVAKREIAAILAHFSYGSKSFCYKEEISNERYCSKSKKYPCEPGKNYYGRGLLQSITWNEYYGAGKHLGLPLLKDPDLVSRSPEVAFKFAMWFWNRNVRPALYLGFGEITKRVDGRECGNWRRDDTKNKVKQYIEFCEMLGVTPDQGLDC

SEQ ID NO: 89436 - DNA, 852 bp, Arabidopsis thaliana
  misc_feature (1)..(852): Ceres Seq. ID no. 12718593
  misc_feature: MA Experiment ID: 20000314 Result: Up-regulated in Transcription
  misc_feature: MA Experiment 20000314 PARAMETER Experiment Name: At_14day_Shoots-Roots_Sub_P Parameter: Age (day) Value: 14
  misc_feature: MA Experiment 20000314 PARAMETER Experiment Name: At_14day_Shoots-Roots_Sub_P Parameter: Organism Value: A. thaliana
  misc_feature: MA Experiment 20000314 PARAMETER Experiment Name: At_14day_Shoots-Roots_Sub_P Parameter: Plant Line Value: WS
  misc_feature: MA Experiment 20000314 PARAMETER Experiment Name: At_14day_Shoots-Roots_Sub_P Parameter: Tissue Value: Roots vs. Whole Plant
  misc_feature: MA Experiment ID: 20000347 Result: Up-regulated in Transcription
  misc_feature: MA Experiment 20000347 PARAMETER Experiment Name: At_2mM_SA_Sub_P Parameter: Age (day) Value: 14
  misc_feature: MA Experiment 20000347 PARAMETER Experiment Name: At_2mM_SA_Sub_P Parameter: Organism Value: A. thaliana
  misc_feature: MA Experiment 20000347 PARAMETER Experiment Name: At_2mM_SA_Sub_P Parameter: Plant Line Value: WS
  misc_feature: MA Experiment 20000347 PARAMETER Experiment Name: At_2mM_SA_Sub_P Parameter: Timepoint (hr) Value: 6
  misc_feature: MA Experiment 20000347 PARAMETER Experiment Name: At_2mM_SA_Sub_P Parameter: Tissue Value: Aerial
  misc_feature: MA Experiment 20000347 PARAMETER Experiment Name: At_2mM_SA_Sub_P Parameter: Treatment Value: 2mM SA vs. No Treatment
  misc_feature: MA Experiment ID: 20000348 Result: Up-regulated in Transcription
  misc_feature: MA Experiment 20000348 PARAMETER Experiment Name: At_100uM_ABA_Sub_P Parameter: Age (day) Value: 14
  misc_feature: MA Experiment 20000348 PARAMETER Experiment Name: At_100uM_ABA_Sub_P Parameter: Organism Value: A. thaliana
  misc_feature: MA Experiment 20000348 PARAMETER Experiment Name: At_100uM_ABA_Sub_P Parameter: Plant Line Value: WS
  misc_feature: MA Experiment 20000348 PARAMETER Experiment Name: At_100uM_ABA_Sub_P Parameter: Timepoint (hr) Value: 1
  misc_feature: MA Experiment 20000348 PARAMETER Experiment Name: At_100uM_ABA_Sub_P Parameter: Tissue Value: Aerial
  misc_feature: MA Experiment 20000348 PARAMETER Experiment Name: At_100uM_ABA_Sub_P Parameter: Treatment Value: 100uM ABA vs. No Treatment
  misc_feature: MA Experiment ID: 20000355 Result: Up-regulated in Transcription
  misc_feature: MA Experiment 20000355 PARAMETER Experiment Name: At_Siliques_Sub_P Parameter: Age (day) Value: 21
  misc_feature: MA Experiment 20000355 PARAMETER Experiment Name: At_Siliques_Sub_P Parameter: Organism Value: A. thaliana
  misc_feature: MA Experiment 20000355 PARAMETER Experiment Name: At_Siliques_Sub_P Parameter: Plant Line Value: WS
  misc_feature: MA Experiment 20000355 PARAMETER Experiment Name: At_Siliques_Sub_P Parameter: Tissue Value: Less Than 5mm Siliques vs. Whole Plant
atggctaccctaagagcaatgttgaaaaacgctttcatcctttttctcttcaccttaaccatcatggcaaaaaccgtgttttcgcaacagtgcggtacaaccggatgtgcagccaacttatgttgcagtagatatggatattgtggcaccacagatgcctactgtggtaccgggtgccgaagtggaccttgcagctcctcaaccacacctatcccaccaactcctagcggtggtgcaggcggtctaaacgctgatcctcgtgatacaattgaaaatgttgtcacaccagcattttttgatggtatcatgagcaaagtcggaaatggctgtccagcgaaagggttctacactcgccaggctttcattgcggctgcccaatcgttcgacgcctataaaggaaccgtcgctaagcgtgagattgccgctatgttggctcagttttctcatgaatctggaagtttttgctacaaagaagaaatagctagagggaaatactgctcaccgagcactgcgtacccttgtacaccgggaaaagactactacggccgcggtccaatccaaatcacatggaactacaattacggtgcagctggaaagttcctcggactccctctcttgactgatccagacatggtggctcgtagcccccaagttgcctttcagtgtgccatgtggttctggaacctaaatgttcgtccagtcttggaccaaggctttggagccaccactaggaagatcaatggtggtgaatgcaacggtaggcgtcctgcagccgtgcagagcagagtaaactattacttggagttctgcaggacgcttgggatcactcctggagcaaatcttagttgctaa

SEQ ID NO: 89437 - protein, 283 aa, Arabidopsis thaliana
  peptide (1)..(283): Ceres Seq. ID no. 12718594
  misc_feature (93)..(283): Pfam Name: Chitinase class I Pfam Description: Chitinase class I
  misc_feature (1)..(283): Homolog of NCBI NO: 15224321 NR Description: glycosyl hydrolase family 19 (chitinase); protein At2g43620.1 [Arabidopsis thaliana] >gi|25289346|pir||D84868
  misc_feature (1)..(283): Homolog of NCBI NO: 15224319 NR Description: glycosyl hydrolase family 19 (chitinase); protein At2g43610.1, supported by cDNA: gi_18252844 [Arabidopsis
  misc_feature (1)..(283): Homolog of NCBI NO: 15223591 NR Description: glycosyl hydrolase family 19 (chitinase); protein At1g56680.1 [Arabidopsis thaliana] >gi|25289340|pir||F96608
  misc_feature (8)..(283): Homolog of NCBI NO: 15224314 NR Description: glycosyl hydrolase family 19 (chitinase); protein At2g43600.1 [Arabidopsis thaliana] >gi|25289344|pir||B84868
  misc_feature (6)..(283): Homolog of NCBI NO: 584929 NR Description: Basic endochitinase CHB4 precursor
  misc_feature (6)..(283): Homolog of NCBI NO: 15224312 NR Description: glycosyl hydrolase family 19 (chitinase); protein At2g43590.1 [Arabidopsis thaliana] >gi|25289343|pir||A84868
  misc_feature (8)..(283): Homolog of NCBI NO: 2570160 NR Description: chitinase [Chenopodium amaranticolor]
  misc_feature (16)..(283): Homolog of NCBI NO: 2570162 NR Description: chitinase [Chenopodium amaranticolor]
  misc_feature (8)..(283): Homolog of NCBI NO: 2570166 NR Description: chitinase [Chenopodium amaranticolor]
  misc_feature (11)..(283): Homolog of NCBI NO: 38345417 NR Description: OSJNBb0091E11.8 [Oryza sativa (japonica
MATLRAMLKNAFILFLFTLTIMAKTVFSQQCGTTGCAANLCCSRYGYCGTTDAYCGTGCRSGPCSSSTTPIPPTPSGGAGGLNADPRDTIENVVTPAFFDGIMSKVGNGCPAKGFYTRQAFIAAAQSFDAYKGTVAKREIAAMLAQFSHESGSFCYKEEIARGKYCSPSTAYPCTPGKDYYGRGPIQITWNYNYGAAGKFLGLPLLTDPDMVARSPQVAFQCAMWFWNLNVRPVLDQGFGATTRKINGGECNGRRPAAVQSRVNYYLEFCRTLGITPGANLSC

SEQ ID NO: 89438 - protein, 277 aa, Arabidopsis thaliana
  peptide (1)..(277): Ceres Seq. ID no. 12718595
  misc_feature (87)..(277): Pfam Name: Chitinase class I Pfam Description: Chitinase class I
  misc_feature (1)..(277): Homolog of NCBI NO: 15224321 NR Description: glycosyl hydrolase family 19 (chitinase); protein At2g43620.1 [Arabidopsis thaliana] >gi|25289346|pir||D84868
  misc_feature (1)..(277): Homolog of NCBI NO: 15224319 NR Description: glycosyl hydrolase family 19 (chitinase); protein At2g43610.1, supported by cDNA: gi_18252844 [Arabidopsis
  misc_feature (1)..(277): Homolog of NCBI NO: 15223591 NR Description: glycosyl hydrolase family 19 (chitinase); protein At1g56680.1 [Arabidopsis thaliana] >gi|25289340|pir||F96608
  misc_feature (2)..(277): Homolog of NCBI NO: 15224314 NR Description: glycosyl hydrolase family 19 (chitinase); protein At2g43600.1 [Arabidopsis thaliana] >gi|25289344|pir||B84868
  misc_feature (1)..(277): Homolog of NCBI NO: 584929 NR Description: Basic endochitinase CHB4 precursor
  misc_feature (1)..(277): Homolog of NCBI NO: 15224312 NR Description: glycosyl hydrolase family 19 (chitinase); protein At2g43590.1 [Arabidopsis thaliana] >gi|25289343|pir||A84868
  misc_feature (2)..(277): Homolog of NCBI NO: 2570160 NR Description: chitinase [Chenopodium amaranticolor]
  misc_feature (10)..(277): Homolog of NCBI NO: 2570162 NR Description: chitinase [Chenopodium amaranticolor]
  misc_feature (2)..(277): Homolog of NCBI NO: 2570166 NR Description: chitinase [Chenopodium amaranticolor]
  misc_feature (5)..(277): Homolog of NCBI NO: 38345417 NR Description: OSJNBb0091E11.8 [Oryza sativa (japonica
MLKNAFILFLFTLTIMAKTVFSQQCGTTGCAANLCCSRYGYCGTTDAYCGTGCRSGPCSSSTTPIPPTPSGGAGGLNADPRDTIENVVTPAFFDGIMSKVGNGCPAKGFYTRQAFIAAAQSFDAYKGTVAKREIAAMLAQFSHESGSFCYKEEIARGKYCSPSTAYPCTPGKDYYGRGPIQITWNYNYGAAGKFLGLPLLTDPDMVARSPQVAFQCAMWFWNLNVRPVLDQGFGATTRKINGGECNGRRPAAVQSRVNYYLEFCRTLGITPGANLSC

SEQ ID NO: 89439 - protein, 262 aa, Arabidopsis thaliana
  peptide (1)..(262): Ceres Seq. ID no. 12718596
  misc_feature (72)..(262): Pfam Name: Chitinase class I Pfam Description: Chitinase class I
  misc_feature (1)..(262): Homolog of NCBI NO: 15224321 NR Description: glycosyl hydrolase family 19 (chitinase); protein At2g43620.1 [Arabidopsis thaliana] >gi|25289346|pir||D84868
  misc_feature (1)..(262): Homolog of NCBI NO: 15224319 NR Description: glycosyl hydrolase family 19 (chitinase); protein At2g43610.1, supported by cDNA: gi_18252844 [Arabidopsis
  misc_feature (1)..(262): Homolog of NCBI NO: 15223591 NR Description: glycosyl hydrolase family 19 (chitinase); protein At1g56680.1 [Arabidopsis thaliana] >gi|25289340|pir||F96608
  misc_feature (1)..(262): Homolog of NCBI NO: 15224314 NR Description: glycosyl hydrolase family 19 (chitinase); protein At2g43600.1 [Arabidopsis thaliana] >gi|25289344|pir||B84868
  misc_feature (1)..(262): Homolog of NCBI NO: 584929 NR Description: Basic endochitinase CHB4 precursor
  misc_feature (1)..(262): Homolog of NCBI NO: 15224312 NR Description: glycosyl hydrolase family 19 (chitinase); protein At2g43590.1 [Arabidopsis thaliana] >gi|25289343|pir||A84868
  misc_feature (1)..(262): Homolog of NCBI NO: 2570160 NR Description: chitinase [Chenopodium amaranticolor]
  misc_feature (1)..(262): Homolog of NCBI NO: 2570162 NR Description: chitinase [Chenopodium amaranticolor]
  misc_feature (1)..(262): Homolog of NCBI NO: 2570166 NR Description: chitinase [Chenopodium amaranticolor]
  misc_feature (1)..(262): Homolog of NCBI NO: 38345417 NR Description: OSJNBb0091E11.8 [Oryza sativa (japonica
MAKTVFSQQCGTTGCAANLCCSRYGYCGTTDAYCGTGCRSGPCSSSTTPIPPTPSGGAGGLNADPRDTIENVVTPAFFDGIMSKVGNGCPAKGFYTRQAFIAAAQSFDAYKGTVAKREIAAMLAQFSHESGSFCYKEEIARGKYCSPSTAYPCTPGKDYYGRGPIQITWNYNYGAAGKFLGLPLLTDPDMVARSPQVAFQCAMWFWNLNVRPVLDQGFGATTRKINGGECNGRRPAAVQSRVNYYLEFCRTLGITPGANLSC

SEQ ID NO: 89440 - DNA, 2046 bp, Arabidopsis thaliana
  misc_feature (1)..(2046): Ceres Seq. ID no. 12718604
  misc_feature: MA Experiment ID: 20000171 Result: Up-regulated in Transcription
  misc_feature: MA Experiment 20000171 PARAMETER Experiment Name: At_42deg_Heat_P Parameter: Age (day) Value: 14
  misc_feature: MA Experiment 20000171 PARAMETER Experiment Name: At_42deg_Heat_P Parameter: Organism Value: A. thaliana
  misc_feature: MA Experiment 20000171 PARAMETER Experiment Name: At_42deg_Heat_P Parameter: Plant Line Value: WS
  misc_feature: MA Experiment 20000171 PARAMETER Experiment Name: At_42deg_Heat_P Parameter: Temperature (deg C) Value: 42 vs. 22
  misc_feature: MA Experiment 20000171 PARAMETER Experiment Name: At_42deg_Heat_P Parameter: Timepoint (hr) Value: 1
  misc_feature: MA Experiment 20000171 PARAMETER Experiment Name: At_42deg_Heat_P Parameter: Tissue Value: Aerial
  misc_feature: MA Experiment ID: 20000227 Result: Down-regulated in Transcription
  misc_feature: MA Experiment 20000227 PARAMETER Experiment Name: At_Root-Tips-vs-Tops_P Parameter: Tissue Value: Root Tips vs. Root Tops
gctcttagtttctaaaaccgtcgatcaaaaatcatgtctcgtacaatcggctcacgggtcattttcttgatccttgctctcttctgttgtactgaaaactcccgtggcaaactggttatgcagggatccgctggattttttaaaggttacaggacgttgacgagcaccaagaagcacgcatatggtcaagccttcgaggacgagatagtccctttcaagaattcggccaacgatacagttacttctttctctgtcacgttcttctttgctatcgcccctgaggataagcacaaaggcgctcatggtatggccttcgtgatctctcccacaagaggcattactggtgcctccgctgatcagtaccttggaatctttaacaaagcaaacaacggggatagctcaaatcatgtcatcgctgtggagctcgatataaataaagatgaggaatttggcgacattaacgataaccatgttggtatcaacataaacggaatgaggtctatcaaatttgctcctgctggttattatgatcaagaaggtcaatttaaagatctttctttgataagtggaagtctactccgagtcacgattttgtatagccagatggaaaaacagcttaatgtcaccttatcatcaccagaggaggcttattacccgaacaagcctcttctttcattgaaccaagatctatcaccctatattttggagaacatgtatgtgggcttctcagcctcaacggggtctgttagagcaatgcattacatgttgagttggtttgtacatggcggcgttgatgttccaaacctggacttgggaataccaacatttcctccatatcccaaggaaaaatctctggtttatcggattgttttggtgaccagcttggcattggttctctttgttgcgcttgttgcatcagctttaagtatctttttctacaggagacataaaaaggttaaagaggttctagaggaatgggagatccaatgtgggcctcataggtttgcttacaaagaactctttaaagccacaaaaggtttcaaacaacttctaggcaaaggagggtttggtcaggtctttaagggtacacttccaggttctgatgcagagattgccgttaaacgaatttcacatgattcaaaacaaggaatgcaggaattcttggctgagatatcgacaattggtcggcttagacaccagaacctagtcaggcttcagggttattgtaggtacaaggaggaactctacttggtttatgactttatgcccaatggaagtcttgacaagtacctctaccacagagcgaatcaagagcaactcacttggaatcaacgtttcaagatcatcaaagacatagcctctgcactctgctatttgcatcatgaatgggtacaagttgtaattcatcgagacatcaagccggcaaatgtcctgattgaccaccaaatgaatgcaaggctcggggattttgggttggctaagttgtacgatcagggttatgatcctcagacatctagagttgctgggacattctggtacattgcaccggagctcataagaagcggaagagcaaccacagggacagacgtctatgccttcgggctgtttatgctagaagtctcttgcggtaggaggctgatagagcgaagaacagcctccgacgaggtcgtcctagctgaatggacattaaagtgctgggaaaacggagatattctcgaggcagtcaatgatggaatccgtcacgaagacaatagagaacagctcgagcttgttttgaaattgggagtgttgtgttcgcaccaggctgtagcaattaggccagacatgtctaaggtggtccagatcttgggtggtgatctgcagcttccagataatctactcgatatagtcaaagcagagaaggtcagaatgtggtctgagacatctgagagtgtacttggtgttttgacatcacaagggtccattggtaccttgacgttaacggaaccttttacctcccggggacgctgagacgtgatgctgagttcggtcgtgaaatgatatatg

SEQ ID NO: 89441 - protein, 658 aa, Arabidopsis thaliana
  peptide (1)..(658): Ceres Seq. ID no. 12718605
  misc_feature (1)..(658): Homolog of NCBI NO: 15224334 NR Description: putative receptor protein kinase; protein id: [Arabidopsis thaliana] >gi|25387039|pir||C84869 probable receptor
  misc_feature (9)..(658): Homolog of NCBI NO: 15231734 NR Description: serine/threonine-specific kinase lecRK1
  misc_feature (1)..(658): Homolog of NCBI NO: 15231745 NR Description: receptor lectin kinase 3; protein id: At3g59740.1
  misc_feature (1)..(658): Homolog of NCBI NO: 4100060 NR Description: receptor lectin kinase 3 [Arabidopsis thaliana]
  misc_feature (1)..(625): Homolog of NCBI NO: 11346429 NR Description: receptor lectin kinase 3 - Arabidopsis thaliana >gi|7019668|emb|CAB75793.1| receptor lectin kinase 3 [Arabidopsis
  misc_feature (134)..(658): Homolog of NCBI NO: 15231747 NR Description: receptor lectin kinase-like protein; protein id:
  misc_feature (9)..(149): Homolog of NCBI NO: 15231747 NR Description: receptor lectin kinase-like protein; protein id:
  misc_feature (92)..(658): Homolog of NCBI NO: 11346416 NR Description: receptor lectin kinase 3 - Arabidopsis thaliana
  misc_feature (14)..(513): Homolog of NCBI NO: 15231743 NR Description: receptor lectin kinase-like protein (fragment); id: At3g59730.1 [Arabidopsis thaliana] >gi|11358748|pir||T49314
  misc_feature (37)..(658): Homolog of NCBI NO: 15235547 NR Description: serine threonine-specific kinase like protein;
MSRTIGSRVIFLILALFCCTENSRGKLVMQGSAGFFKGYRTLTSTKKHAYGQAFEDEIVPFKNSANDTVTSFSVTFFFAIAPEDKHKGAHGMAFVISPTRGITGASADQYLGIFNKANNGDSSNHVIAVELDINKDEEFGDINDNHVGININGMRSIKFAPAGYYDQEGQFKDLSLISGSLLRVTILYSQMEKQLNVTLSSPEEAYYPNKPLLSLNQDLSPYILENMYVGFSASTGSVRAMHYMLSWFVHGGVDVPNLDLGIPTFPPYPKEKSLVYRIVLVTSLALVLFVALVASALSIFFYRRHKKVKEVLEEWEIQCGPHRFAYKELFKATKGFKQLLGKGGFGQVFKGTLPGSDAEIAVKRISHDSKQGMQEFLAEISTIGRLRHQNLVRLQGYCRYKEELYLVYDFMPNGSLDKYLYHRANQEQLTWNQRFKIIKDIASALCYLHHEWVQVVIHRDIKPANVLIDHQMNARLGDFGLAKLYDQGYDPQTSRVAGTFWYIAPELIRSGRATTGTDVYAFGLFMLEVSCGRRLIERRTASDEVVLAEWTLKCWENGDILEAVNDGIRHEDNREQLELVLKLGVLCSHQAVAIRPDMSKVVQILGGDLQLPDNLLDIVKAEKVRMWSETSESVLGVLTSQGSIGTLTLTEPFTSRGR

SEQ ID NO: 89442 - protein, 630 aa, Arabidopsis thaliana
  peptide (1)..(630): Ceres Seq. ID no. 12718606
  misc_feature (1)..(630): Homolog of NCBI NO: 15224334 NR Description: putative receptor protein kinase; protein id: [Arabidopsis thaliana] >gi|25387039|pir||C84869 probable receptor
  misc_feature (1)..(630): Homolog of NCBI NO: 15231734 NR Description: serine/threonine-specific kinase lecRK1
  misc_feature (1)..(630): Homolog of NCBI NO: 15231745 NR Description: receptor lectin kinase 3; protein id: At3g59740.1
  misc_feature (1)..(630): Homolog of NCBI NO: 4100060 NR Description: receptor lectin kinase 3 [Arabidopsis thaliana]
  misc_feature (1)..(597): Homolog of NCBI NO: 11346429 NR Description: receptor lectin kinase 3 - Arabidopsis thaliana >gi|7019668|emb|CAB75793.1| receptor lectin kinase 3 [Arabidopsis
  misc_feature (106)..(630): Homolog of NCBI NO: 15231747 NR Description: receptor lectin kinase-like protein; protein id:
  misc_feature (1)..(121): Homolog of NCBI NO: 15231747 NR Description: receptor lectin kinase-like protein; protein id:
  misc_feature (64)..(630): Homolog of NCBI NO: 11346416 NR Description: receptor lectin kinase 3 - Arabidopsis thaliana
  misc_feature (1)..(485): Homolog of NCBI NO: 15231743 NR Description: receptor lectin kinase-like protein (fragment); id: At3g59730.1 [Arabidopsis thaliana] >gi|11358748|pir||T49314
  misc_feature (9)..(630): Homolog of NCBI NO: 15235547 NR Description: serine threonine-specific kinase like protein;
MQGSAGFFKGYRTLTSTKKHAYGQAFEDEIVPFKNSANDTVTSFSVTFFFAIAPEDKHKGAHGMAFVISPTRGITGASADQYLGIFNKANNGDSSNHVIAVELDINKDEEFGDINDNHVGININGMRSIKFAPAGYYDQEGQFKDLSLISGSLLRVTILYSQMEKQLNVTLSSPEEAYYPNKPLLSLNQDLSPYILENMYVGFSASTGSVRAMHYMLSWFVHGGVDVPNLDLGIPTFPPYPKEKSLVYRIVLVTSLALVLFVALVASALSIFFYRRHKKVKEVLEEWEIQCGPHRFAYKELFKATKGFKQLLGKGGFGQVFKGTLPGSDAEIAVKRISHDSKQGMQEFLAEISTIGRLRHQNLVRLQGYCRYKEELYLVYDFMPNGSLDKYLYHRANQEQLTWNQRFKIIKDIASALCYLHHEWVQVVIHRDIKPANVLIDHQMNARLGDFGLAKLYDQGYDPQTSRVAGTFWYIAPELIRSGRATTGTDVYAFGLFMLEVSCGRRLIERRTASDEVVLAEWTLKCWENGDILEAVNDGIRHEDNREQLELVLKLGVLCSHQAVAIRPDMSKVVQILGGDLQLPDNLLDIVKAEKVRMWSETSESVLGVLTSQGSIGTLTLTEPFTSRGR

SEQ ID NO: 89443 - protein, 567 aa, Arabidopsis thaliana
  peptide (1)..(567): Ceres Seq. ID no. 12718607
  misc_feature (1)..(567): Homolog of NCBI NO: 15224334 NR Description: putative receptor protein kinase; protein id: [Arabidopsis thaliana] >gi|25387039|pir||C84869 probable receptor
  misc_feature (1)..(567): Homolog of NCBI NO: 15231734 NR Description: serine/threonine-specific kinase lecRK1
  misc_feature (1)..(567): Homolog of NCBI NO: 15231745 NR Description: receptor lectin kinase 3; protein id: At3g59740.1
  misc_feature (1)..(567): Homolog of NCBI NO: 4100060 NR Description: receptor lectin kinase 3 [Arabidopsis thaliana]
  misc_feature (1)..(534): Homolog of NCBI NO: 11346429 NR Description: receptor lectin kinase 3 - Arabidopsis thaliana >gi|7019668|emb|CAB75793.1| receptor lectin kinase 3 [Arabidopsis
  misc_feature (43)..(567): Homolog of NCBI NO: 15231747 NR Description: receptor lectin kinase-like protein; protein id:
  misc_feature (1)..(58): Homolog of NCBI NO: 15231747 NR Description: receptor lectin kinase-like protein; protein id:
  misc_feature (1)..(567): Homolog of NCBI NO: 11346416 NR Description: receptor lectin kinase 3 - Arabidopsis thaliana
  misc_feature (1)..(422): Homolog of NCBI NO: 15231743 NR Description: receptor lectin kinase-like protein (fragment); id: At3g59730.1 [Arabidopsis thaliana] >gi|11358748|pir||T49314
  misc_feature (1)..(567): Homolog of NCBI NO: 15235547 NR Description: serine threonine-specific kinase like protein;
MAFVISPTRGITGASADQYLGIFNKANNGDSSNHVIAVELDINKDEEFGDINDNHVGININGMRSIKFAPAGYYDQEGQFKDLSLISGSLLRVTILYSQMEKQLNVTLSSPEEAYYPNKPLLSLNQDLSPYILENMYVGFSASTGSVRAMHYMLSWFVHGGVDVPNLDLGIPTFPPYPKEKSLVYRIVLVTSLALVLFVALVASALSIFFYRRHKKVKEVLEEWEIQCGPHRFAYKELFKATKGFKQLLGKGGFGQVFKGTLPGSDAEIAVKRISHDSKQGMQEFLAEISTIGRLRHQNLVRLQGYCRYKEELYLVYDFMPNGSLDKYLYHRANQEQLTWNQRFKIIKDIASALCYLHHEWVQVVIHRDIKPANVLIDHQMNARLGDFGLAKLYDQGYDPQTSRVAGTFWYIAPELIRSGRATTGTDVYAFGLFMLEVSCGRRLIERRTASDEVVLAEWTLKCWENGDILEAVNDGIRHEDNREQLELVLKLGVLCSHQAVAIRPDMSKVVQILGGDLQLPDNLLDIVKAEKVRMWSETSESVLGVLTSQGSIGTLTLTEPFTSRGR

SEQ ID NO: 89444 - DNA, 509 bp, Arabidopsis thaliana
  misc_feature (1)..(509): Ceres Seq. ID no. 12718608
  misc_feature: MA Experiment ID: 20000180 Result: Down-regulated in Transcription
  misc_feature: MA Experiment 20000180 PARAMETER Experiment Name: At_Germinating_Seeds_P Parameter: Age (hr) Value: 24 vs. 0
  misc_feature: MA Experiment 20000180 PARAMETER Experiment Name: At_Germinating_Seeds_P Parameter: Tissue Value: Germinating Seeds
ctaataaatcaactcgccgggaaaaaatggatcaaacggcggaggagaagatggtgagagagaggattagaaagaaagttaacgaagtcagttctgcgtcgcagtctcttctttctccagtacaagaccacatcaatttcacccttcaaaaggcatatttcaaatgtgcatacgagtgctttgataggacaagaacacacgctgagattagtcgatgtgcagagagttgcagtgttcctatcacaaatgcacagaactactttgataatgagatgtcggtgttccaagagaggttgaatagatctcttgtggtttgtcaagacaagtttgaggttgctaagcaacagaagacgagaagtgaagcggtaaatgatttggagcattgtgtaaaccaaactgttgatgaagctgtgaagactctgcctaatctcgtctcaagaatgaagaaagctttgtcaatcacagactgagctctccaacgattataaagagggactcttttctgatac

SEQ ID NO: 89445 - protein, 155 aa, Arabidopsis thaliana
  peptide (1)..(155): Ceres Seq. ID no. 12718609
  misc_feature (21)..(151): Pfam Name: Eukaryotic protein of unknown function (DUF842) Pfam Description: Eukaryotic protein of unknown function (DUF842)
  misc_feature (9)..(155): Homolog of NCBI NO: 15224344 NR Description: hypothetical protein; protein id: At2g43720.1, by cDNA: gi_18491242 [Arabidopsis thaliana]
  misc_feature (13)..(155): Homolog of NCBI NO: 18402744 NR Description: expressed protein; protein id: At2g31725.1, by cDNA: 25159. [Arabidopsis thaliana] expressed protein [Arabidopsis thaliana]
  misc_feature (13)..(155): Homolog of NCBI NO: 15221245 NR Description: hypothetical Protein; protein id: At1g05730.1
  misc_feature (9)..(130): Homolog of NCBI NO: 15221247 NR Description: hypothetical protein; protein id: At1g05740.1
  misc_feature (22)..(152): Homolog of NCBI NO: 20130125 NR Description: CG5323-PA [Drosophila melanogaster]
  misc_feature (29)..(152): Homolog of NCBI NO: 37589716 NR Description: Unknown (protein for MGC:73247) [Danio rerio]
  misc_feature (29)..(152): Homolog of NCBI NO: 13385042 NR Description: RIKEN cDNA 2010309E21 [Mus musculus] unnamed protein product [Mus musculus] unnamed protein product [Mus musculus]
  misc_feature (29)..(152): Homolog of NCBI NO: 15489002 NR Description: Unknown (protein for IMAGE:3493774) [Mus musculus]
  misc_feature (29)..(152): Homolog of NCBI NO: 28482029 NR Description: similar to RIKEN cDNA 2010309E21 [Mus musculus]
  misc_feature (29)..(151): Homolog of NCBI NO: 14249520 NR Description: hypothetical protein FLJ14668 [Homo sapiens]
NKSTRREKMDQTAEEKMVRERIRKKVNEVSSASQSLLSPVQDHINFTLQKAYFKCAYECFDRTRTHAEISRCAESCSVPITNAQNYFDNEMSVFQERLNRSLVVCQDKFEVAKQQKTRSEAVNDLEHCVNQTVDEAVKTLPNLVSRMKKALSITD

SEQ ID NO: 89446 - protein, 147 aa, Arabidopsis thaliana
  peptide (1)..(147): Ceres Seq. ID no. 12718610
  misc_feature (13)..(143): Pfam Name: Eukaryotic protein of unknown function (DUF842) Pfam Description: Eukaryotic protein of unknown function (DUF842)
  misc_feature (1)..(147): Homolog of NCBI NO: 15224344 NR Description: hypothetical protein; protein id: At2g43720.1, by cDNA: gi_18491242 [Arabidopsis thaliana]
  misc_feature (5)..(147): Homolog of NCBI NO: 18402744 NR Description: expressed protein; protein id: At2g31725.1, by cDNA: 25159. [Arabidopsis thaliana] expressed protein [Arabidopsis thaliana]
  misc_feature (5)..(147): Homolog of NCBI NO: 15221245 NR Description: hypothetical Protein; protein id: At1g05730.1
  misc_feature (1)..(122): Homolog of NCBI NO: 15221247 NR Description: hypothetical protein; protein id: At1g05740.1
  misc_feature (14)..(144): Homolog of NCBI NO: 20130125 NR Description: CG5323-PA [Drosophila melanogaster]
  misc_feature (21)..(144): Homolog of NCBI NO: 37589716 NR Description: Unknown (protein for MGC:73247) [Danio rerio]
  misc_feature (21)..(144): Homolog of NCBI NO: 13385042 NR Description: RIKEN cDNA 2010309E21 [Mus musculus] unnamed protein product [Mus musculus] unnamed protein product [Mus musculus]
  misc_feature (21)..(144): Homolog of NCBI NO: 15489002 NR Description: Unknown (protein for IMAGE:3493774) [Mus musculus]
  misc_feature (21)..(144): Homolog of NCBI NO: 28482029 NR Description: similar to RIKEN cDNA 2010309E21 [Mus musculus]
  misc_feature (21)..(143): Homolog of NCBI NO: 14249520 NR Description: hypothetical protein FLJ14668 [Homo sapiens]
MDQTAEEKMVRERIRKKVNEVSSASQSLLSPVQDHINFTLQKAYFKCAYECFDRTRTHAEISRCAESCSVPITNAQNYFDNEMSVFQERLNRSLVVCQDKFEVAKQQKTRSEAVNDLEHCVNQTVDEAVKTLPNLVSRMKKALSITD

SEQ ID NO: 89447 - protein, 139 aa, Arabidopsis thaliana
  peptide (1)..(139): Ceres Seq. ID no. 12718611
  misc_feature (5)..(135): Pfam Name: Eukaryotic protein of unknown function (DUF842) Pfam Description: Eukaryotic protein of unknown function (DUF842)
  misc_feature (1)..(139): Homolog of NCBI NO: 15224344 NR Description: hypothetical protein; protein id: At2g43720.1, by cDNA: gi_18491242 [Arabidopsis thaliana]
  misc_feature (1)..(139): Homolog of NCBI NO: 18402744 NR Description: expressed protein; protein id: At2g31725.1, by cDNA: 25159. [Arabidopsis thaliana] expressed protein [Arabidopsis thaliana]
  misc_feature (1)..(139): Homolog of NCBI NO: 15221245 NR Description: hypothetical Protein; protein id: At1g05730.1
  misc_feature (1)..(114): Homolog of NCBI NO: 15221247 NR Description: hypothetical protein; protein id: At1g05740.1
  misc_feature (6)..(136): Homolog of NCBI NO: 20130125 NR Description: CG5323-PA [Drosophila melanogaster]
  misc_feature (13)..(136): Homolog of NCBI NO: 37589716 NR Description: Unknown (protein for MGC:73247) [Danio rerio]
  misc_feature (13)..(136): Homolog of NCBI NO: 13385042 NR Description: RIKEN cDNA 2010309E21 [Mus musculus] unnamed protein product [Mus musculus] unnamed protein product [Mus musculus]
  misc_feature (13)..(136): Homolog of NCBI NO: 15489002 NR Description: Unknown (protein for IMAGE:3493774) [Mus musculus]
  misc_feature (13)..(136): Homolog of NCBI NO: 28482029 NR Description: similar to RIKEN cDNA 2010309E21 [Mus musculus]
  misc_feature (13)..(135): Homolog of NCBI NO: 14249520 NR Description: hypothetical protein FLJ14668 [Homo sapiens]
MVRERIRKKVNEVSSASQSLLSPVQDHINFTLQKAYFKCAYECFDRTRTHAEISRCAESCSVPITNAQNYFDNEMSVFQERLNRSLVVCQDKFEVAKQQKTRSEAVNDLEHCVNQTVDEAVKTLPNLVSRMKKALSITD

SEQ ID NO: 89448 - DNA, 763 bp, Arabidopsis thaliana
  misc_feature (1)..(763): Ceres Seq. ID no. 12718640
  misc_feature: MA Experiment ID: 108462 Result: Down-regulated in Transcription
  misc_feature: MA Experiment 108462 PARAMETER Experiment Name: At_Germinating_Seeds_cDNA_P Parameter: Age (day) Value: 2 vs. 0
  misc_feature: MA Experiment 108462 PARAMETER Experiment Name: At_Germinating_Seeds_cDNA_P Parameter: Tissue Value: Germinating Seeds
  misc_feature: MA Experiment ID: 108463 Result: Down-regulated in Transcription
  misc_feature: MA Experiment 108463 PARAMETER Experiment Name: At_Germinating_Seeds_cDNA_P Parameter: Age (day) Value: 3 vs. 0
  misc_feature: MA Experiment 108463 PARAMETER Experiment Name: At_Germinating_Seeds_cDNA_P Parameter: Tissue Value: Germinating Seeds
  misc_feature: MA Experiment ID: 108464 Result: Down-regulated in Transcription
  misc_feature: MA Experiment 108464 PARAMETER Experiment Name: At_Germinating_Seeds_cDNA_P Parameter: Age (day) Value: 4 vs. 0
  misc_feature: MA Experiment 108464 PARAMETER Experiment Name: At_Germinating_Seeds_cDNA_P Parameter: Tissue Value: Germinating Seeds
  misc_feature: MA Experiment ID: 20000111 Result: Up-regulated in Transcription
  misc_feature: MA Experiment 20000111 PARAMETER Experiment Name: At_42deg_Heat_cDNA_P Parameter: Temperature (deg C) Value: 42 vs. 22
  misc_feature: MA Experiment 20000111 PARAMETER Experiment Name: At_42deg_Heat_cDNA_P Parameter: Timepoint (hr) Value: 6
  misc_feature: MA Experiment 20000111 PARAMETER Experiment Name: At_42deg_Heat_cDNA_P Parameter: Tissue Value: Aerial
  misc_feature: MA Experiment ID: 20000113 Result: Up-regulated in Transcription
  misc_feature: MA Experiment 20000113 PARAMETER Experiment Name: At_42deg_Heat_cDNA_P Parameter: Temperature (deg C) Value: 42 vs. 22
  misc_feature: MA Experiment 20000113 PARAMETER Experiment Name: At_42deg_Heat_cDNA_P Parameter: Timepoint (hr) Value: 8
  misc_feature: MA Experiment 20000113 PARAMETER Experiment Name: At_42deg_Heat_cDNA_P Parameter: Tissue Value: Aerial
  misc_feature: MA Experiment ID: 20000173 Result: Up-regulated in Transcription
  misc_feature: MA Experiment 20000173 PARAMETER Experiment Name: At_42deg_Heat_P Parameter: Age (day) Value: 14
  misc_feature: MA Experiment 20000173 PARAMETER Experiment Name: At_42deg_Heat_P Parameter: Organism Value: A. thaliana
  misc_feature: MA Experiment 20000173 PARAMETER Experiment Name: At_42deg_Heat_P Parameter: Plant Line Value: WS
  misc_feature: MA Experiment 20000173 PARAMETER Experiment Name: At_42deg_Heat_P Parameter: Temperature (deg C) Value: 42 vs. 22
  misc_feature: MA Experiment 20000173 PARAMETER Experiment Name: At_42deg_Heat_P Parameter: Timepoint (hr) Value: 6
  misc_feature: MA Experiment 20000173 PARAMETER Experiment Name: At_42deg_Heat_P Parameter: Tissue Value: Aerial
  misc_feature: MA Experiment ID: 20000328 Result: Up-regulated in Transcription
  misc_feature: MA Experiment 20000328 PARAMETER Experiment Name: At_42deg_Heat_Sub_P Parameter: Age (day) Value: 14
  misc_feature: MA Experiment 20000328 PARAMETER Experiment Name: At_42deg_Heat_Sub_P Parameter: Organism Value: A. thaliana
  misc_feature: MA Experiment 20000328 PARAMETER Experiment Name: At_42deg_Heat_Sub_P Parameter: Plant Line Value: WS
  misc_feature: MA Experiment 20000328 PARAMETER Experiment Name: At_42deg_Heat_Sub_P Parameter: Temperature (deg C) Value: 42 vs. 22
  misc_feature: MA Experiment 20000328 PARAMETER Experiment Name: At_42deg_Heat_Sub_P Parameter: Timepoint (hr) Value: 6
  misc_feature: MA Experiment 20000328 PARAMETER Experiment Name: At_42deg_Heat_Sub_P Parameter: Tissue Value: Aerial
aatctcgatctcgagaaagaaagaaaaaaagagaaggcatggccgcggaagaagcgacggagttctacctgagatactatgtcggtcacaaagggaaatttggacacgagttcctggagttcgagtttagagaggacggtaagctccgttacgccaataactctaactacaagaacgatactattatccgcaaggaggtatttctcacccccgccgtgctcaaggaatgcaagcgtatcgtctccgagagcgagattctgaaagaagacgataacaattggccggaacctgaccgtgttggaaagcaagagctcgagatcgtcttgggtaatgagcatatctcattcgctacatctaagattggatctcttgttgattgccagagcagtaatgatcctgaaggacttcgcatcttctactatcttgttcaggacttgaaatgtcttgttttttcgctcatctctctgcacttcaaaatcaagcctatctagagaagaaaatcagtttgtgacatgtcaagacgcgatgaatttgttgggaacatgaggactttgtgactgaagtttggttgtttttatgtctctggttctctgttttttttttttgttggatttgggtgaaagtgggtatgtaagatgttctacctcaacttttggtccttttttgtgtcaacatcccatgtgaagaacctttcatgaaccacaacctatcttctaaaaaccatatacttgctgttttcttatcacaaatcattcactctccc

SEQ ID NO: 89449 - protein, 162 aa, Arabidopsis thaliana; identical to SEQ ID NO: 23183
  peptide (1)..(162): Ceres Seq. ID no. 12718641
  misc_feature (20)..(162): Pfam Name: Mago nashi protein Pfam Description: Mago nashi protein
  misc_feature (13)..(162): Homolog of NCBI NO: 15217623 NR Description: Mago Nashi-like protein; protein id: At1g02140.1, by cDNA: 35733., supported by cDNA: gi_17473797 [Arabidopsis >gi|6016560|sp|O23676|MGN_ARATH Mago nashi protein homolog
  misc_feature (13)..(162): Homolog of NCBI NO: 6016561 NR Description: Mago nashi protein homolog
  misc_feature (12)..(162): Homolog of NCBI NO: 12802873 NR Description: mago nashi-like protein [Oryza sativa]
  misc_feature (15)..(162): Homolog of NCBI NO: 13195558 NR Description: mago nashi [Marsilea vestita]
  misc_feature (18)..(162): Homolog of NCBI NO: 8922331 NR Description: hypothetical protein FLJ10292 [Homo sapiens] unnamed protein product [Homo sapiens]
  misc_feature (18)..(162): Homolog of NCBI NO: 25990444 NR Description: MAGO protein [Gallus gallus]
  misc_feature (19)..(162): Homolog of NCBI NO: 4505087 NR Description: mago-nashi homolog [Homo sapiens]
  misc_feature (19)..(162): Homolog of NCBI NO: 13385002 NR Description: RIKEN cDNA 2010012C16 [Mus musculus] unnamed protein product [Mus musculus] unnamed protein product [Mus musculus]
  misc_feature (19)..(162): Homolog of NCBI NO: 26354182 NR Description: unnamed protein product [Mus musculus]
  misc_feature (19)..(162): Homolog of NCBI NO: 6016563 NR Description: Mago nashi protein homolog (Xl-mago)

SEQ ID NO: 89450 - protein, 150 aa, Arabidopsis thaliana; identical to SEQ ID NO: 23184
  peptide (1)..(150): Ceres Seq. ID no. 12718642
  misc_feature (8)..(150): Pfam Name: Mago nashi protein Pfam Description: Mago nashi protein
  misc_feature (1)..(150): Homolog of NCBI NO: 15217623 NR Description: Mago Nashi-like protein; protein id: At1g02140.1, by cDNA: 35733., supported by cDNA: gi_17473797 [Arabidopsis >gi|6016560|sp|O23676|MGN_ARATH Mago nashi protein homolog
  misc_feature (1)..(150): Homolog of NCBI NO: 6016561 NR Description: Mago nashi protein homolog
  misc_feature (1)..(150): Homolog of NCBI NO: 12802873 NR Description: mago nashi-like protein [Oryza sativa]
  misc_feature (3)..(150): Homolog of NCBI NO: 13195558 NR Description: mago nashi [Marsilea vestita]
  misc_feature (6)..(150): Homolog of NCBI NO: 8922331 NR Description: hypothetical protein FLJ10292 [Homo sapiens] unnamed protein product [Homo sapiens]
  misc_feature (6)..(150): Homolog of NCBI NO: 25990444 NR Description: MAGO protein [Gallus gallus]
  misc_feature (7)..(150): Homolog of NCBI NO: 4505087 NR Description: mago-nashi homolog [Homo sapiens]
  misc_feature (7)..(150): Homolog of NCBI NO: 13385002 NR Description: RIKEN cDNA 2010012C16 [Mus musculus] unnamed protein product [Mus musculus] unnamed protein product [Mus musculus]
  misc_feature (7)..(150): Homolog of NCBI NO: 26354182 NR Description: unnamed protein product [Mus musculus]
  misc_feature (7)..(150): Homolog of NCBI NO: 6016563 NR Description: Mago nashi protein homolog (Xl-mago)

SEQ ID NO: 89451 - DNA, 1875 bp, Arabidopsis thaliana
  misc_feature (1)..(1875): Ceres Seq. ID no. 12718643
  misc_feature: MA Experiment ID: 20000173 Result: Down-regulated in Transcription
  misc_feature: MA Experiment 20000173 PARAMETER Experiment Name: At_42deg_Heat_P Parameter: Age (day) Value: 14
  misc_feature: MA Experiment 20000173 PARAMETER Experiment Name: At_42deg_Heat_P Parameter: Organism Value: A. thaliana
  misc_feature: MA Experiment 20000173 PARAMETER Experiment Name: At_42deg_Heat_P Parameter: Plant Line Value: WS
  misc_feature: MA Experiment 20000173 PARAMETER Experiment Name: At_42deg_Heat_P Parameter: Temperature (deg C) Value: 42 vs. 22
  misc_feature: MA Experiment 20000173 PARAMETER Experiment Name: At_42deg_Heat_P Parameter: Timepoint (hr) Value: 6
  misc_feature: MA Experiment 20000173 PARAMETER Experiment Name: At_42deg_Heat_P Parameter: Tissue Value: Aerial
  misc_feature: MA Experiment ID: 20000264 Result: Up-regulated in Transcription
  misc_feature: MA Experiment 20000264 PARAMETER Experiment Name: At_Open_Flower_P Parameter: Age (day) Value: 21
  misc_feature: MA Experiment 20000264 PARAMETER Experiment Name: At_Open_Flower_P Parameter: Plant Line Value: WS
  misc_feature: MA Experiment 20000264 PARAMETER Experiment Name: At_Open_Flower_P Parameter: Tissue Value: Open Flower vs. Whole Plant
  misc_feature: MA Experiment ID: 20000265 Result: Up-regulated in Transcription
  misc_feature: MA Experiment 20000265 PARAMETER Experiment Name: At_Open_Flower_P Parameter: Age (day) Value: 21
  misc_feature: MA Experiment 20000265 PARAMETER Experiment Name: At_Open_Flower_P Parameter: Plant Line Value: WS
  misc_feature: MA Experiment 20000265 PARAMETER Experiment Name: At_Open_Flower_P Parameter: Tissue Value: Closed Flower vs. Whole Plant
  misc_feature: MA Experiment ID: 20000286 Result: Up-regulated in Transcription
  misc_feature: MA Experiment 20000286 PARAMETER Experiment Name: At_Open_Flower_P Parameter: Age (day) Value: 21
  misc_feature: MA Experiment 20000286 PARAMETER Experiment Name: At_Open_Flower_P Parameter: Plant Line Value: WS
  misc_feature: MA Experiment 20000286 PARAMETER Experiment Name: At_Open_Flower_P Parameter: Tissue Value: Half Open vs. Whole Plant
  misc_feature: MA Experiment ID: 20000794 Result: Up-regulated in Transcription
  misc_feature: MA Experiment 20000794 PARAMETER Experiment Name: At_Petals_P Parameter: Age (day) Value: 23-25 days
  misc_feature: MA Experiment 20000794 PARAMETER Experiment Name: At_Petals_P Parameter: Plant Line Value: WS
  misc_feature: MA Experiment 20000794 PARAMETER Experiment Name: At_Petals_P Parameter: Tissue Value: Petals vs. Whole plant
  misc_feature: MA Experiment ID: 20001451 Result: Up-regulated in Transcription
  misc_feature: MA Experiment 20001451 PARAMETER Experiment Name: At_Far-red-induction_P Parameter: Age (day) Value: 7
  misc_feature: MA Experiment 20001451 PARAMETER Experiment Name: At_Far-red-induction_P Parameter: Light Value: Far-red vs. White
  misc_feature: MA Experiment 20001451 PARAMETER Experiment Name: At_Far-red-induction_P Parameter: Organism Value: A. thaliana
  misc_feature: MA Experiment 20001451 PARAMETER Experiment Name: At_Far-red-induction_P Parameter: Plant Line Value: Columbia
  misc_feature: MA Experiment 20001451 PARAMETER Experiment Name: At_Far-red-induction_P Parameter: Timepoint (hr) Value: 24
  misc_feature: MA Experiment 20001451 PARAMETER Experiment Name: At_Far-red-induction_P Parameter: Tissue Value: Whole Plant
atgtcgttctccgattcagagtcatcctctcacggaggaggaggaggagattacaagttctttcgtcagatcagccgcgatcgattgctccacgagatgcttggatctaccaaaaccggggattctaaagcttggaagatactaataatggatagagttacggtcaaagtaatgtctcagtcttgcaagatggctgatatcactgatcaaggcatttcctgtatcatgtttctatccgacatgtctggccgggaacccttgtacaggaaggcatttatctttttcagttccactatccccaaagaattggtcaatcacatcaaaagtgattctagcgttttaccacgcattggtgctttacgcgagggatttctaactgatcatgagcaagcattggaaacgctctatgctgaagatgctgagaattcacgccactttcatatttgtttgaatattatggctactagaattgctaccgtatttgcttccctcaaggaactaccctttgttcggtatcgagctgctaagtccactgcttcgagggacttggttccatcaaagcttgctgctgcaatttgggactgtatctcaaaatataaagccattcccaacttcccccagaccgaaacatgtgagctgctcattgtggatagatcagtggatcagatcgctcctatcatacacgaatggacctatgatgctatgtgccatgatttgcttgacatggaggggaataaacatgtcattgaggttcccagtaaaactggtgggcctccggagaaaaaggagatagtgcttgaagatcatgatccagtgtggcttgagcttcgacacacacatatagcagatgctagcgagcgtttgcatgagaaaatgaccaactttgcttcaaaaaacaaagccgcacaaatgagatcaagggacggtagcgagttgtctacacgagatctacagaaaatagttcaggctttgccgcaatatggagaacaagttgacaaactctccactcatgtagagctagctggaaaaattaatagaataatcagagacacaggacttcgggatcttgggcagctggaacaagatcttgtttttggagatgcaggtgccaaggacgttatcaactttctgaggacgaatcaggacacaaacccggaaaacaaattacggcttttgatgatttatgcaacagtgtaccccgagaagtttgaaggtgacaagggtgtgaagctaatgcaggttataagcaacatgcaattgatagctggatccccagaaaacaaagctaagtccggtagtttctccctcaaatttgacgctggaaagacaaaacaagcaaacaggaaagatcgatctggtgaagaagaaacatggcaactgttccggttttatcccatgatcgaggagctgcttgagaaactcgtgaaaggcgatctatctaaaagcgactatctatgtatgaaccaatcaagtcataaggaggagagtgaagcaagaacaggatctgtcaggaagagttctgctcctacagcggttccagagagaaaagccacccctcattctatgagatcaagacgaactgcaacttgggcgcgtcctcattcttctgacgatggatattccaggcattctattttacataatgatttcttattttttggtccatttgagaggatctttgtattcataattggtggggcaactcgatccgagctccgagtttgccacaagttgacaagcagtttgaggagagaagtggtactaggctccactagtttcgatgatcccccacagtacatcacgaagctgaaattgctgtcggaaaaagacatacaaggggctcctgctcagcccttcaaaccacaatactggtga

SEQ ID NO: 89452 - protein, 624 aa, Arabidopsis thaliana
  peptide (1)..(624): Ceres Seq. ID no. 12718644
  misc_feature (75)..(624): Homolog of NCBI NO: 18378910 NR Description: hypothetical protein; protein id: At1g02010.1
  misc_feature (1)..(106): Homolog of NCBI NO: 18378910 NR Description: hypothetical protein; protein id: At1g02010.1
  misc_feature (187)..(562): Homolog of NCBI NO: 2317901 NR Description: Similar to vesicle transport protein, PIR
  misc_feature (122)..(610): Homolog of NCBI NO: 18391384 NR Description: expressed protein; protein id: At1g12360.1,
  misc_feature (122)..(610): Homolog of NCBI NO: 28201820 NR Description: SNARE-interacting protein KEULE
  misc_feature (1)..(112): Homolog of NCBI NO: 18391384 NR Description: expressed protein; protein id: At1g12360.1,
  misc_feature (1)..(112): Homolog of NCBI NO: 28201820 NR Description: SNARE-interacting protein KEULE
  misc_feature (122)..(611): Homolog of NCBI NO: 38345989 NR Description: OSJNBa0032B23.7 [Oryza sativa (japonica
  misc_feature (76)..(177): Homolog of NCBI NO: 38345989 NR Description: OSJNBa0032B23.7 [Oryza sativa (japonica
  misc_feature (75)..(582): Homolog of NCBI NO: 25402721 NR Description: protein F5O11.8 [imported] - Arabidopsis thaliana
MSFSDSESSSHGGGGGDYKFFRQISRDRLLHEMLGSTKTGDSKAWKILIMDRVTVKVMSQSCKMADITDQGISCIMFLSDMSGREPLYRKAFIFFSSTIPKELVNHIKSDSSVLPRIGALREGFLTDHEQALETLYAEDAENSRHFHICLNIMATRIATVFASLKELPFVRYRAAKSTASRDLVPSKLAAAIWDCISKYKAIPNFPQTETCELLIVDRSVDQIAPIIHEWTYDAMCHDLLDMEGNKHVIEVPSKTGGPPEKKEIVLEDHDPVWLELRHTHIADASERLHEKMTNFASKNKAAQMRSRDGSELSTRDLQKIVQALPQYGEQVDKLSTHVELAGKINRIIRDTGLRDLGQLEQDLVFGDAGAKDVINFLRTNQDTNPENKLRLLMIYATVYPEKFEGDKGVKLMQVISNMQLIAGSPENKAKSGSFSLKFDAGKTKQANRKDRSGEEETWQLFRFYPMIEELLEKLVKGDLSKSDYLCMNQSSHKEESEARTGSVRKSSAPTAVPERKATPHSMRSRRTATWARPHSSDDGYSRHSILHNDFLFFGPFERIFVFIIGGATRSELRVCHKLTSSLRREVVLGSTSFDDPPQYITKLKLLSEKDIQGAPAQPFKPQYW

SEQ ID NO: 89453 - protein, 592 aa, Arabidopsis thaliana
  peptide (1)..(592): Ceres Seq. ID no. 12718645
  misc_feature (43)..(592): Homolog of NCBI NO: 18378910 NR Description: hypothetical protein; protein id: At1g02010.1
  misc_feature (1)..(74): Homolog of NCBI NO: 18378910 NR Description: hypothetical protein; protein id: At1g02010.1
  misc_feature (155)..(530): Homolog of NCBI NO: 2317901 NR Description: Similar to vesicle transport protein, PIR
  misc_feature (90)..(578): Homolog of NCBI NO: 18391384 NR Description: expressed protein; protein id: At1g12360.1,
  misc_feature (90)..(578): Homolog of NCBI NO: 28201820 NR Description: SNARE-interacting protein KEULE
  misc_feature (1)..(80): Homolog of NCBI NO: 18391384 NR Description: expressed protein; protein id: At1g12360.1,
  misc_feature (1)..(80): Homolog of NCBI NO: 28201820 NR Description: SNARE-interacting protein KEULE
  misc_feature (90)..(579): Homolog of NCBI NO: 38345989 NR Description: OSJNBa0032B23.7 [Oryza sativa (japonica
  misc_feature (44)..(145): Homolog of NCBI NO: 38345989 NR Description: OSJNBa0032B23.7 [Oryza sativa (japonica
  misc_feature (43)..(550): Homolog of NCBI NO: 25402721 NR Description: protein F5O11.8 [imported] - Arabidopsis thaliana
MLGSTKTGDSKAWKILIMDRVTVKVMSQSCKMADITDQGISCIMFLSDMSGREPLYRKAFIFFSSTIPKELVNHIKSDSSVLPRIGALREGFLTDHEQALETLYAEDAENSRHFHICLNIMATRIATVFASLKELPFVRYRAAKSTASRDLVPSKLAAAIWDCISKYKAIPNFPQTETCELLIVDRSVDQIAPIIHEWTYDAMCHDLLDMEGNKHVIEVPSKTGGPPEKKEIVLEDHDPVWLELRHTHIADASERLHEKMTNFASKNKAAQMRSRDGSELSTRDLQKIVQALPQYGEQVDKLSTHVELAGKINRIIRDTGLRDLGQLEQDLVFGDAGAKDVINFLRTNQDTNPENKLRLLMIYATVYPEKFEGDKGVKLMQVISNMQLIAGSPENKAKSGSFSLKFDAGKTKQANRKDRSGEEETWQLFRFYPMIEELLEKLVKGDLSKSDYLCMNQSSHKEESEARTGSVRKSSAPTAVPERKATPHSMRSRRTATWARPHSSDDGYSRHSILHNDFLFFGPFERIFVFIIGGATRSELRVCHKLTSSLRREVVLGSTSFDDPPQYITKLKLLSEKDIQGAPAQPFKPQYW

SEQ ID NO: 89454 - protein, 575 aa, Arabidopsis thaliana
  peptide (1)..(575): Ceres Seq. ID no. 12718646
  misc_feature (26)..(575): Homolog of NCBI NO: 18378910 NR Description: hypothetical protein; protein id: At1g02010.1
  misc_feature (1)..(57): Homolog of NCBI NO: 18378910 NR Description: hypothetical protein; protein id: At1g02010.1
  misc_feature (138)..(513): Homolog of NCBI NO: 2317901 NR Description: Similar to vesicle transport protein, PIR
  misc_feature (73)..(561): Homolog of NCBI NO: 18391384 NR Description: expressed protein; protein id: At1g12360.1,
  misc_feature (73)..(561): Homolog of NCBI NO: 28201820 NR Description: SNARE-interacting protein KEULE
  misc_feature (1)..(63): Homolog of NCBI NO: 18391384 NR Description: expressed protein; protein id: At1g12360.1,
  misc_feature (1)..(63): Homolog of NCBI NO: 28201820 NR Description: SNARE-interacting protein KEULE
  misc_feature (73)..(562): Homolog of NCBI NO: 38345989 NR Description: OSJNBa0032B23.7 [Oryza sativa (japonica
  misc_feature (27)..(128): Homolog of NCBI NO: 38345989 NR Description: OSJNBa0032B23.7 [Oryza sativa (japonica
  misc_feature (26)..(533): Homolog of NCBI NO: 25402721 NR Description: protein F5O11.8 [imported] - Arabidopsis thaliana
MDRVTVKVMSQSCKMADITDQGISCIMFLSDMSGREPLYRKAFIFFSSTIPKELVNHIKSDSSVLPRIGALREGFLTDHEQALETLYAEDAENSRHFHICLNIMATRIATVFASLKELPFVRYRAAKSTASRDLVPSKLAAAIWDCISKYKAIPNFPQTETCELLIVDRSVDQIAPIIHEWTYDAMCHDLLDMEGNKHVIEVPSKTGGPPEKKEIVLEDHDPVWLELRHTHIADASERLHEKMTNFASKNKAAQMRSRDGSELSTRDLQKIVQALPQYGEQVDKLSTHVELAGKINRIIRDTGLRDLGQLEQDLVFGDAGAKDVINFLRTNQDTNPENKLRLLMIYATVYPEKFEGDKGVKLMQVISNMQLIAGSPENKAKSGSFSLKFDAGKTKQANRKDRSGEEETWQLFRFYPMIEELLEKLVKGDLSKSDYLCMNQSSHKEESEARTGSVRKSSAPTAVPERKATPHSMRSRRTATWARPHSSDDGYSRHSILHNDFLFFGPFERIFVFIIGGATRSELRVCHKLTSSLRREVVLGSTSFDDPPQYITKLKLLSEKDIQGAPAQPFKPQYW

SEQ ID NO: 89455 - DNA, 1205 bp, Arabidopsis thaliana
  misc_feature (1)..(1205): Ceres Seq. ID no. 12718651
  misc_feature: MA Experiment ID: 20000314 Result: Up-regulated in Transcription
  misc_feature: MA Experiment 20000314 PARAMETER Experiment Name: At_14day_Shoots-Roots_Sub_P Parameter: Age (day) Value: 14
  misc_feature: MA Experiment 20000314 PARAMETER Experiment Name: At_14day_Shoots-Roots_Sub_P Parameter: Organism Value: A. thaliana
  misc_feature: MA Experiment 20000314 PARAMETER Experiment Name: At_14day_Shoots-Roots_Sub_P Parameter: Plant Line Value: WS
  misc_feature: MA Experiment 20000314 PARAMETER Experiment Name: At_14day_Shoots-Roots_Sub_P Parameter: Tissue Value: Roots vs. Whole Plant
  misc_feature: MA Experiment ID: 20000315 Result: Down-regulated in Transcription
  misc_feature: MA Experiment 20000315 PARAMETER Experiment Name: At_14day_Shoots-Roots_Sub_P Parameter: Age (day) Value: 14
  misc_feature: MA Experiment 20000315 PARAMETER Experiment Name: At_14day_Shoots-Roots_Sub_P Parameter: Organism Value: A. thaliana
  misc_feature: MA Experiment 20000315 PARAMETER Experiment Name: At_14day_Shoots-Roots_Sub_P Parameter: Plant Line Value: WS
  misc_feature: MA Experiment 20000315 PARAMETER Experiment Name: At_14day_Shoots-Roots_Sub_P Parameter: Tissue Value: Shoots vs. Whole Plant
aattccttcttcttcttcttcttcttcttgtctccgatgtcagccatggatgttatgattcactcttcaagctttctcctcccttgcgacgaaactagtacagggacgagatacgctctcgttgttctgaaccagagtttgccacgattcactcctcttctctgggaacatgcaaaacttcgtctctgtgctgatggaggcgctaatcgcatctacgacgaattgcctctcttcttccctaatgaagacgctttggccattcgaaacaggtccaactttctgaagctgtatctctcgctctcttactctttcttcggatttgaagattattattcaaatttagtgatggtttattggaataattagtctaaatttgagctggagatattttttttgtatgagttcatagattcaccttcttcttatctttatgtatattacatagagaaagatttcatgaagaagaacttgtattttaggtataagccggatgttatcaaaggagatatggattctatacgtcgtgacgtcctcgacttttatataaacttgggaactaaggttatagatgaatctcatgatcaagacaccacagatcttgataaatgcattttgtatatccgtcactctactttgaatcaagagacttccggactccagattcttgccactggagcacttggaggaagatttgatcatgaagccggtaatctcaacgtcttatatcgatatccagatacaaggatagtccttttatctgacgattgcctcatccaactccttccaaagactcatcgacatgaaatacatattcagtcttctctagaagggcctcactgtggactcatacccattggaactccatctgctaaaaccacaacctcagggcttcaatgggatctcagcaacactgagatgagatttggtgggttgataagtacatccaacttggttaaagaagagaaaatcacagtcgaatcggattcggatcttctctggactatatccatcaagaaaacaggactttccatacaagaccatacaccttaggcccggtaacaaaacacactttagtatattatacgctactatgatgttcctgatgcaacgaactagttcaacattattgtgttgatttgttgttcactgtactagctaataatacttgtaccattactgtcgttatacattaagatgcttttttc

SEQ ID NO: 89456 - protein, 197 aa, Arabidopsis thaliana
  peptide (1)..(197): Ceres Seq. ID no. 12718652
  misc_feature (8)..(102): Pfam Name: Thiamin pyrophosphokinase, catalytic domain Pfam Description: Thiamin pyrophosphokinase, catalytic domain
  misc_feature (8)..(197): Homolog of NCBI NO: 30678415 NR Description: thiamin pyrophosphokinase -related [Arabidopsis
  misc_feature (8)..(197): Homolog of NCBI NO: 18379026 NR Description: thiamin pyrophosphokinase, putative; protein id:
  misc_feature (1)..(197): Homolog of NCBI NO: 30689827 NR Description: thiamin pyrophosphokinase -related [Arabidopsis
  misc_feature (1)..(197): Homolog of NCBI NO: 7488367 NR Description: probable thiamin pyrophosphokinase At2g44750
  misc_feature (1)..(197): Homolog of NCBI NO: 18406621 NR Description: putative thiamin pyrophosphokinase; protein id: supported by cDNA: gi_14596220, supported by cDNA: gi_20148328 thaliana] >gi|14596221|gb|AAK68838.1| putative thiamin
  misc_feature (1)..(197): Homolog of NCBI NO: 30678410 NR Description: thiamin pyrophosphokinase -related [Arabidopsis >gi|16648736|gb|AAL25560.1| At1g02880/F22D16_33 [Arabidopsis >gi|20856331|gb|AAM26660.1| At1g02880/F22D16_33 [Arabidopsis
  misc_feature (33)..(186): Homolog of NCBI NO: 34915046 NR Description: putative thiamin pyrophosphokinase [Oryza sativa
  misc_feature (8)..(186): Homolog of NCBI NO: 34907130 NR Description: putative thiamine pyrophosphokinase [Oryza sativa
  misc_feature (9)..(186): Homolog of NCBI NO: 21362110 NR Description: thiamin pyrophosphokinase 1; mouse thiamin homolog; thiamine pyrophosphokinase [Homo sapiens] thiamin pyrophosphokinase [Homo sapiens]
  misc_feature (9)..(186): Homolog of NCBI NO: 39644700 NR Description: TPK1 protein [Homo sapiens]
MKKNLYFRYKPDVIKGDMDSIRRDVLDFYINLGTKVIDESHDQDTTDLDKCILYIRHSTLNQETSGLQILATGALGGRFDHEAGNLNVLYRYPDTRIVLLSDDCLIQLLPKTHRHEIHIQSSLEGPHCGLIPIGTPSAKTTTSGLQWDLSNTEMRFGGLISTSNLVKEEKITVESDSDLLWTISIKKTGLSIQDHTP

SEQ ID NO: 89457 - protein, 180 aa, Arabidopsis thaliana; identical to SEQ ID NO: 43324
  peptide (1)..(180): Ceres Seq. ID no. 12718653
  misc_feature (1)..(85): Pfam Name: Thiamin pyrophosphokinase, catalytic domain Pfam Description: Thiamin pyrophosphokinase, catalytic domain
  misc_feature (1)..(180): Homolog of NCBI NO: 30678415 NR Description: thiamin pyrophosphokinase -related [Arabidopsis
  misc_feature (1)..(180): Homolog of NCBI NO: 18379026 NR Description: thiamin pyrophosphokinase, putative; protein id:
  misc_feature (1)..(180): Homolog of NCBI NO: 30689827 NR Description: thiamin pyrophosphokinase -related [Arabidopsis
  misc_feature (1)..(180): Homolog of NCBI NO: 7488367 NR Description: probable thiamin pyrophosphokinase At2g44750
  misc_feature (1)..(180): Homolog of NCBI NO: 18406621 NR Description: putative thiamin pyrophosphokinase; protein id: supported by cDNA: gi_14596220, supported by cDNA: gi_20148328 thaliana] >gi|14596221|gb|AAK68838.1| putative thiamin
  misc_feature (1)..(180): Homolog of NCBI NO: 30678410 NR Description: thiamin pyrophosphokinase -related [Arabidopsis >gi|16648736|gb|AAL25560.1| At1g02880/F22D16_33 [Arabidopsis >gi|20856331|gb|AAM26660.1| At1g02880/F22D16_33 [Arabidopsis
  misc_feature (16)..(169): Homolog of NCBI NO: 34915046 NR Description: putative thiamin pyrophosphokinase [Oryza sativa
  misc_feature (1)..(169): Homolog of NCBI NO: 34907130 NR Description: putative thiamine pyrophosphokinase [Oryza sativa
  misc_feature (1)..(169): Homolog of NCBI NO: 21362110 NR Description: thiamin pyrophosphokinase 1; mouse thiamin homolog; thiamine pyrophosphokinase [Homo sapiens] thiamin pyrophosphokinase [Homo sapiens]
  misc_feature (1)..(169): Homolog of NCBI NO: 39644700 NR Description: TPK1 protein [Homo sapiens]

SEQ ID NO: 89458 - protein, 121 aa, Arabidopsis thaliana
  peptide (1)..(121): Ceres Seq. ID no. 12718654
  misc_feature (13)..(90): Homolog of NCBI NO: 30678415 NR Description: thiamin pyrophosphokinase -related [Arabidopsis
  misc_feature (16)..(90): Homolog of NCBI NO: 18379026 NR Description: thiamin pyrophosphokinase, putative; protein id:
  misc_feature (13)..(90): Homolog of NCBI NO: 30689827 NR Description: thiamin pyrophosphokinase -related [Arabidopsis
  misc_feature (16)..(90): Homolog of NCBI NO: 7488367 NR Description: probable thiamin pyrophosphokinase At2g44750
  misc_feature (13)..(90): Homolog of NCBI NO: 18406621 NR Description: putative thiamin pyrophosphokinase; protein id: supported by cDNA: gi_14596220, supported by cDNA: gi_20148328 thaliana] >gi|14596221|gb|AAK68838.1| putative thiamin
  misc_feature (16)..(115): Homolog of NCBI NO: 34915046 NR Description: putative thiamin pyrophosphokinase [Oryza sativa
  misc_feature (19)..(114): Homolog of NCBI NO: 34907130 NR Description: putative thiamine pyrophosphokinase [Oryza sativa
  misc_feature (19)..(73): Homolog of NCBI NO: 21362110 NR Description: thiamin pyrophosphokinase 1; mouse thiamin homolog; thiamine pyrophosphokinase [Homo sapiens] thiamin pyrophosphokinase [Homo sapiens]
  misc_feature (33)..(73): Homolog of NCBI NO: 39644700 NR Description: TPK1 protein [Homo sapiens]
  misc_feature (19)..(73): Homolog of NCBI NO: 7305589 NR Description: thiamin pyrophosphokinase [Mus musculus] thiamin pyrophosphokinase [Mus musculus] Unknown (protein for MGC:18314) [Mus musculus]
NSFFFFFFFLSPMSAMDVMIHSSSFLLPCDETSTGTRYALVVLNQSLPRFTPLLWEHAKLRLCADGGANRIYDELPLFFPNEDALAIRNRSNFLKLYLSLSYSFFGFEDYYSNLVMVYWNN

SEQ ID NO: 89459 - DNA, 1434 bp, Arabidopsis thaliana
  misc_feature (1)..(1434): Ceres Seq. ID no. 12718658
  misc_feature: MA Experiment ID: 20000182 Result: Up-regulated in Transcription
  misc_feature: MA Experiment 20000182 PARAMETER Experiment Name: At_2mM_SA_P Parameter: Age (day) Value: 14
  misc_feature: MA Experiment 20000182 PARAMETER Experiment Name: At_2mM_SA_P Parameter: Organism Value: A. thaliana
  misc_feature: MA Experiment 20000182 PARAMETER Experiment Name: At_2mM_SA_P Parameter: Plant Line Value: WS
  misc_feature: MA Experiment 20000182 PARAMETER Experiment Name: At_2mM_SA_P Parameter: Timepoint (hr) Value: 6
  misc_feature: MA Experiment 20000182 PARAMETER Experiment Name: At_2mM_SA_P Parameter: Tissue Value: Aerial
  misc_feature: MA Experiment 20000182 PARAMETER Experiment Name: At_2mM_SA_P Parameter: Treatment Value: 2mM SA vs. No Treatment
  misc_feature: MA Experiment ID: 20000185 Result: Up-regulated in Transcription
  misc_feature: MA Experiment 20000185 PARAMETER Experiment Name: At_Roots__P Parameter: Age (day) Value: 7 vs. 21
  misc_feature: MA Experiment 20000185 PARAMETER Experiment Name: At_Roots__P Parameter: Organism Value: A. thaliana
  misc_feature: MA Experiment 20000185 PARAMETER Experiment Name: At_Roots__P Parameter: Tissue Value: Roots vs. Whole Plant
  misc_feature: MA Experiment ID: 20000439 Result: Up-regulated in Transcription
  misc_feature: MA Experiment 20000439 PARAMETER Experiment Name: At_Roots__P Parameter: Age (day) Value: 14 vs. 21
  misc_feature: MA Experiment 20000439 PARAMETER Experiment Name: At_Roots__P Parameter: Organism Value: A. thaliana
  misc_feature: MA Experiment 20000439 PARAMETER Experiment Name: At_Roots__P Parameter: Tissue Value: Roots vs. Whole Plant
  misc_feature: MA Experiment ID: 20000495 Result: Up-regulated in Transcription
  misc_feature: MA Experiment 20000495 PARAMETER Experiment Name: At_Guard_Cells_P Parameter: Harvest Date Value: 8/2/2002
  misc_feature: MA Experiment 20000495 PARAMETER Experiment Name: At_Guard_Cells_P Parameter: Organism Value: A. thaliana
  misc_feature: MA Experiment 20000495 PARAMETER Experiment Name: At_Guard_Cells_P Parameter: Tissue Value: Guard Cells vs. Leaves
  misc_feature: MA Experiment ID: 20001248 Result: Up-regulated in Transcription
  misc_feature: MA Experiment 20001248 PARAMETER Experiment Name: At_Far-red-induction_P Parameter: Age (day) Value: 7
  misc_feature: MA Experiment 20001248 PARAMETER Experiment Name: At_Far-red-induction_P Parameter: Light Value: Far-red vs. White
  misc_feature: MA Experiment 20001248 PARAMETER Experiment Name: At_Far-red-induction_P Parameter: Organism Value: A. thaliana
  misc_feature: MA Experiment 20001248 PARAMETER Experiment Name: At_Far-red-induction_P Parameter: Plant Line Value: Columbia
  misc_feature: MA Experiment 20001248 PARAMETER Experiment Name: At_Far-red-induction_P Parameter: Timepoint (hr) Value: 4
  misc_feature: MA Experiment 20001248 PARAMETER Experiment Name: At_Far-red-induction_P Parameter: Tissue Value: Whole Plant
  misc_feature: MA Experiment ID: 20001451 Result: Up-regulated in Transcription
  misc_feature: MA Experiment 20001451 PARAMETER Experiment Name: At_Far-red-induction_P Parameter: Age (day) Value: 7
  misc_feature: MA Experiment 20001451 PARAMETER Experiment Name: At_Far-red-induction_P Parameter: Light Value: Far-red vs. White
  misc_feature: MA Experiment 20001451 PARAMETER Experiment Name: At_Far-red-induction_P Parameter: Organism Value: A. thaliana
  misc_feature: MA Experiment 20001451 PARAMETER Experiment Name: At_Far-red-induction_P Parameter: Plant Line Value: Columbia
  misc_feature: MA Experiment 20001451 PARAMETER Experiment Name: At_Far-red-induction_P Parameter: Timepoint (hr) Value: 24
  misc_feature: MA Experiment 20001451 PARAMETER Experiment Name: At_Far-red-induction_P Parameter: Tissue Value: Whole Plant
  misc_feature: MA Experiment ID: 20001555 Result: Down-regulated in Transcription
  misc_feature: MA Experiment 20001555 PARAMETER Experiment Name: At_Drought_Soil_Dry_P Parameter: Age (day) Value: 24
  misc_feature: MA Experiment 20001555 PARAMETER Experiment Name: At_Drought_Soil_Dry_P Parameter: Organism Value: A. thaliana
  misc_feature: MA Experiment 20001555 PARAMETER Experiment Name: At_Drought_Soil_Dry_P Parameter: Plant Line Value: WS
  misc_feature: MA Experiment 20001555 PARAMETER Experiment Name: At_Drought_Soil_Dry_P Parameter: Post Timepoint (hr) Value: None
  misc_feature: MA Experiment 20001555 PARAMETER Experiment Name: At_Drought_Soil_Dry_P Parameter: Post-Treatment Value: None
  misc_feature: MA Experiment 20001555 PARAMETER Experiment Name: At_Drought_Soil_Dry_P Parameter: Timepoint (day) Value: 10
  misc_feature: MA Experiment 20001555 PARAMETER Experiment Name: At_Drought_Soil_Dry_P Parameter: Treatment Value: Drought vs. No Drought
  misc_feature: MA Experiment ID: 20001557 Result: Down-regulated in Transcription
  misc_feature: MA Experiment 20001557 PARAMETER Experiment Name: At_Drought_Soil_Dry_P Parameter: Age (day) Value: 27
  misc_feature: MA Experiment 20001557 PARAMETER Experiment Name: At_Drought_Soil_Dry_P Parameter: Organism Value: A. thaliana
  misc_feature: MA Experiment 20001557 PARAMETER Experiment Name: At_Drought_Soil_Dry_P Parameter: Plant Line Value: WS
  misc_feature: MA Experiment 20001557 PARAMETER Experiment Name: At_Drought_Soil_Dry_P Parameter: Post Timepoint (hr) Value: 3
  misc_feature: MA Experiment 20001557 PARAMETER Experiment Name: At_Drought_Soil_Dry_P Parameter: Post-Treatment Value: Re-Water vs. No Drought
  misc_feature: MA Experiment 20001557 PARAMETER Experiment Name: At_Drought_Soil_Dry_P Parameter: Timepoint (day) Value: 13
  misc_feature: MA Experiment 20001557 PARAMETER Experiment Name: At_Drought_Soil_Dry_P Parameter: Treatment Value: Drought vs. No Drought
  misc_feature: MA Experiment ID: 20001558 Result: Down-regulated in Transcription
  misc_feature: MA Experiment 20001558 PARAMETER Experiment Name: At_Drought_Soil_Dry_P Parameter: Age (day) Value: 27
  misc_feature: MA Experiment 20001558 PARAMETER Experiment Name: At_Drought_Soil_Dry_P Parameter: Organism Value: A. thaliana
  misc_feature: MA Experiment 20001558 PARAMETER Experiment Name: At_Drought_Soil_Dry_P Parameter: Plant Line Value: WS
  misc_feature: MA Experiment 20001558 PARAMETER Experiment Name: At_Drought_Soil_Dry_P Parameter: Post Timepoint (hr) Value: 6
  misc_feature: MA Experiment 20001558 PARAMETER Experiment Name: At_Drought_Soil_Dry_P Parameter: Post-Treatment Value: Re-Water vs. No Drought
  misc_feature: MA Experiment 20001558 PARAMETER Experiment Name: At_Drought_Soil_Dry_P Parameter: Timepoint (day) Value: 13
  misc_feature: MA Experiment 20001558 PARAMETER Experiment Name: At_Drought_Soil_Dry_P Parameter: Treatment Value: Drought vs. No Drought
  misc_feature: MA Experiment ID: 20001559 Result: Down-regulated in Transcription
  misc_feature: MA Experiment 20001559 PARAMETER Experiment Name: At_Drought_Soil_Dry_P Parameter: Age (day) Value: 28
  misc_feature: MA Experiment 20001559 PARAMETER Experiment Name: At_Drought_Soil_Dry_P Parameter: Organism Value: A. thaliana
  misc_feature: MA Experiment 20001559 PARAMETER Experiment Name: At_Drought_Soil_Dry_P Parameter: Plant Line Value: WS
  misc_feature: MA Experiment 20001559 PARAMETER Experiment Name: At_Drought_Soil_Dry_P Parameter: Post Timepoint (hr) Value: 29
  misc_feature: MA Experiment 20001559 PARAMETER Experiment Name: At_Drought_Soil_Dry_P Parameter: Post-Treatment Value: Re-Water vs. No Drought
  misc_feature: MA Experiment 20001559 PARAMETER Experiment Name: At_Drought_Soil_Dry_P Parameter: Timepoint (day) Value: 14
  misc_feature: MA Experiment 20001559 PARAMETER Experiment Name: At_Drought_Soil_Dry_P Parameter: Treatment Value: Drought vs. No Drought
  misc_feature: MA Experiment ID: 20001560 Result: Down-regulated in Transcription
  misc_feature: MA Experiment 20001560 PARAMETER Experiment Name: At_Drought_Soil_Dry_P Parameter: Age (day) Value: 28
  misc_feature: MA Experiment 20001560 PARAMETER Experiment Name: At_Drought_Soil_Dry_P Parameter: Organism Value: A. thaliana
  misc_feature: MA Experiment 20001560 PARAMETER Experiment Name: At_Drought_Soil_Dry_P Parameter: Plant Line Value: WS
  misc_feature: MA Experiment 20001560 PARAMETER Experiment Name: At_Drought_Soil_Dry_P Parameter: Post Timepoint (hr) Value: None
  misc_feature: MA Experiment 20001560 PARAMETER Experiment Name: At_Drought_Soil_Dry_P Parameter: Post-Treatment Value: None
  misc_feature: MA Experiment 20001560 PARAMETER Experiment Name: At_Drought_Soil_Dry_P Parameter: Timepoint (day) Value: 14
  misc_feature: MA Experiment 20001560 PARAMETER Experiment Name: At_Drought_Soil_Dry_P Parameter: Treatment Value: Drought vs. No Drought
  misc_feature: MA Experiment ID: 20001757 Result: Down-regulated in Transcription
  misc_feature: MA Experiment 20001757 PARAMETER Experiment Name: At_50mM_NH4NO3_L-to-H_P Parameter: Timepoint (hr) Value: 6
  misc_feature: MA Experiment 20001757 PARAMETER Experiment Name: At_50mM_NH4NO3_L-to-H_P Parameter: Tissue Value: Leaf
  misc_feature: MA Experiment 20001757 PARAMETER Experiment Name: At_50mM_NH4NO3_L-to-H_P Parameter: Treatment Value: 50mM NH4NO3 vs 100mM Mannitol
  misc_feature: MA Experiment ID: 20001906 Result: Up-regulated in Transcription
  misc_feature: MA Experiment 20001906 PARAMETER Experiment Name: At_Drought_Reproduction_P Parameter: Age (day) Value: 35
  misc_feature: MA Experiment 20001906 PARAMETER Experiment Name: At_Drought_Reproduction_P Parameter: Organism Value: A. thaliana
  misc_feature: MA Experiment 20001906 PARAMETER Experiment Name: At_Drought_Reproduction_P Parameter: Plant Line Value: WS
  misc_feature: MA Experiment 20001906 PARAMETER Experiment Name: At_Drought_Reproduction_P Parameter: Timepoint (day) Value: 5
  misc_feature: MA Experiment 20001906 PARAMETER Experiment Name: At_Drought_Reproduction_P Parameter: Tissue Value: Siliques
  misc_feature: MA Experiment 20001906 PARAMETER Experiment Name: At_Drought_Reproduction_P Parameter: Treatment Value: Drought vs. No Drought
  misc_feature: MA Experiment ID: 20001908 Result: Up-regulated in Transcription
  misc_feature: MA Experiment 20001908 PARAMETER Experiment Name: At_Drought_Reproduction_P Parameter: Age (day) Value: 40
  misc_feature: MA Experiment 20001908 PARAMETER Experiment Name: At_Drought_Reproduction_P Parameter: Organism Value: A. thaliana
  misc_feature: MA Experiment 20001908 PARAMETER Experiment Name: At_Drought_Reproduction_P Parameter: Plant Line Value: WS
  misc_feature: MA Experiment 20001908 PARAMETER Experiment Name: At_Drought_Reproduction_P Parameter: Timepoint (day) Value: 10
  misc_feature: MA Experiment 20001908 PARAMETER Experiment Name: At_Drought_Reproduction_P Parameter: Tissue Value: Siliques
  misc_feature: MA Experiment 20001908 PARAMETER Experiment Name: At_Drought_Reproduction_P Parameter: Treatment Value: Drought vs. No Drought
aaacaaaaatggcggagaaaaagagagtcaagtacttcattgttgatgcattcgctgaatctgccttcaaagggaatccagctgctgtttgctttctagaagacgataacgagagagacgacgcgtggcttcagtctcttgccaccgagttcaatatctccgagacttgtttcctcactccgatcatcggagacttgcctcgcttccgtctccgttggttcactccagtcgctgaggtttccgtgttttcttttggttttggaattcggaattgttcggttgacttgttatcattgacttgatagatcctgataactagaacttgtactcattcactggctcttgtgaatctctctttgctttgctgttattgtgcaggtggatttgtgtggtcatgcaactttagcatctgctcacgttctcttctcaactggtttggttggttcagagacagttgagttcgacacattatcagggattctaacagctaaacatctcaaaaatgatgatgatggagaagaatcaagtatcgaattggatttccctgttgttccaacatatgaagtcaactacattgatgatgatctctctttgttctccaaagccttgaatggagctaccattcttgatgtcaaagccacaaagaaagacctcctcgtaactatatttcaccaactgtctccatttttcctattcttgctatgggaaccaaaatctcgattcttttcgaatggtttgcaggttgtgctttcatcttgggaagctgttattgatttgaagccaagattagatgagatatcgaaatgcccttgtgaaggaatgatggtgactgccgctgcttctgatggatctacttatgatttctgtagtcgctactttgccccgagattcggaatcaatgaggttatcatttagtcttttgctcttagaagattaagagcgagtggtcaaaacagcaaaaacgtgacctcttttgctttctttttactgtgtggctcttcaggaccctgttactggaagtgctcattgtgctttagctcattactggagcctcaggatgaacaagtgtgatttcttcgcctaccaggttctctctctctttctctccacgcagacacttaaaagacaaattctgaagtgattcgtataaagttacctgaagaaagatttggttattattggaatgtgtttaggcttcaagcagaggaggaacgttgaaggtgcacctggacaaagagaagcagagggttctactgagaggcaaagcagtcactgttatggaaggttatgtcttagtgtgattttggctatgatgaaaattcaggctcttgtaaacgatgaaattaataaaagattccatatattctcggatatatataattgtatccattaataaatactcgttttttaagtaacggatagtttcatattttc

SEQ ID NO: 89460 - protein, 99 aa, Arabidopsis thaliana
  peptide (1)..(99): Ceres Seq. ID no. 12718659
  misc_feature (3)..(81): Homolog of NCBI NO: 15218739 NR Description: unknown protein; protein id: At1g03210.1,
  misc_feature (3)..(81): Homolog of NCBI NO: 15236203 NR Description: putative protein; protein id: At4g02860.1, by cDNA: gi_20466357 [Arabidopsis thaliana]
  misc_feature (3)..(81): Homolog of NCBI NO: 20466358 NR Description: putative protein [Arabidopsis thaliana]
  misc_feature (1)..(81): Homolog of NCBI NO: 15236201 NR Description: putative protein; protein id: At4g02850.1
  misc_feature (6)..(81): Homolog of NCBI NO: 34903112 NR Description: unnamed protein product [Oryza sativa (japonica group)] >gi|6630683|dbj|BAA88529.1| unnamed protein product
  misc_feature (14)..(81): Homolog of NCBI NO: 23028680 NR Description: hypothetical protein [Microbulbifer degradans
  misc_feature (10)..(81): Homolog of NCBI NO: 23017885 NR Description: hypothetical protein [Thermobifida fusca]
  misc_feature (14)..(79): Homolog of NCBI NO: 17229436 NR Description: hypothetical protein [Nostoc sp. PCC 7120]
  misc_feature (12)..(81): Homolog of NCBI NO: 15612846 NR Description: BH0283~unknown conserved protein [Bacillus
  misc_feature (12)..(79): Homolog of NCBI NO: 39585666 NR Description: Hypothetical protein CBG03344 [Caenorhabditis
TKMAEKKRVKYFIVDAFAESAFKGNPAAVCFLEDDNERDDAWLQSLATEFNISETCFLTPIIGDLPRFRLRWFTPVAEVSVFSFGFGIRNCSVDLLSLT

SEQ ID NO: 89461 - protein, 97 aa, Arabidopsis thaliana; identical to SEQ ID NO: 36732
  peptide (1)..(97): Ceres Seq. ID no. 12718660
  misc_feature (1)..(79): Homolog of NCBI NO: 15218739 NR Description: unknown protein; protein id: At1g03210.1,
  misc_feature (1)..(79): Homolog of NCBI NO: 15236203 NR Description: putative protein; protein id: At4g02860.1, by cDNA: gi_20466357 [Arabidopsis thaliana]
  misc_feature (1)..(79): Homolog of NCBI NO: 20466358 NR Description: putative protein [Arabidopsis thaliana]
  misc_feature (1)..(79): Homolog of NCBI NO: 15236201 NR Description: putative protein; protein id: At4g02850.1
  misc_feature (4)..(79): Homolog of NCBI NO: 34903112 NR Description: unnamed protein product [Oryza sativa (japonica group)] >gi|6630683|dbj|BAA88529.1| unnamed protein product
  misc_feature (12)..(79): Homolog of NCBI NO: 23028680 NR Description: hypothetical protein [Microbulbifer degradans
  misc_feature (8)..(79): Homolog of NCBI NO: 23017885 NR Description: hypothetical protein [Thermobifida fusca]
  misc_feature (12)..(77): Homolog of NCBI NO: 17229436 NR Description: hypothetical protein [Nostoc sp. PCC 7120]
  misc_feature (10)..(79): Homolog of NCBI NO: 15612846 NR Description: BH0283~unknown conserved protein [Bacillus
  misc_feature (10)..(77): Homolog of NCBI NO: 39585666 NR Description: Hypothetical protein CBG03344 [Caenorhabditis

SEQ ID NO: 89462 - protein, 69 aa, Arabidopsis thaliana
  peptide (1)..(69): Ceres Seq. ID no. 12718661
MCLGFKQRRNVEGAPGQREAEGSTERQSSHCYGRLCLSVILAMMKIQALVNDEINKRFHIFSDIYNCIH

SEQ ID NO: 89463 - DNA, 1194 bp, Arabidopsis thaliana
  misc_feature (1)..(1194): Ceres Seq. ID no. 12718662
  misc_feature: MA Experiment ID: 20000179 Result: Down-regulated in Transcription
  misc_feature: MA Experiment 20000179 PARAMETER Experiment Name: At_Germinating_Seeds_P Parameter: Age (hr) Value: 6 vs. 0
  misc_feature: MA Experiment 20000179 PARAMETER Experiment Name: At_Germinating_Seeds_P Parameter: Tissue Value: Germinating Seeds
  misc_feature: MA Experiment ID: 20000180 Result: Down-regulated in Transcription
  misc_feature: MA Experiment 20000180 PARAMETER Experiment Name: At_Germinating_Seeds_P Parameter: Age (hr) Value: 24 vs. 0
  misc_feature: MA Experiment 20000180 PARAMETER Experiment Name: At_Germinating_Seeds_P Parameter: Tissue Value: Germinating Seeds
  misc_feature: MA Experiment ID: 20000184 Result: Up-regulated in Transcription
  misc_feature: MA Experiment 20000184 PARAMETER Experiment Name: At_Shoots__P Parameter: Age (day) Value: 7
  misc_feature: MA Experiment 20000184 PARAMETER Experiment Name: At_Shoots__P Parameter: Tissue Value: Shoots vs. Whole Plant
  misc_feature: MA Experiment ID: 20000437 Result: Down-regulated in Transcription
  misc_feature: MA Experiment 20000437 PARAMETER Experiment Name: At_Drought_P Parameter: Age (day) Value: 8
  misc_feature: MA Experiment 20000437 PARAMETER Experiment Name: At_Drought_P Parameter: Organism Value: A. thaliana
  misc_feature: MA Experiment 20000437 PARAMETER Experiment Name: At_Drought_P Parameter: Plant Line Value: WS
  misc_feature: MA Experiment 20000437 PARAMETER Experiment Name: At_Drought_P Parameter: Timepoint (hr) Value: 24
  misc_feature: MA Experiment 20000437 PARAMETER Experiment Name: At_Drought_P Parameter: Tissue Value: Whole Plant
  misc_feature: MA Experiment 20000437 PARAMETER Experiment Name: At_Drought_P Parameter: Treatment Value: Drought vs. No Drought
  misc_feature: MA Experiment ID: 20000438 Result: Up-regulated in Transcription
  misc_feature: MA Experiment 20000438 PARAMETER Experiment Name: At_Shoots__P Parameter: Age (day) Value: 14
  misc_feature: MA Experiment 20000438 PARAMETER Experiment Name: At_Shoots__P Parameter: Tissue Value: Shoots vs. Whole Plant
  misc_feature: MA Experiment ID: 20001248 Result: Down-regulated in Transcription
  misc_feature: MA Experiment 20001248 PARAMETER Experiment Name: At_Far-red-induction_P Parameter: Age (day) Value: 7
  misc_feature: MA Experiment 20001248 PARAMETER Experiment Name: At_Far-red-induction_P Parameter: Light Value: Far-red vs. White
  misc_feature: MA Experiment 20001248 PARAMETER Experiment Name: At_Far-red-induction_P Parameter: Organism Value: A. thaliana
  misc_feature: MA Experiment 20001248 PARAMETER Experiment Name: At_Far-red-induction_P Parameter: Plant Line Value: Columbia
  misc_feature: MA Experiment 20001248 PARAMETER Experiment Name: At_Far-red-induction_P Parameter: Timepoint (hr) Value: 4
  misc_feature: MA Experiment 20001248 PARAMETER Experiment Name: At_Far-red-induction_P Parameter: Tissue Value: Whole Plant
atgatgatgagatttaccaagttggtttggtgtttgatgttcctgcttcgattcggcttcttcacggaggcgattctcgacccagttgatttcttggctctgcaagctattcgtaaatccctcgatgacttgccaggttccaagttcttcgagtcttgggatttcacttctgatccatgcggcttcgctggcgtctactgcaacggagataaagtaatctctctcaatctcggcgatcctagagccggttcacccggtttatcgggtcggatcgacccagcaataggcaaactctctgcactcactgagctctccattgtccccggcagaatcatgggtgcgttaccggcaacaatctctcagctaaaagaccttcgttttctcgcaatcagccggaatttcatctccggcgagattccggcgagtctcggcgaggttcgtggtctcagaacactggatttaagctataatcaattaaccggaactatctctccgtcaatcggatcgttaccggagctctccaatttgattctctgccacaaccacttaaccggatcaataccaccgtttctctcacaaactctaacccgaatcgatctcaaacgcaacagcctcaccggctcaatctcaccggcgtctctccctccgtcgcttcaatacctctcactcgcttggaaccagttaaccggatcggtataccatgttttactccggttgaaccagcttaactaccttgatctcagcttaaaccggttcaccggtacaatccccgctcgagtcttcgccttcccgatcacaaatcttcagttacaacgcaatttcttcttcggtttaattcagccggcgaatcaagtgacgatctccaccgtcgatctcagctacaatcgattctccggtgggatatctccgcttctctcaagcgttgagaatctctacttaaacagcaatcgtttcaccggtgaagtcccggcgagtttcgtggagaggttgttatcggcgaacatacagactctgtatctacagcataatttcttgacgggaatacagattagcccggcggcggaaatcccggtgagcagctcgctgtgtctgcagtataactgtatggtgccgccgttacaaaccccgtgtccgctaaaggccggcccacaaaagactaggcccactacacaatgcaccgagtggcgagggtag

SEQ ID NO: 89464 - protein, 397 aa, Arabidopsis thaliana
  peptide (1)..(397): Ceres Seq. ID no. 12718663
  misc_feature (241)..(264): Pfam Name: Leucine Rich Repeat Pfam Description: Leucine Rich Repeat
  misc_feature (1)..(397): Homolog of NCBI NO: 30678566 NR Description: leucine rich repeat protein family [Arabidopsis
  misc_feature (3)..(397): Homolog of NCBI NO: 25406734 NR Description: protein F21B7.6 [imported] - Arabidopsis thaliana F21B7.6 [Arabidopsis thaliana]
  misc_feature (3)..(397): Homolog of NCBI NO: 15236232 NR Description: leucine rich repeat protein family; protein id:
  misc_feature (13)..(395): Homolog of NCBI NO: 15229088 NR Description: leucine rich repeat protein family; protein id:
  misc_feature (9)..(393): Homolog of NCBI NO: 15231699 NR Description: leucine rich repeat protein family; protein id:
  misc_feature (33)..(373): Homolog of NCBI NO: 15241760 NR Description: putative protein; protein id: At5g62230.1
  misc_feature (34)..(352): Homolog of NCBI NO: 15225286 NR Description: putative receptor-like protein kinase, ERECTA; id: At2g26330.1, supported by cDNA: gi_1345131, supported by
  misc_feature (33)..(347): Homolog of NCBI NO: 8809636 NR Description: receptor-like protein kinase [Arabidopsis
  misc_feature (87)..(347): Homolog of NCBI NO: 3894385 NR Description: Hcr2-0A [Lycopersicon esculentum]
  misc_feature (12)..(297): Homolog of NCBI NO: 15217600 NR Description: leucine rich repeat protein family; protein id: [Arabidopsis thaliana] >gi|25511729|pir||A86460 99.9K
MMMRFTKLVWCLMFLLRFGFFTEAILDPVDFLALQAIRKSLDDLPGSKFFESWDFTSDPCGFAGVYCNGDKVISLNLGDPRAGSPGLSGRIDPAIGKLSALTELSIVPGRIMGALPATISQLKDLRFLAISRNFISGEIPASLGEVRGLRTLDLSYNQLTGTISPSIGSLPELSNLILCHNHLTGSIPPFLSQTLTRIDLKRNSLTGSISPASLPPSLQYLSLAWNQLTGSVYHVLLRLNQLNYLDLSLNRFTGTIPARVFAFPITNLQLQRNFFFGLIQPANQVTISTVDLSYNRFSGGISPLLSSVENLYLNSNRFTGEVPASFVERLLSANIQTLYLQHNFLTGIQISPAAEIPVSSSLCLQYNCMVPPLQTPCPLKAGPQKTRPTTQCTEWRG

SEQ ID NO: 89465 - protein, 396 aa, Arabidopsis thaliana
  peptide (1)..(396): Ceres Seq. ID no. 12718664
  misc_feature (240)..(263): Pfam Name: Leucine Rich Repeat Pfam Description: Leucine Rich Repeat
  misc_feature (1)..(396): Homolog of NCBI NO: 30678566 NR Description: leucine rich repeat protein family [Arabidopsis
  misc_feature (2)..(396): Homolog of NCBI NO: 25406734 NR Description: protein F21B7.6 [imported] - Arabidopsis thaliana F21B7.6 [Arabidopsis thaliana]
  misc_feature (2)..(396): Homolog of NCBI NO: 15236232 NR Description: leucine rich repeat protein family; protein id:
  misc_feature (12)..(394): Homolog of NCBI NO: 15229088 NR Description: leucine rich repeat protein family; protein id:
  misc_feature (8)..(392): Homolog of NCBI NO: 15231699 NR Description: leucine rich repeat protein family; protein id:
  misc_feature (32)..(372): Homolog of NCBI NO: 15241760 NR Description: putative protein; protein id: At5g62230.1
  misc_feature (33)..(351): Homolog of NCBI NO: 15225286 NR Description: putative receptor-like protein kinase, ERECTA; id: At2g26330.1, supported by cDNA: gi_1345131, supported by
  misc_feature (32)..(346): Homolog of NCBI NO: 8809636 NR Description: receptor-like protein kinase [Arabidopsis
  misc_feature (86)..(346): Homolog of NCBI NO: 3894385 NR Description: Hcr2-0A [Lycopersicon esculentum]
  misc_feature (11)..(296): Homolog of NCBI NO: 15217600 NR Description: leucine rich repeat protein family; protein id: [Arabidopsis thaliana] >gi|25511729|pir||A86460 99.9K
MMRFTKLVWCLMFLLRFGFFTEAILDPVDFLALQAIRKSLDDLPGSKFFESWDFTSDPCGFAGVYCNGDKVISLNLGDPRAGSPGLSGRIDPAIGKLSALTELSIVPGRIMGALPATISQLKDLRFLAISRNFISGEIPASLGEVRGLRTLDLSYNQLTGTISPSIGSLPELSNLILCHNHLTGSIPPFLSQTLTRIDLKRNSLTGSISPASLPPSLQYLSLAWNQLTGSVYHVLLRLNQLNYLDLSLNRFTGTIPARVFAFPITNLQLQRNFFFGLIQPANQVTISTVDLSYNRFSGGISPLLSSVENLYLNSNRFTGEVPASFVERLLSANIQTLYLQHNFLTGIQISPAAEIPVSSSLCLQYNCMVPPLQTPCPLKAGPQKTRPTTQCTEWRG

SEQ ID NO: 89466 - protein, 395 aa, Arabidopsis thaliana; identical to SEQ ID NO: 80693
  peptide (1)..(395): Ceres Seq. ID no. 12718665
  misc_feature (239)..(262): Pfam Name: Leucine Rich Repeat Pfam Description: Leucine Rich Repeat
  misc_feature (1)..(395): Homolog of NCBI NO: 30678566 NR Description: leucine rich repeat protein family [Arabidopsis
  misc_feature (1)..(395): Homolog of NCBI NO: 25406734 NR Description: protein F21B7.6 [imported] - Arabidopsis thaliana F21B7.6 [Arabidopsis thaliana]
  misc_feature (1)..(395): Homolog of NCBI NO: 15236232 NR Description: leucine rich repeat protein family; protein id:
  misc_feature (11)..(393): Homolog of NCBI NO: 15229088 NR Description: leucine rich repeat protein family; protein id:
  misc_feature (7)..(391): Homolog of NCBI NO: 15231699 NR Description: leucine rich repeat protein family; protein id:
  misc_feature (31)..(371): Homolog of NCBI NO: 15241760 NR Description: putative protein; protein id: At5g62230.1
  misc_feature (32)..(350): Homolog of NCBI NO: 15225286 NR Description: putative receptor-like protein kinase, ERECTA; id: At2g26330.1, supported by cDNA: gi_1345131, supported by
  misc_feature (31)..(345): Homolog of NCBI NO: 8809636 NR Description: receptor-like protein kinase [Arabidopsis
  misc_feature (85)..(345): Homolog of NCBI NO: 3894385 NR Description: Hcr2-0A [Lycopersicon esculentum]
  misc_feature (10)..(295): Homolog of NCBI NO: 15217600 NR Description: leucine rich repeat protein family; protein id: [Arabidopsis thaliana] >gi|25511729|pir||A86460 99.9K

SEQ ID NO: 89467 - protein, 385 aa, Arabidopsis thaliana; identical to SEQ ID NO: 80694
  peptide (1)..(385): Ceres Seq. ID no. 12718666
  misc_feature (229)..(252): Pfam Name: Leucine Rich Repeat Pfam Description: Leucine Rich Repeat
  misc_feature (1)..(385): Homolog of NCBI NO: 30678566 NR Description: leucine rich repeat protein family [Arabidopsis
  misc_feature (1)..(385): Homolog of NCBI NO: 25406734 NR Description: protein F21B7.6 [imported] - Arabidopsis thaliana F21B7.6 [Arabidopsis thaliana]
  misc_feature (1)..(385): Homolog of NCBI NO: 15236232 NR Description: leucine rich repeat protein family; protein id:
  misc_feature (1)..(383): Homolog of NCBI NO: 15229088 NR Description: leucine rich repeat protein family; protein id:
  misc_feature (1)..(381): Homolog of NCBI NO: 15231699 NR Description: leucine rich repeat protein family; protein id:
  misc_feature (21)..(361): Homolog of NCBI NO: 15241760 NR Description: putative protein; protein id: At5g62230.1
  misc_feature (22)..(340): Homolog of NCBI NO: 15225286 NR Description: putative receptor-like protein kinase, ERECTA; id: At2g26330.1, supported by cDNA: gi_1345131, supported by
  misc_feature (21)..(335): Homolog of NCBI NO: 8809636 NR Description: receptor-like protein kinase [Arabidopsis
  misc_feature (75)..(335): Homolog of NCBI NO: 3894385 NR Description: Hcr2-0A [Lycopersicon esculentum]
  misc_feature (1)..(285): Homolog of NCBI NO: 15217600 NR Description: leucine rich repeat protein family; protein id: [Arabidopsis thaliana] >gi|25511729|pir||A86460 99.9K

SEQ ID NO: 89468 - DNA, 1023 bp, Arabidopsis thaliana
  misc_feature (1)..(1023): Ceres Seq. ID no. 12718950
  misc_feature: MA Experiment ID: 20000314 Result: Up-regulated in Transcription
  misc_feature: MA Experiment 20000314 PARAMETER Experiment Name: At_14day_Shoots-Roots_Sub_P Parameter: Age (day) Value: 14
  misc_feature: MA Experiment 20000314 PARAMETER Experiment Name: At_14day_Shoots-Roots_Sub_P Parameter: Organism Value: A. thaliana
  misc_feature: MA Experiment 20000314 PARAMETER Experiment Name: At_14day_Shoots-Roots_Sub_P Parameter: Plant Line Value: WS
  misc_feature: MA Experiment 20000314 PARAMETER Experiment Name: At_14day_Shoots-Roots_Sub_P Parameter: Tissue Value: Roots vs. Whole Plant
atgaaaacatttaaggtgtggtcgtacaaagaaggagagcagccactggttcacgatggaccggtaaatgatatctacggaatcgagggacagttcattgacgagcttagttacgtgatgggcggaccaagtggccggtttagagctagccggccagaagaagcccatgccttcttcttacccttctccgttgccaacattgttcactacgtctaccaacccattacctcgccagccgatttcaaccgggcccgtctccaccggatttttaacgattatgtagacgtagtggctcacaagcaccctttttggaaccaaagcaatggtgctgaccatttcatggtctcttgccacgattgggctcccgatgtgccagatagtaaaccagagtttttcaagaacttcatgagaggactatgcaacgccaacacatcggaaggtttcagacgaaacatcgatttctctataccggagattaacattcctaaaaggaagctaaagccaccatttatgggacaaaaccctgagaacaggacgatcttggctttcttcgcaggaagagctcacggatacattagggaagttttgttcagtcactggaagggtaaggataaagacgttcaagtttatgaccacctcacaaagggacaaaactatcatgaattgattggtcatagcaagttttgtctttgtcctagtggctacgaggtggctagtcctagagaggtcgaagccatctactcaggctgcgtcccggttgtcatatcggacaactactcgcttccgttcaacgacgtgcttgattggagcaagttctcggttgagatcccggtcgacaaaattcctgatattaagaagattttgcaagagattccacatgacaaatatttaaggatgtatcgaaatgttatgaaagttagaaggcattttgtggtgaaccgtccggctcaaccatttgatgtgatccacatgattcttcactcggtttggttaaggaggcttaacattaggttgccttcttga

SEQ ID NO: 89469 - protein, 340 aa, Arabidopsis thaliana
  peptide (1)..(340): Ceres Seq. ID no. 12718951
  misc_feature (17)..(303): Pfam Name: Exostosin family Pfam Description: Exostosin family
  misc_feature (1)..(340): Homolog of NCBI NO: 11358246 NR Description: hypothetical protein T27B3.50 - Arabidopsis >gi|6735291|emb|CAB68119.1| putative protein [Arabidopsis
  misc_feature (1)..(340): Homolog of NCBI NO: 30690502 NR Description: Exostosin family [Arabidopsis thaliana]
  misc_feature (1)..(338): Homolog of NCBI NO: 15242798 NR Description: Exostosin family; protein id: At5g33290.1
  misc_feature (1)..(338): Homolog of NCBI NO: 15146187 NR Description: AT5g33290/F19N2_10 [Arabidopsis thaliana]
  misc_feature (2)..(339): Homolog of NCBI NO: 15241301 NR Description: Exostosin family; protein id: At5g20260.1
  misc_feature (2)..(339): Homolog of NCBI NO: 15238967 NR Description: Exostosin family; protein id: At5g11130.1 thaliana] >gi|8953375|emb|CAB96648.1| putative protein
  misc_feature (2)..(338): Homolog of NCBI NO: 9758008 NR Description: contains similarity to limonene
  misc_feature (2)..(338): Homolog of NCBI NO: 15237526 NR Description: putative protein; protein id: At5g03800.1
  misc_feature (2)..(338): Homolog of NCBI NO: 15231488 NR Description: Exostosin family; protein id: At3g07620.1 thaliana] >gi|6466945|gb|AAF13080.1|AC009176_7 hypothetical
  misc_feature (2)..(338): Homolog of NCBI NO: 34394611 NR Description: putative pectin-glucuronyltransferase [Oryza
MKTFKVWSYKEGEQPLVHDGPVNDIYGIEGQFIDELSYVMGGPSGRFRASRPEEAHAFFLPFSVANIVHYVYQPITSPADFNRARLHRIFNDYVDVVAHKHPFWNQSNGADHFMVSCHDWAPDVPDSKPEFFKNFMRGLCNANTSEGFRRNIDFSIPEINIPKRKLKPPFMGQNPENRTILAFFAGRAHGYIREVLFSHWKGKDKDVQVYDHLTKGQNYHELIGHSKFCLCPSGYEVASPREVEAIYSGCVPVVISDNYSLPFNDVLDWSKFSVEIPVDKIPDIKKILQEIPHDKYLRMYRNVMKVRRHFVVNRPAQPFDVIHMILHSVWLRRLNIRLPS

SEQ ID NO: 89470 - protein, 301 aa, Arabidopsis thaliana
  peptide (1)..(301): Ceres Seq. ID no. 12718952
  misc_feature (1)..(264): Pfam Name: Exostosin family Pfam Description: Exostosin family
  misc_feature (1)..(301): Homolog of NCBI NO: 11358246 NR Description: hypothetical protein T27B3.50 - Arabidopsis >gi|6735291|emb|CAB68119.1| putative protein [Arabidopsis
  misc_feature (1)..(301): Homolog of NCBI NO: 30690502 NR Description: Exostosin family [Arabidopsis thaliana]
  misc_feature (1)..(299): Homolog of NCBI NO: 15242798 NR Description: Exostosin family; protein id: At5g33290.1
  misc_feature (1)..(299): Homolog of NCBI NO: 15146187 NR Description: AT5g33290/F19N2_10 [Arabidopsis thaliana]
  misc_feature (1)..(300): Homolog of NCBI NO: 15241301 NR Description: Exostosin family; protein id: At5g20260.1
  misc_feature (1)..(300): Homolog of NCBI NO: 15238967 NR Description: Exostosin family; protein id: At5g11130.1 thaliana] >gi|8953375|emb|CAB96648.1| putative protein
  misc_feature (1)..(299): Homolog of NCBI NO: 9758008 NR Description: contains similarity to limonene
  misc_feature (1)..(299): Homolog of NCBI NO: 15237526 NR Description: putative protein; protein id: At5g03800.1
  misc_feature (1)..(299): Homolog of NCBI NO: 15231488 NR Description: Exostosin family; protein id: At3g07620.1 thaliana] >gi|6466945|gb|AAF13080.1|AC009176_7 hypothetical
  misc_feature (1)..(299): Homolog of NCBI NO: 34394611 NR Description: putative pectin-glucuronyltransferase [Oryza
MGGPSGRFRASRPEEAHAFFLPFSVANIVHYVYQPITSPADFNRARLHRIFNDYVDVVAHKHPFWNQSNGADHFMVSCHDWAPDVPDSKPEFFKNFMRGLCNANTSEGFRRNIDFSIPEINIPKRKLKPPFMGQNPENRTILAFFAGRAHGYIREVLFSHWKGKDKDVQVYDHLTKGQNYHELIGHSKFCLCPSGYEVASPREVEAIYSGCVPVVISDNYSLPFNDVLDWSKFSVEIPVDKIPDIKKILQEIPHDKYLRMYRNVMKVRRHFVVNRPAQPFDVIHMILHSVWLRRLNIRLPS

SEQ ID NO: 89471 - protein, 227 aa, Arabidopsis thaliana
  peptide (1)..(227): Ceres Seq. ID no. 12718953
  misc_feature (1)..(190): Pfam Name: Exostosin family Pfam Description: Exostosin family
  misc_feature (1)..(227): Homolog of NCBI NO: 11358246 NR Description: hypothetical protein T27B3.50 - Arabidopsis >gi|6735291|emb|CAB68119.1| putative protein [Arabidopsis
  misc_feature (1)..(227): Homolog of NCBI NO: 30690502 NR Description: Exostosin family [Arabidopsis thaliana]
  misc_feature (1)..(225): Homolog of NCBI NO: 15242798 NR Description: Exostosin family; protein id: At5g33290.1
  misc_feature (1)..(225): Homolog of NCBI NO: 15146187 NR Description: AT5g33290/F19N2_10 [Arabidopsis thaliana]
  misc_feature (1)..(226): Homolog of NCBI NO: 15241301 NR Description: Exostosin family; protein id: At5g20260.1
  misc_feature (1)..(226): Homolog of NCBI NO: 15238967 NR Description: Exostosin family; protein id: At5g11130.1 thaliana] >gi|8953375|emb|CAB96648.1| putative protein
  misc_feature (1)..(225): Homolog of NCBI NO: 9758008 NR Description: contains similarity to limonene
  misc_feature (1)..(225): Homolog of NCBI NO: 15237526 NR Description: putative protein; protein id: At5g03800.1
  misc_feature (1)..(225): Homolog of NCBI NO: 15231488 NR Description: Exostosin family; protein id: At3g07620.1 thaliana] >gi|6466945|gb|AAF13080.1|AC009176_7 hypothetical
  misc_feature (1)..(225): Homolog of NCBI NO: 34394611 NR Description: putative pectin-glucuronyltransferase [Oryza
MVSCHDWAPDVPDSKPEFFKNFMRGLCNANTSEGFRRNIDFSIPEINIPKRKLKPPFMGQNPENRTILAFFAGRAHGYIREVLFSHWKGKDKDVQVYDHLTKGQNYHELIGHSKFCLCPSGYEVASPREVEAIYSGCVPVVISDNYSLPFNDVLDWSKFSVEIPVDKIPDIKKILQEIPHDKYLRMYRNVMKVRRHFVVNRPAQPFDVIHMILHSVWLRRLNIRLPS

SEQ ID NO: 89472 - DNA, 2008 bp, Arabidopsis thaliana
  misc_feature (1)..(2008): Ceres Seq. ID no. 12719052
  misc_feature: MA Experiment ID: 20000169 Result: Up-regulated in Transcription
  misc_feature: MA Experiment 20000169 PARAMETER Experiment Name: At_100uM_ABA_P Parameter: Age (day) Value: 14
  misc_feature: MA Experiment 20000169 PARAMETER Experiment Name: At_100uM_ABA_P Parameter: Organism Value: A. thaliana
  misc_feature: MA Experiment 20000169 PARAMETER Experiment Name: At_100uM_ABA_P Parameter: Plant Line Value: WS
  misc_feature: MA Experiment 20000169 PARAMETER Experiment Name: At_100uM_ABA_P Parameter: Timepoint (hr) Value: 6
  misc_feature: MA Experiment 20000169 PARAMETER Experiment Name: At_100uM_ABA_P Parameter: Tissue Value: Aerial
  misc_feature: MA Experiment 20000169 PARAMETER Experiment Name: At_100uM_ABA_P Parameter: Treatment Value: 100uM ABA vs. No Treatment
  misc_feature: MA Experiment ID: 20000171 Result: Up-regulated in Transcription
  misc_feature: MA Experiment 20000171 PARAMETER Experiment Name: At_42deg_Heat_P Parameter: Age (day) Value: 14
  misc_feature: MA Experiment 20000171 PARAMETER Experiment Name: At_42deg_Heat_P Parameter: Organism Value: A. thaliana
  misc_feature: MA Experiment 20000171 PARAMETER Experiment Name: At_42deg_Heat_P Parameter: Plant Line Value: WS
  misc_feature: MA Experiment 20000171 PARAMETER Experiment Name: At_42deg_Heat_P Parameter: Temperature (deg C) Value: 42 vs. 22
  misc_feature: MA Experiment 20000171 PARAMETER Experiment Name: At_42deg_Heat_P Parameter: Timepoint (hr) Value: 1
  misc_feature: MA Experiment 20000171 PARAMETER Experiment Name: At_42deg_Heat_P Parameter: Tissue Value: Aerial
  misc_feature: MA Experiment ID: 20000173 Result: Up-regulated in Transcription
  misc_feature: MA Experiment 20000173 PARAMETER Experiment Name: At_42deg_Heat_P Parameter: Age (day) Value: 14
  misc_feature: MA Experiment 20000173 PARAMETER Experiment Name: At_42deg_Heat_P Parameter: Organism Value: A. thaliana
  misc_feature: MA Experiment 20000173 PARAMETER Experiment Name: At_42deg_Heat_P Parameter: Plant Line Value: WS
  misc_feature: MA Experiment 20000173 PARAMETER Experiment Name: At_42deg_Heat_P Parameter: Temperature (deg C) Value: 42 vs. 22
  misc_feature: MA Experiment 20000173 PARAMETER Experiment Name: At_42deg_Heat_P Parameter: Timepoint (hr) Value: 6
  misc_feature: MA Experiment 20000173 PARAMETER Experiment Name: At_42deg_Heat_P Parameter: Tissue Value: Aerial
  misc_feature: MA Experiment ID: 20000180 Result: Up-regulated in Transcription
  misc_feature: MA Experiment 20000180 PARAMETER Experiment Name: At_Germinating_Seeds_P Parameter: Age (hr) Value: 24 vs. 0
  misc_feature: MA Experiment 20000180 PARAMETER Experiment Name: At_Germinating_Seeds_P Parameter: Tissue Value: Germinating Seeds
  misc_feature: MA Experiment ID: 20000184 Result: Up-regulated in Transcription
  misc_feature: MA Experiment 20000184 PARAMETER Experiment Name: At_Shoots__P Parameter: Age (day) Value: 7
  misc_feature: MA Experiment 20000184 PARAMETER Experiment Name: At_Shoots__P Parameter: Tissue Value: Shoots vs. Whole Plant
  misc_feature: MA Experiment ID: 20000234 Result: Down-regulated in Transcription
  misc_feature: MA Experiment 20000234 PARAMETER Experiment Name: At_Siliques_P Parameter: Age (day) Value: 21
  misc_feature: MA Experiment 20000234 PARAMETER Experiment Name: At_Siliques_P Parameter: Organism Value: A. thaliana
  misc_feature: MA Experiment 20000234 PARAMETER Experiment Name: At_Siliques_P Parameter: Plant Line Value: WS
  misc_feature: MA Experiment 20000234 PARAMETER Experiment Name: At_Siliques_P Parameter: Tissue Value: Less Than 5mm Siliques vs. Whole Plant
  misc_feature: MA Experiment ID: 20000265 Result: Down-regulated in Transcription
  misc_feature: MA Experiment 20000265 PARAMETER Experiment Name: At_Open_Flower_P Parameter: Age (day) Value: 21
  misc_feature: MA Experiment 20000265 PARAMETER Experiment Name: At_Open_Flower_P Parameter: Plant Line Value: WS
  misc_feature: MA Experiment 20000265 PARAMETER Experiment Name: At_Open_Flower_P Parameter: Tissue Value: Closed Flower vs. Whole Plant
  misc_feature: MA Experiment ID: 20000269 Result: Down-regulated in Transcription
  misc_feature: MA Experiment 20000269 PARAMETER Experiment Name: At_1mM_KNO3_L-vs-H_Roots_P Parameter: Age (day) Value: 7,10,12
  misc_feature: MA Experiment 20000269 PARAMETER Experiment Name: At_1mM_KNO3_L-vs-H_Roots_P Parameter: Organism Value: A. thaliana
  misc_feature: MA Experiment 20000269 PARAMETER Experiment Name: At_1mM_KNO3_L-vs-H_Roots_P Parameter: Plant Line Value: WS
  misc_feature: MA Experiment 20000269 PARAMETER Experiment Name: At_1mM_KNO3_L-vs-H_Roots_P Parameter: Timepoint (day) Value: 7,10,12
  misc_feature: MA Experiment 20000269 PARAMETER Experiment Name: At_1mM_KNO3_L-vs-H_Roots_P Parameter: Tissue Value: Roots
  misc_feature: MA Experiment 20000269 PARAMETER Experiment Name: At_1mM_KNO3_L-vs-H_Roots_P Parameter: Treatment Value: 1mM KNO3 vs. 50mM KNO3
  misc_feature: MA Experiment ID: 20000438 Result: Up-regulated in Transcription
  misc_feature: MA Experiment 20000438 PARAMETER Experiment Name: At_Shoots__P Parameter: Age (day) Value: 14
  misc_feature: MA Experiment 20000438 PARAMETER Experiment Name: At_Shoots__P Parameter: Tissue Value: Shoots vs. Whole Plant
  misc_feature: MA Experiment ID: 20000495 Result: Up-regulated in Transcription
  misc_feature: MA Experiment 20000495 PARAMETER Experiment Name: At_Guard_Cells_P Parameter: Harvest Date Value: 8/2/2002
  misc_feature: MA Experiment 20000495 PARAMETER Experiment Name: At_Guard_Cells_P Parameter: Organism Value: A. thaliana
  misc_feature: MA Experiment 20000495 PARAMETER Experiment Name: At_Guard_Cells_P Parameter: Tissue Value: Guard Cells vs. Leaves
  misc_feature: MA Experiment ID: 20000576 Result: Up-regulated in Transcription
  misc_feature: MA Experiment 20000576 PARAMETER Experiment Name: At_100uM_ABA_Mutants__P Parameter: Organism Value: A. thaliana
  misc_feature: MA Experiment 20000576 PARAMETER Experiment Name: At_100uM_ABA_Mutants__P Parameter: Plant Line Value: CS23
  misc_feature: MA Experiment 20000576 PARAMETER Experiment Name: At_100uM_ABA_Mutants__P Parameter: Timepoint (hr) Value: 6
  misc_feature: MA Experiment 20000576 PARAMETER Experiment Name: At_100uM_ABA_Mutants__P Parameter: Tissue Value: Whole Plant
  misc_feature: MA Experiment 20000576 PARAMETER Experiment Name: At_100uM_ABA_Mutants__P Parameter: Treatment Value: 1uM ABA vs. No Treatment
  misc_feature: MA Experiment ID: 20000794 Result: Up-regulated in Transcription
  misc_feature: MA Experiment 20000794 PARAMETER Experiment Name: At_Petals_P Parameter: Age (day) Value: 23-25 days
  misc_feature: MA Experiment 20000794 PARAMETER Experiment Name: At_Petals_P Parameter: Plant Line Value: WS
  misc_feature: MA Experiment 20000794 PARAMETER Experiment Name: At_Petals_P Parameter: Tissue Value: Petals vs. Whole plant
  misc_feature: MA Experiment ID: 20001248 Result: Down-regulated in Transcription
  misc_feature: MA Experiment 20001248 PARAMETER Experiment Name: At_Far-red-induction_P Parameter: Age (day) Value: 7
  misc_feature: MA Experiment 20001248 PARAMETER Experiment Name: At_Far-red-induction_P Parameter: Light Value: Far-red vs. White
  misc_feature: MA Experiment 20001248 PARAMETER Experiment Name: At_Far-red-induction_P Parameter: Organism Value: A. thaliana
  misc_feature: MA Experiment 20001248 PARAMETER Experiment Name: At_Far-red-induction_P Parameter: Plant Line Value: Columbia
  misc_feature: MA Experiment 20001248 PARAMETER Experiment Name: At_Far-red-induction_P Parameter: Timepoint (hr) Value: 4
  misc_feature: MA Experiment 20001248 PARAMETER Experiment Name: At_Far-red-induction_P Parameter: Tissue Value: Whole Plant
  misc_feature: MA Experiment ID: 20001450 Result: Up-regulated in Transcription
  misc_feature: MA Experiment 20001450 PARAMETER Experiment Name: At_Far-red-induction_P Parameter: Age (day) Value: 7
  misc_feature: MA Experiment 20001450 PARAMETER Experiment Name: At_Far-red-induction_P Parameter: Light Value: Far-red vs. White
  misc_feature: MA Experiment 20001450 PARAMETER Experiment Name: At_Far-red-induction_P Parameter: Organism Value: A. thaliana
  misc_feature: MA Experiment 20001450 PARAMETER Experiment Name: At_Far-red-induction_P Parameter: Plant Line Value: Columbia
  misc_feature: MA Experiment 20001450 PARAMETER Experiment Name: At_Far-red-induction_P Parameter: Timepoint (hr) Value: 8
  misc_feature: MA Experiment 20001450 PARAMETER Experiment Name: At_Far-red-induction_P Parameter: Tissue Value: Whole Plant
  misc_feature: MA Experiment ID: 20001457 Result: Down-regulated in Transcription
  misc_feature: MA Experiment 20001457 PARAMETER Experiment Name: At_50mM_NH4NO3_L-to-H_P Parameter: Age (day) Value: Undefined
  misc_feature: MA Experiment 20001457 PARAMETER Experiment Name: At_50mM_NH4NO3_L-to-H_P Parameter: Organism Value: Undefined
  misc_feature: MA Experiment 20001457 PARAMETER Experiment Name: At_50mM_NH4NO3_L-to-H_P Parameter: Plant Line Value: Undefined
  misc_feature: MA Experiment 20001457 PARAMETER Experiment Name: At_50mM_NH4NO3_L-to-H_P Parameter: Timepoint (hr) Value: 0.5
  misc_feature: MA Experiment 20001457 PARAMETER Experiment Name: At_50mM_NH4NO3_L-to-H_P Parameter: Tissue Value: Siliques
  misc_feature: MA Experiment 20001457 PARAMETER Experiment Name: At_50mM_NH4NO3_L-to-H_P Parameter: Treatment Value: 50mM NH4NO3 vs. 100mM Manitol
  misc_feature: MA Experiment ID: 20001557 Result: Down-regulated in Transcription
  misc_feature: MA Experiment 20001557 PARAMETER Experiment Name: At_Drought_Soil_Dry_P Parameter: Age (day) Value: 27
  misc_feature: MA Experiment 20001557 PARAMETER Experiment Name: At_Drought_Soil_Dry_P Parameter: Organism Value: A. thaliana
  misc_feature: MA Experiment 20001557 PARAMETER Experiment Name: At_Drought_Soil_Dry_P Parameter: Plant Line Value: WS
  misc_feature: MA Experiment 20001557 PARAMETER Experiment Name: At_Drought_Soil_Dry_P Parameter: Post Timepoint (hr) Value: 3
  misc_feature: MA Experiment 20001557 PARAMETER Experiment Name: At_Drought_Soil_Dry_P Parameter: Post-Treatment Value: Re-Water vs. No Drought
  misc_feature: MA Experiment 20001557 PARAMETER Experiment Name: At_Drought_Soil_Dry_P Parameter: Timepoint (day) Value: 13
  misc_feature: MA Experiment 20001557 PARAMETER Experiment Name: At_Drought_Soil_Dry_P Parameter: Treatment Value: Drought vs. No Drought
  misc_feature: MA Experiment ID: 20001904 Result: Up-regulated in Transcription
  misc_feature: MA Experiment 20001904 PARAMETER Experiment Name: At_Drought_Reproduction_P Parameter: Age (day) Value: 37
  misc_feature: MA Experiment 20001904 PARAMETER Experiment Name: At_Drought_Reproduction_P Parameter: Organism Value: A. thaliana
  misc_feature: MA Experiment 20001904 PARAMETER Experiment Name: At_Drought_Reproduction_P Parameter: Plant Line Value: WS
  misc_feature: MA Experiment 20001904 PARAMETER Experiment Name: At_Drought_Reproduction_P Parameter: Timepoint (day) Value: 7
  misc_feature: MA Experiment 20001904 PARAMETER Experiment Name: At_Drought_Reproduction_P Parameter: Tissue Value: Rosettes
  misc_feature: MA Experiment 20001904 PARAMETER Experiment Name: At_Drought_Reproduction_P Parameter: Treatment Value: Drought vs. No Drought
gcttctgtggctaacaaagagcaaacaaacacttagaagaaactaagaatactctcatcaaggcgatatagaaaaaaatggagagcaaagggagttggacagtggctgatgccgtagactacaaaggacgacctgccgacaaatccaaaaccggtggttggatcactgccgctctcattcttgggatagaagttgtggagaggctatcaacaatgggaatagcagtgaatttggtaacatatttgatggagacaatgcatctcccaagttcaacctctgccaacattgtcactgatttcatgggcacttccttcctcctatgcttgctcggtggttttctcgctgactccttcctcggccgtttcaaaaccatcggcattttctcaaccattcaagctctgggaactggtgctctagcggtagcaactaagctgccagagctacgtccaccaacatgccatcatggagaagcttgcatacccgcgaccgccttccaaatgacaattctttatgtttcgctttaccttatagcccttggaactggtggtcttaaatctagtatctctggatttgggtctgaccagtttgatgacaaagatcctaaagagaaagctcacatggctttcttcttcaacaggttcttcttctttattagtatggggacattattggctgtgactgttttagtttacatgcaagatgaagtgggaagatcttgggcttatggaatctgcactgtctctatggctatagctattgtaatattcttgtgtgggactaagagataccgttataagaagagccaaggaagtcccgttgtgcaaatatttcaggtcatagcagctgcgttccgaaagaggaaaatggaactacctcaaagcattgtttatctttatgaagataaccctgaaggcattagaattgaacatactgatcagtttcacttgttggacaaggcggccatagttgcagaaggagattttgaacaaacccttgatggagttgcaatcccaaacccttggaagctaagctcagtgaccaaagttgaggaagtaaaaatgatggttaggcttttgcctatttgggcaacaactataattttttggacaacatatgcccaaatgattacattctctgttgagcaagcttcaactatgagacgtaacattggaagctttaagatcccagctggttccctcaccgtgtttttcgttgcggctattctcataactctagctgtctacgaccgtgccataatgcctttttggaagaaatggaaaggaaaaccaggtttctctagcctacaaagaatagctattggattggtcttatcaaccgctggaatggcagctgcagctctagtagagcaaaagcgtttatccgttgcgaaatctagttcacaaaaaacattgcctataagtgtgtttttacttgttccacaattcttcttagtaggagctggggaagcctttatctacactggccaacttgatttcttcataacacaatcgcctaagggaatgaaaactatgagcactggactcttcttgaccactttatcactaggtttctttgtcagcagtttcttggtctcaatcgtcaagagggtcacttcaacttctactgatgtaggatggctggctgataacattaaccacggccgactcgattacttttattggcttttagtcattctcagtggaattaacttcgttgtctatatcatatgtgccttgtggtttaagccaacgaagggtaaagactcagtagagaaggaaaatggcaagggattttcagttgaagactgctgaattttgttttgcaataattgtcttgtgtacaatattatcttgcaacaatgtcgctttccaattatgtttcttgtatattaagcaattggcttgtttttagattcctcccggtctcaaatattgtgtctttaccgtttatgttattcactctttttttttgcatcgtgaaaaataattatttaacgaagtatactttt

SEQ ID NO: 89473 - protein, 577 aa, Arabidopsis thaliana
  peptide (1)..(577): Ceres Seq. ID no. 12719053
  misc_feature (96)..(494): Pfam Name: POT family Pfam Description: POT family
  misc_feature (1)..(577): Homolog of NCBI NO: 30683214 NR Description: nitrate transporter -related [Arabidopsis
  misc_feature (1)..(577): Homolog of NCBI NO: 20466668 NR Description: putative nitrate transporter [Arabidopsis
  misc_feature (2)..(577): Homolog of NCBI NO: 25407841 NR Description: probable nitrate transporter [imported] - thaliana >gi|2760834|gb|AAB95302.1| putative nitrate transporter
  misc_feature (9)..(554): Homolog of NCBI NO: 34914014 NR Description: OJ1014_G12.22 [Oryza sativa (japonica
  misc_feature (2)..(570): Homolog of NCBI NO: 31075168 NR Description: dicarboxylate transporter [Alnus glutinosa]
  misc_feature (8)..(549): Homolog of NCBI NO: 28273096 NR Description: nitrate transporter [Nicotiana tabacum]
  misc_feature (8)..(549): Homolog of NCBI NO: 9581817 NR Description: putative low-affinity nitrate transporter
  misc_feature (6)..(549): Homolog of NCBI NO: 28273100 NR Description: nitrate transporter [Nicotiana tabacum]
  misc_feature (8)..(549): Homolog of NCBI NO: 28273094 NR Description: nitrate transporter [Nicotiana tabacum]
  misc_feature (6)..(549): Homolog of NCBI NO: 9581819 NR Description: putative low-affinity nitrate transporter
MESKGSWTVADAVDYKGRPADKSKTGGWITAALILGIEVVERLSTMGIAVNLVTYLMETMHLPSSTSANIVTDFMGTSFLLCLLGGFLADSFLGRFKTIGIFSTIQALGTGALAVATKLPELRPPTCHHGEACIPATAFQMTILYVSLYLIALGTGGLKSSISGFGSDQFDDKDPKEKAHMAFFFNRFFFFISMGTLLAVTVLVYMQDEVGRSWAYGICTVSMAIAIVIFLCGTKRYRYKKSQGSPVVQIFQVIAAAFRKRKMELPQSIVYLYEDNPEGIRIEHTDQFHLLDKAAIVAEGDFEQTLDGVAIPNPWKLSSVTKVEEVKMMVRLLPIWATTIIFWTTYAQMITFSVEQASTMRRNIGSFKIPAGSLTVFFVAAILITLAVYDRAIMPFWKKWKGKPGFSSLQRIAIGLVLSTAGMAAAALVEQKRLSVAKSSSQKTLPISVFLLVPQFFLVGAGEAFIYTGQLDFFITQSPKGMKTMSTGLFLTTLSLGFFVSSFLVSIVKRVTSTSTDVGWLADNINHGRLDYFYWLLVILSGINFVVYIICALWFKPTKGKDSVEKENGKGFSVEDC

SEQ ID NO: 89474 - protein, 532 aa, Arabidopsis thaliana
  peptide (1)..(532): Ceres Seq. ID no. 12719054
  misc_feature (51)..(449): Pfam Name: POT family Pfam Description: POT family
  misc_feature (1)..(532): Homolog of NCBI NO: 30683214 NR Description: nitrate transporter -related [Arabidopsis
  misc_feature (1)..(532): Homolog of NCBI NO: 20466668 NR Description: putative nitrate transporter [Arabidopsis
  misc_feature (1)..(532): Homolog of NCBI NO: 25407841 NR Description: probable nitrate transporter [imported] - thaliana >gi|2760834|gb|AAB95302.1| putative nitrate transporter
  misc_feature (1)..(509): Homolog of NCBI NO: 34914014 NR Description: OJ1014_G12.22 [Oryza sativa (japonica
  misc_feature (1)..(525): Homolog of NCBI NO: 31075168 NR Description: dicarboxylate transporter [Alnus glutinosa]
  misc_feature (1)..(504): Homolog of NCBI NO: 28273096 NR Description: nitrate transporter [Nicotiana tabacum]
  misc_feature (1)..(504): Homolog of NCBI NO: 9581817 NR Description: putative low-affinity nitrate transporter
  misc_feature (1)..(504): Homolog of NCBI NO: 28273100 NR Description: nitrate transporter [Nicotiana tabacum]
  misc_feature (1)..(504): Homolog of NCBI NO: 28273094 NR Description: nitrate transporter [Nicotiana tabacum]
  misc_feature (1)..(504): Homolog of NCBI NO: 9581819 NR Description: putative low-affinity nitrate transporter
MGIAVNLVTYLMETMHLPSSTSANIVTDFMGTSFLLCLLGGFLADSFLGRFKTIGIFSTIQALGTGALAVATKLPELRPPTCHHGEACIPATAFQMTILYVSLYLIALGTGGLKSSISGFGSDQFDDKDPKEKAHMAFFFNRFFFFISMGTLLAVTVLVYMQDEVGRSWAYGICTVSMAIAIVIFLCGTKRYRYKKSQGSPVVQIFQVIAAAFRKRKMELPQSIVYLYEDNPEGIRIEHTDQFHLLDKAAIVAEGDFEQTLDGVAIPNPWKLSSVTKVEEVKMMVRLLPIWATTIIFWTTYAQMITFSVEQASTMRRNIGSFKIPAGSLTVFFVAAILITLAVYDRAIMPFWKKWKGKPGFSSLQRIAIGLVLSTAGMAAAALVEQKRLSVAKSSSQKTLPISVFLLVPQFFLVGAGEAFIYTGQLDFFITQSPKGMKTMSTGLFLTTLSLGFFVSSFLVSIVKRVTSTSTDVGWLADNINHGRLDYFYWLLVILSGINFVVYIICALWFKPTKGKDSVEKENGKGFSVEDC

SEQ ID NO: 89475 - protein, 521 aa, Arabidopsis thaliana
  peptide (1)..(521): Ceres Seq. ID no. 12719055
  misc_feature (40)..(438): Pfam Name: POT family Pfam Description: POT family
  misc_feature (1)..(521): Homolog of NCBI NO: 30683214 NR Description: nitrate transporter -related [Arabidopsis
  misc_feature (1)..(521): Homolog of NCBI NO: 20466668 NR Description: putative nitrate transporter [Arabidopsis
  misc_feature (1)..(521): Homolog of NCBI NO: 25407841 NR Description: probable nitrate transporter [imported] - thaliana >gi|2760834|gb|AAB95302.1| putative nitrate transporter
  misc_feature (1)..(498): Homolog of NCBI NO: 34914014 NR Description: OJ1014_G12.22 [Oryza sativa (japonica
  misc_feature (1)..(514): Homolog of NCBI NO: 31075168 NR Description: dicarboxylate transporter [Alnus glutinosa]
  misc_feature (1)..(493): Homolog of NCBI NO: 28273096 NR Description: nitrate transporter [Nicotiana tabacum]
  misc_feature (1)..(493): Homolog of NCBI NO: 9581817 NR Description: putative low-affinity nitrate transporter
  misc_feature (1)..(493): Homolog of NCBI NO: 28273100 NR Description: nitrate transporter [Nicotiana tabacum]
  misc_feature (1)..(493): Homolog of NCBI NO: 28273094 NR Description: nitrate transporter [Nicotiana tabacum]
  misc_feature (1)..(493): Homolog of NCBI NO: 9581819 NR Description: putative low-affinity nitrate transporter
METMHLPSSTSANIVTDFMGTSFLLCLLGGFLADSFLGRFKTIGIFSTIQALGTGALAVATKLPELRPPTCHHGEACIPATAFQMTILYVSLYLIALGTGGLKSSISGFGSDQFDDKDPKEKAHMAFFFNRFFFFISMGTLLAVTVLVYMQDEVGRSWAYGICTVSMAIAIVIFLCGTKRYRYKKSQGSPVVQIFQVIAAAFRKRKMELPQSIVYLYEDNPEGIRIEHTDQFHLLDKAAIVAEGDFEQTLDGVAIPNPWKLSSVTKVEEVKMMVRLLPIWATTIIFWTTYAQMITFSVEQASTMRRNIGSFKIPAGSLTVFFVAAILITLAVYDRAIMPFWKKWKGKPGFSSLQRIAIGLVLSTAGMAAAALVEQKRLSVAKSSSQKTLPISVFLLVPQFFLVGAGEAFIYTGQLDFFITQSPKGMKTMSTGLFLTTLSLGFFVSSFLVSIVKRVTSTSTDVGWLADNINHGRLDYFYWLLVILSGINFVVYIICALWFKPTKGKDSVEKENGKGFSVEDC

SEQ ID NO: 89476 - DNA, 2031 bp, Arabidopsis thaliana
  misc_feature (1)..(2031): Ceres Seq. ID no. 12719056
  misc_feature: MA Experiment ID: 20000184 Result: Up-regulated in Transcription
  misc_feature: MA Experiment 20000184 PARAMETER Experiment Name: At_Shoots__P Parameter: Age (day) Value: 7
  misc_feature: MA Experiment 20000184 PARAMETER Experiment Name: At_Shoots__P Parameter: Tissue Value: Shoots vs. Whole Plant
atgagctggaccggaggagattggctatgtggtgcgtgtcagcacgcaaacttcaagaaaagagaatcatgtcaaaaatgcggataccccaaatttggaggggttgatgtgtcaacgtacttgtacaacaggaccgaagttatggctggtgattggtattgtggtgcattgaattgtgggagccacaattacgcgagccgaacaagttgttaccgatgtggaatgatcaaagtcgagtatacggaacagtactatggagctcaaatggttgcttacgggaatgatggcgcagcttgtcctcccggatggaaaactggcgattgggtttgtcctagggtgggatgtggggttcataactacgcaagcagggcagaatgcttcaaatgcaagacaacaagagattatggtgcgtggcgtctaaatggacgagaaagagctaatgaagaatctcttgttttaattatacctttcaacaagtgtttctactttctaacatgcatgacgctttcttacgttgacttgaaatcaattgaaagtttagactcgtgcaaattaactatcttttacaaagataatgagtccgattatgagagctccaccgtcggaccagactcgagccgccgtacgagttggctgagcagctctttcacggctagccctagttgtagctccatatctcatctaagtaaccatggtctcaacagctataaccaatcaaagcctcacaaagccaaccaagtcgcatgggaagctatggccaggctccgtcggtgctgcggccgtgcggtagggttagaacattttcggcttttaaagaggttgggaagtggtgacatcggaagtgtgtacctctgccaaatacgtggaagtcccgagacggcgttttatgctatgaaagttgtggataaggaagctgttgcggtgaagaaaaagcttggaagggcagagatggagaagaagattttagggatgcttgatcatcctttttgccctacattgtacgcagcttttgaggcttctcattactcttttctcgtcatggagtattgtcccggcggtgatctctacgccgtccgcctccgccaaccgtctaaacgtttcactatctcctccacaaggttttacgcagcagaaactctagtggccttagagtatctccacatgatgggaattgtgtatagagacctaaagccagagaacgtgttgatcagagaagatggtcatgtaatgctctcagatttcgatctctccttcaaatgtgacgtcgttccacaattcctcagcgacaacgaccgtgaccgtggccatcaagaagacgatgacgacatcagcattcgccgtaaatgctctacaccttcttgcacgacaactccattaaaccccgtcatctcctgcttctctcccacttctagcagaagaagaaagaagaatgttgttaccacaacaatacacgaaaacgcagctgacatctctggtggatgtccatcaatatttgccgaaccaatcaatgctcgctctaagtcattcgtgggaacacatgagtacttggcacccgaagtaatctcagggcaagggcatgggagtgcagtagattggtggacttacgggatatttctatacgagatgatatttggtaggacaccgtttaaaggcgataacaacgagaagacgttagtaaacattctgaaagcacccttgacattcccaaaggttatagtgaatagccccaaagagtacgaagatatggtgaatgctcaagatcttattataaaattactggtgaagaaccctaagaagaggttagggagtctcaaaggctctattgagatcaaaagacatgagttttttgaaggtgttaactgggcactaatcaggtcaataaagccaccttgggttcctaaagaagagactagtcacaagactaaaggtgataatcgcagcgttaattattatcttccaccaaggtttatgatgagtaggaaagaaagaaatgagccttaccatgtgtctaattattttgattatttttaa

SEQ ID NO: 89477 - protein, 676 aa, Arabidopsis thaliana
  peptide (1)..(676): Ceres Seq. ID no. 12719057
  misc_feature (268)..(616): Pfam Name: Protein kinase domain Pfam Description: Protein kinase domain
  misc_feature (193)..(676): Homolog of NCBI NO: 34910268 NR Description: putative protein kinase [Oryza sativa (japonica group)] >gi|15128235|dbj|BAB62563.1| putative protein kinase
  misc_feature (176)..(634): Homolog of NCBI NO: 15241076 NR Description: serine threonine-specific protein kinase ATPK64
  misc_feature (156)..(634): Homolog of NCBI NO: 7446383 NR Description: probable protein kinase PK1 - potato
  misc_feature (176)..(634): Homolog of NCBI NO: 99749 NR Description: probable serine/threonine-specific protein kinase
  misc_feature (176)..(634): Homolog of NCBI NO: 15236802 NR Description: putative protein kinase; protein id: At4g26610.1, by cDNA: gi_17380933, supported by cDNA: gi_20258942 [Arabidopsis >gi|7488161|pir||T08927 probable protein kinase T15N24.60
  misc_feature (197)..(634): Homolog of NCBI NO: 1346057 NR Description: Protein kinase G11A >gi|100705|pir||B30311
  misc_feature (214)..(634): Homolog of NCBI NO: 15238798 NR Description: protein kinase (EC 2.7.1.37) 5 (pir||JN0505); id: At5g47750.1, supported by cDNA: gi_15809918, supported by gi_17064849, supported by cDNA: gi_20259909 [Arabidopsis
  misc_feature (214)..(634): Homolog of NCBI NO: 17064850 NR Description: protein kinase 5 [Arabidopsis thaliana]
  misc_feature (141)..(650): Homolog of NCBI NO: 125568 NR Description: Protein kinase PVPK-1 >gi|100013|pir||A30311
  misc_feature (204)..(642): Homolog of NCBI NO: 7488270 NR Description: protein kinase homolog T13E15.16 - Arabidopsis >gi|2344901|gb|AAC31841.1| putative protein kinase [Arabidopsis
MSWTGGDWLCGACQHANFKKRESCQKCGYPKFGGVDVSTYLYNRTEVMAGDWYCGALNCGSHNYASRTSCYRCGMIKVEYTEQYYGAQMVAYGNDGAACPPGWKTGDWVCPRVGCGVHNYASRAECFKCKTTRDYGAWRLNGRERANEESLVLIIPFNKCFYFLTCMTLSYVDLKSIESLDSCKLTIFYKDNESDYESSTVGPDSSRRTSWLSSSFTASPSCSSISHLSNHGLNSYNQSKPHKANQVAWEAMARLRRCCGRAVGLEHFRLLKRLGSGDIGSVYLCQIRGSPETAFYAMKVVDKEAVAVKKKLGRAEMEKKILGMLDHPFCPTLYAAFEASHYSFLVMEYCPGGDLYAVRLRQPSKRFTISSTRFYAAETLVALEYLHMMGIVYRDLKPENVLIREDGHVMLSDFDLSFKCDVVPQFLSDNDRDRGHQEDDDDISIRRKCSTPSCTTTPLNPVISCFSPTSSRRRKKNVVTTTIHENAADISGGCPSIFAEPINARSKSFVGTHEYLAPEVISGQGHGSAVDWWTYGIFLYEMIFGRTPFKGDNNEKTLVNILKAPLTFPKVIVNSPKEYEDMVNAQDLIIKLLVKNPKKRLGSLKGSIEIKRHEFFEGVNWALIRSIKPPWVPKEETSHKTKGDNRSVNYYLPPRFMMSRKERNEPYHVSNYFDYF

SEQ ID NO: 89478 - protein, 629 aa, Arabidopsis thaliana
  peptide (1)..(629): Ceres Seq. ID no. 12719058
  misc_feature (221)..(569): Pfam Name: Protein kinase domain Pfam Description: Protein kinase domain
  misc_feature (146)..(629): Homolog of NCBI NO: 34910268 NR Description: putative protein kinase [Oryza sativa (japonica group)] >gi|15128235|dbj|BAB62563.1| putative protein kinase
  misc_feature (129)..(587): Homolog of NCBI NO: 15241076 NR Description: serine threonine-specific protein kinase ATPK64
  misc_feature (109)..(587): Homolog of NCBI NO: 7446383 NR Description: probable protein kinase PK1 - potato
  misc_feature (129)..(587): Homolog of NCBI NO: 99749 NR Description: probable serine/threonine-specific protein kinase
  misc_feature (129)..(587): Homolog of NCBI NO: 15236802 NR Description: putative protein kinase; protein id: At4g26610.1, by cDNA: gi_17380933, supported by cDNA: gi_20258942 [Arabidopsis >gi|7488161|pir||T08927 probable protein kinase T15N24.60
  misc_feature (150)..(587): Homolog of NCBI NO: 1346057 NR Description: Protein kinase G11A >gi|100705|pir||B30311
  misc_feature (167)..(587): Homolog of NCBI NO: 15238798 NR Description: protein kinase (EC 2.7.1.37) 5 (pir||JN0505); id: At5g47750.1, supported by cDNA: gi_15809918, supported by gi_17064849, supported by cDNA: gi_20259909 [Arabidopsis
  misc_feature (167)..(587): Homolog of NCBI NO: 17064850 NR Description: protein kinase 5 [Arabidopsis thaliana]
  misc_feature (94)..(603): Homolog of NCBI NO: 125568 NR Description: Protein kinase PVPK-1 >gi|100013|pir||A30311
  misc_feature (157)..(595): Homolog of NCBI NO: 7488270 NR Description: protein kinase homolog T13E15.16 - Arabidopsis >gi|2344901|gb|AAC31841.1| putative protein kinase [Arabidopsis
MAGDWYCGALNCGSHNYASRTSCYRCGMIKVEYTEQYYGAQMVAYGNDGAACPPGWKTGDWVCPRVGCGVHNYASRAECFKCKTTRDYGAWRLNGRERANEESLVLIIPFNKCFYFLTCMTLSYVDLKSIESLDSCKLTIFYKDNESDYESSTVGPDSSRRTSWLSSSFTASPSCSSISHLSNHGLNSYNQSKPHKANQVAWEAMARLRRCCGRAVGLEHFRLLKRLGSGDIGSVYLCQIRGSPETAFYAMKVVDKEAVAVKKKLGRAEMEKKILGMLDHPFCPTLYAAFEASHYSFLVMEYCPGGDLYAVRLRQPSKRFTISSTRFYAAETLVALEYLHMMGIVYRDLKPENVLIREDGHVMLSDFDLSFKCDVVPQFLSDNDRDRGHQEDDDDISIRRKCSTPSCTTTPLNPVISCFSPTSSRRRKKNVVTTTIHENAADISGGCPSIFAEPINARSKSFVGTHEYLAPEVISGQGHGSAVDWWTYGIFLYEMIFGRTPFKGDNNEKTLVNILKAPLTFPKVIVNSPKEYEDMVNAQDLIIKLLVKNPKKRLGSLKGSIEIKRHEFFEGVNWALIRSIKPPWVPKEETSHKTKGDNRSVNYYLPPRFMMSRKERNEPYHVSNYFDYF

SEQ ID NO: 89479 - protein, 602 aa, Arabidopsis thaliana
  peptide (1)..(602): Ceres Seq. ID no. 12719059
  misc_feature (194)..(542): Pfam Name: Protein kinase domain Pfam Description: Protein kinase domain
  misc_feature (119)..(602): Homolog of NCBI NO: 34910268 NR Description: putative protein kinase [Oryza sativa (japonica group)] >gi|15128235|dbj|BAB62563.1| putative protein kinase
  misc_feature (102)..(560): Homolog of NCBI NO: 15241076 NR Description: serine threonine-specific protein kinase ATPK64
  misc_feature (82)..(560): Homolog of NCBI NO: 7446383 NR Description: probable protein kinase PK1 - potato
  misc_feature (102)..(560): Homolog of NCBI NO: 99749 NR Description: probable serine/threonine-specific protein kinase
  misc_feature (102)..(560): Homolog of NCBI NO: 15236802 NR Description: putative protein kinase; protein id: At4g26610.1, by cDNA: gi_17380933, supported by cDNA: gi_20258942 [Arabidopsis >gi|7488161|pir||T08927 probable protein kinase T15N24.60
  misc_feature (123)..(560): Homolog of NCBI NO: 1346057 NR Description: Protein kinase G11A >gi|100705|pir||B30311
  misc_feature (140)..(560): Homolog of NCBI NO: 15238798 NR Description: protein kinase (EC 2.7.1.37) 5 (pir||JN0505); id: At5g47750.1, supported by cDNA: gi_15809918, supported by gi_17064849, supported by cDNA: gi_20259909 [Arabidopsis
  misc_feature (140)..(560): Homolog of NCBI NO: 17064850 NR Description: protein kinase 5 [Arabidopsis thaliana]
  misc_feature (67)..(576): Homolog of NCBI NO: 125568 NR Description: Protein kinase PVPK-1 >gi|100013|pir||A30311
  misc_feature (130)..(568): Homolog of NCBI NO: 7488270 NR Description: protein kinase homolog T13E15.16 - Arabidopsis >gi|2344901|gb|AAC31841.1| putative protein kinase [Arabidopsis
MIKVEYTEQYYGAQMVAYGNDGAACPPGWKTGDWVCPRVGCGVHNYASRAECFKCKTTRDYGAWRLNGRERANEESLVLIIPFNKCFYFLTCMTLSYVDLKSIESLDSCKLTIFYKDNESDYESSTVGPDSSRRTSWLSSSFTASPSCSSISHLSNHGLNSYNQSKPHKANQVAWEAMARLRRCCGRAVGLEHFRLLKRLGSGDIGSVYLCQIRGSPETAFYAMKVVDKEAVAVKKKLGRAEMEKKILGMLDHPFCPTLYAAFEASHYSFLVMEYCPGGDLYAVRLRQPSKRFTISSTRFYAAETLVALEYLHMMGIVYRDLKPENVLIREDGHVMLSDFDLSFKCDVVPQFLSDNDRDRGHQEDDDDISIRRKCSTPSCTTTPLNPVISCFSPTSSRRRKKNVVTTTIHENAADISGGCPSIFAEPINARSKSFVGTHEYLAPEVISGQGHGSAVDWWTYGIFLYEMIFGRTPFKGDNNEKTLVNILKAPLTFPKVIVNSPKEYEDMVNAQDLIIKLLVKNPKKRLGSLKGSIEIKRHEFFEGVNWALIRSIKPPWVPKEETSHKTKGDNRSVNYYLPPRFMMSRKERNEPYHVSNYFDYF

SEQ ID NO: 89480 - DNA, 1569 bp, Arabidopsis thaliana
  misc_feature (1)..(1569): Ceres Seq. ID no. 12719096
  misc_feature: MA Experiment ID: 20000173 Result: Down-regulated in Transcription
  misc_feature: MA Experiment 20000173 PARAMETER Experiment Name: At_42deg_Heat_P Parameter: Age (day) Value: 14
  misc_feature: MA Experiment 20000173 PARAMETER Experiment Name: At_42deg_Heat_P Parameter: Organism Value: A. thaliana
  misc_feature: MA Experiment 20000173 PARAMETER Experiment Name: At_42deg_Heat_P Parameter: Plant Line Value: WS
  misc_feature: MA Experiment 20000173 PARAMETER Experiment Name: At_42deg_Heat_P Parameter: Temperature (deg C) Value: 42 vs. 22
  misc_feature: MA Experiment 20000173 PARAMETER Experiment Name: At_42deg_Heat_P Parameter: Timepoint (hr) Value: 6
  misc_feature: MA Experiment 20000173 PARAMETER Experiment Name: At_42deg_Heat_P Parameter: Tissue Value: Aerial
  misc_feature: MA Experiment ID: 20000180 Result: Down-regulated in Transcription
  misc_feature: MA Experiment 20000180 PARAMETER Experiment Name: At_Germinating_Seeds_P Parameter: Age (hr) Value: 24 vs. 0
  misc_feature: MA Experiment 20000180 PARAMETER Experiment Name: At_Germinating_Seeds_P Parameter: Tissue Value: Germinating Seeds
  misc_feature: MA Experiment ID: 20000184 Result: Down-regulated in Transcription
  misc_feature: MA Experiment 20000184 PARAMETER Experiment Name: At_Shoots__P Parameter: Age (day) Value: 7
  misc_feature: MA Experiment 20000184 PARAMETER Experiment Name: At_Shoots__P Parameter: Tissue Value: Shoots vs. Whole Plant
  misc_feature: MA Experiment ID: 20000234 Result: Down-regulated in Transcription
  misc_feature: MA Experiment 20000234 PARAMETER Experiment Name: At_Siliques_P Parameter: Age (day) Value: 21
  misc_feature: MA Experiment 20000234 PARAMETER Experiment Name: At_Siliques_P Parameter: Organism Value: A. thaliana
  misc_feature: MA Experiment 20000234 PARAMETER Experiment Name: At_Siliques_P Parameter: Plant Line Value: WS
  misc_feature: MA Experiment 20000234 PARAMETER Experiment Name: At_Siliques_P Parameter: Tissue Value: Less Than 5mm Siliques vs. Whole Plant
  misc_feature: MA Experiment ID: 20000264 Result: Down-regulated in Transcription
  misc_feature: MA Experiment 20000264 PARAMETER Experiment Name: At_Open_Flower_P Parameter: Age (day) Value: 21
  misc_feature: MA Experiment 20000264 PARAMETER Experiment Name: At_Open_Flower_P Parameter: Plant Line Value: WS
  misc_feature: MA Experiment 20000264 PARAMETER Experiment Name: At_Open_Flower_P Parameter: Tissue Value: Open Flower vs. Whole Plant
  misc_feature: MA Experiment ID: 20000286 Result: Down-regulated in Transcription
  misc_feature: MA Experiment 20000286 PARAMETER Experiment Name: At_Open_Flower_P Parameter: Age (day) Value: 21
  misc_feature: MA Experiment 20000286 PARAMETER Experiment Name: At_Open_Flower_P Parameter: Plant Line Value: WS
  misc_feature: MA Experiment 20000286 PARAMETER Experiment Name: At_Open_Flower_P Parameter: Tissue Value: Half Open vs. Whole Plant
  misc_feature: MA Experiment ID: 20000308 Result: Down-regulated in Transcription
  misc_feature: MA Experiment 20000308 PARAMETER Experiment Name: At_100mM_NaCl__P Parameter: Age (day) Value: 17
  misc_feature: MA Experiment 20000308 PARAMETER Experiment Name: At_100mM_NaCl__P Parameter: Organism Value: A. thaliana
  misc_feature: MA Experiment 20000308 PARAMETER Experiment Name: At_100mM_NaCl__P Parameter: Plant Line Value: WS
  misc_feature: MA Experiment 20000308 PARAMETER Experiment Name: At_100mM_NaCl__P Parameter: Timepoint (hr) Value: 72
  misc_feature: MA Experiment 20000308 PARAMETER Experiment Name: At_100mM_NaCl__P Parameter: Tissue Value: Whole Plant
  misc_feature: MA Experiment 20000308 PARAMETER Experiment Name: At_100mM_NaCl__P Parameter: Treatment Value: 100mM NaCl vs. No Treatment
  misc_feature: MA Experiment ID: 20000709 Result: Up-regulated in Transcription
  misc_feature: MA Experiment 20000709 PARAMETER Experiment Name: At_15mM_NH4NO3_L-to-H_P Parameter: Age (hr) Value: 14
  misc_feature: MA Experiment 20000709 PARAMETER Experiment Name: At_15mM_NH4NO3_L-to-H_P Parameter: Organism Value: A. thaliana
  misc_feature: MA Experiment 20000709 PARAMETER Experiment Name: At_15mM_NH4NO3_L-to-H_P Parameter: Plant Line Value: WS
  misc_feature: MA Experiment 20000709 PARAMETER Experiment Name: At_15mM_NH4NO3_L-to-H_P Parameter: Timepoint (hr) Value: 4
  misc_feature: MA Experiment 20000709 PARAMETER Experiment Name: At_15mM_NH4NO3_L-to-H_P Parameter: Tissue Value: Aerial
  misc_feature: MA Experiment 20000709 PARAMETER Experiment Name: At_15mM_NH4NO3_L-to-H_P Parameter: Treatment Value: 15mM NH4NO3 vs. 30mM Mannitol
  misc_feature: MA Experiment ID: 20001247 Result: Up-regulated in Transcription
  misc_feature: MA Experiment 20001247 PARAMETER Experiment Name: At_Far-red-induction_P Parameter: Age (day) Value: 7
  misc_feature: MA Experiment 20001247 PARAMETER Experiment Name: At_Far-red-induction_P Parameter: Light Value: Far-red vs. White
  misc_feature: MA Experiment 20001247 PARAMETER Experiment Name: At_Far-red-induction_P Parameter: Organism Value: A. thaliana
  misc_feature: MA Experiment 20001247 PARAMETER Experiment Name: At_Far-red-induction_P Parameter: Plant Line Value: Columbia
  misc_feature: MA Experiment 20001247 PARAMETER Experiment Name: At_Far-red-induction_P Parameter: Timepoint (hr) Value: 1
  misc_feature: MA Experiment 20001247 PARAMETER Experiment Name: At_Far-red-induction_P Parameter: Tissue Value: Whole Plant
  misc_feature: MA Experiment ID: 20001248 Result: Up-regulated in Transcription
  misc_feature: MA Experiment 20001248 PARAMETER Experiment Name: At_Far-red-induction_P Parameter: Age (day) Value: 7
  misc_feature: MA Experiment 20001248 PARAMETER Experiment Name: At_Far-red-induction_P Parameter: Light Value: Far-red vs. White
  misc_feature: MA Experiment 20001248 PARAMETER Experiment Name: At_Far-red-induction_P Parameter: Organism Value: A. thaliana
  misc_feature: MA Experiment 20001248 PARAMETER Experiment Name: At_Far-red-induction_P Parameter: Plant Line Value: Columbia
  misc_feature: MA Experiment 20001248 PARAMETER Experiment Name: At_Far-red-induction_P Parameter: Timepoint (hr) Value: 4
  misc_feature: MA Experiment 20001248 PARAMETER Experiment Name: At_Far-red-induction_P Parameter: Tissue Value: Whole Plant
  misc_feature: MA Experiment ID: 20001457 Result: Up-regulated in Transcription
  misc_feature: MA Experiment 20001457 PARAMETER Experiment Name: At_50mM_NH4NO3_L-to-H_P Parameter: Age (day) Value: Undefined
  misc_feature: MA Experiment 20001457 PARAMETER Experiment Name: At_50mM_NH4NO3_L-to-H_P Parameter: Organism Value: Undefined
  misc_feature: MA Experiment 20001457 PARAMETER Experiment Name: At_50mM_NH4NO3_L-to-H_P Parameter: Plant Line Value: Undefined
  misc_feature: MA Experiment 20001457 PARAMETER Experiment Name: At_50mM_NH4NO3_L-to-H_P Parameter: Timepoint (hr) Value: 0.5
  misc_feature: MA Experiment 20001457 PARAMETER Experiment Name: At_50mM_NH4NO3_L-to-H_P Parameter: Tissue Value: Siliques
  misc_feature: MA Experiment 20001457 PARAMETER Experiment Name: At_50mM_NH4NO3_L-to-H_P Parameter: Treatment Value: 50mM NH4NO3 vs. 100mM Manitol
  misc_feature: MA Experiment ID: 20001458 Result: Up-regulated in Transcription
  misc_feature: MA Experiment 20001458 PARAMETER Experiment Name: At_50mM_NH4NO3_L-to-H_P Parameter: Age (day) Value: Undefined
  misc_feature: MA Experiment 20001458 PARAMETER Experiment Name: At_50mM_NH4NO3_L-to-H_P Parameter: Organism Value: Undefined
  misc_feature: MA Experiment 20001458 PARAMETER Experiment Name: At_50mM_NH4NO3_L-to-H_P Parameter: Plant Line Value: Undefined
  misc_feature: MA Experiment 20001458 PARAMETER Experiment Name: At_50mM_NH4NO3_L-to-H_P Parameter: Timepoint (hr) Value: 2
  misc_feature: MA Experiment 20001458 PARAMETER Experiment Name: At_50mM_NH4NO3_L-to-H_P Parameter: Tissue Value: Siliques
  misc_feature: MA Experiment 20001458 PARAMETER Experiment Name: At_50mM_NH4NO3_L-to-H_P Parameter: Treatment Value: 50mM NH4NO3 vs. 100mM Manitol
  misc_feature: MA Experiment ID: 20001459 Result: Up-regulated in Transcription
  misc_feature: MA Experiment 20001459 PARAMETER Experiment Name: At_50mM_NH4NO3_L-to-H_P Parameter: Age (day) Value: Undefined
  misc_feature: MA Experiment 20001459 PARAMETER Experiment Name: At_50mM_NH4NO3_L-to-H_P Parameter: Organism Value: Undefined
  misc_feature: MA Experiment 20001459 PARAMETER Experiment Name: At_50mM_NH4NO3_L-to-H_P Parameter: Plant Line Value: Undefined
  misc_feature: MA Experiment 20001459 PARAMETER Experiment Name: At_50mM_NH4NO3_L-to-H_P Parameter: Timepoint (hr) Value: 4
  misc_feature: MA Experiment 20001459 PARAMETER Experiment Name: At_50mM_NH4NO3_L-to-H_P Parameter: Tissue Value: Siliques
  misc_feature: MA Experiment 20001459 PARAMETER Experiment Name: At_50mM_NH4NO3_L-to-H_P Parameter: Treatment Value: 50mM NH4NO3 vs. 100mM Manitol
  misc_feature: MA Experiment ID: 20001557 Result: Up-regulated in Transcription
  misc_feature: MA Experiment 20001557 PARAMETER Experiment Name: At_Drought_Soil_Dry_P Parameter: Age (day) Value: 27
  misc_feature: MA Experiment 20001557 PARAMETER Experiment Name: At_Drought_Soil_Dry_P Parameter: Organism Value: A. thaliana
  misc_feature: MA Experiment 20001557 PARAMETER Experiment Name: At_Drought_Soil_Dry_P Parameter: Plant Line Value: WS
  misc_feature: MA Experiment 20001557 PARAMETER Experiment Name: At_Drought_Soil_Dry_P Parameter: Post Timepoint (hr) Value: 3
  misc_feature: MA Experiment 20001557 PARAMETER Experiment Name: At_Drought_Soil_Dry_P Parameter: Post-Treatment Value: Re-Water vs. No Drought
  misc_feature: MA Experiment 20001557 PARAMETER Experiment Name: At_Drought_Soil_Dry_P Parameter: Timepoint (day) Value: 13
  misc_feature: MA Experiment 20001557 PARAMETER Experiment Name: At_Drought_Soil_Dry_P Parameter: Treatment Value: Drought vs. No Drought
  misc_feature: MA Experiment ID: 20001756 Result: Up-regulated in Transcription
  misc_feature: MA Experiment 20001756 PARAMETER Experiment Name: At_50mM_NH4NO3_L-to-H_P Parameter: Timepoint (hr) Value: 4
  misc_feature: MA Experiment 20001756 PARAMETER Experiment Name: At_50mM_NH4NO3_L-to-H_P Parameter: Tissue Value: Leaf
  misc_feature: MA Experiment 20001756 PARAMETER Experiment Name: At_50mM_NH4NO3_L-to-H_P Parameter: Treatment Value: 50mM NH4NO3 vs 100mM Mannitol
  misc_feature: MA Experiment ID: 20001759 Result: Up-regulated in Transcription
  misc_feature: MA Experiment 20001759 PARAMETER Experiment Name: At_50mM_NH4NO3_L-to-H_P Parameter: Timepoint (hr) Value: 1
  misc_feature: MA Experiment 20001759 PARAMETER Experiment Name: At_50mM_NH4NO3_L-to-H_P Parameter: Tissue Value: Siliques
  misc_feature: MA Experiment 20001759 PARAMETER Experiment Name: At_50mM_NH4NO3_L-to-H_P Parameter: Treatment Value: 50mM NH4NO3 vs 100mM Mannitol
  misc_feature: MA Experiment ID: 20001760 Result: Up-regulated in Transcription
  misc_feature: MA Experiment 20001760 PARAMETER Experiment Name: At_50mM_NH4NO3_L-to-H_P Parameter: Timepoint (hr) Value: 2
  misc_feature: MA Experiment 20001760 PARAMETER Experiment Name: At_50mM_NH4NO3_L-to-H_P Parameter: Tissue Value: Siliques
  misc_feature: MA Experiment 20001760 PARAMETER Experiment Name: At_50mM_NH4NO3_L-to-H_P Parameter: Treatment Value: 50mM NH4NO3 vs 100mM Mannitol
atcaaatcctctaaagtttcgttctttgttctaagttttctgaaggagtgatatttgtttgtggtgtggttagagaaatgaatcggagacagcaagtgaaacgtagagtaggtaaatatgaagttggaagaacaattggagaaggaacgtttgctaaagttaagtttgctagaaactctgaaactggagaacctgttgctctcaagattcttgataaagagaaagttctcaagcataaaatggctgaacagattagaagagagatagctactatgaagttgataaaacatccaaatgttgttcaattatatgaggtgatggcaagtaagacgaaaatatttatcatcttggagtatgttacaggaggagaactctttgataagattgtaaatgatgggcggatgaaagaagatgaggcgcggagatatttccaacagcttatacatgctgtggactactgtcatagcagaggggtctaccatagagacctcaagcctgaaaatttactattggactcctatggaaacctcaagatctcagattttggattaagtgctttgtcccaacaagtcagggatgatggactcttgcatacatcgtgtggaacaccaaactacgttgctcctgaggttctcaatgatagaggctatgatggagcaacagctgacatgtggtcatgcggtgttgtactctatgtcctgcttgcaggttacttaccttttgatgattctaatctaatgaatctttataaaaaaatatcatctggtgaattcaactgtcctccgtggctctcactcggtgccatgaaactcatcactagaatcttagatccgaatccgatgactcgtgtaacaccgcaagaggttttcgaagatgaatggttcaagaaagattacaagccacctgttttcgaggagagggatgattcaaacatggacgatattgatgctgttttcaaggactctgaggaacatcttgttactgagaagagagaagaacagccagcggcgatcaatgccttcgagatcatttcaatgtcaaggggacttaacctagagaatctgtttgatccagaacaggaatttaagagggaaacaaggataacattgagaggaggcgcgaatgagatcatcgagaagatagaagaagctgcaaagcctctcggtttcgatgttcaaaagaagaactacaagtacattacttgaaatcagatgaggcttgagaatgtgaaggctggaagaaaggggaatctcaatgtagcgacagagatattccaagtagcgccaagtcttcatatggttcaagtatcgaagtcgaaaggagacactctcgaatttcacaagttctataagaagctctctaattctctggagcaagtagtctggacgaataacgaagttaagaaagaaacagcaaagtgatgtatgagagttttcttttgggacaattcttgctttctttgtgtataagagcttttttgctttaccggctactttgtgtggatgatgagaaagggagtgggattggttttgtgtaaaagaaaggtgtaaatatgaactgcattactcg

SEQ ID NO: 89481 - protein, 375 aa, Arabidopsis thaliana
  peptide (1)..(375): Ceres Seq. ID no. 12719097
  misc_feature (14)..(269): Pfam Name: Protein kinase domain Pfam Description: Protein kinase domain
  misc_feature (1)..(375): Homolog of NCBI NO: 30683336 NR Description: CBL-interacting protein kinase 3 [Arabidopsis
  misc_feature (1)..(375): Homolog of NCBI NO: 30688193 NR Description: NAF specific protein kinase family [Arabidopsis >gi|29294047|gb|AAO73884.1| NAF specific protein kinase family
  misc_feature (6)..(375): Homolog of NCBI NO: 7446371 NR Description: probable serine/threonine kinase (EC 2.7.1.-) - sorghum >gi|2632252|emb|CAA73067.1| serine/threonine kinase
  misc_feature (6)..(375): Homolog of NCBI NO: 7446372 NR Description: probable serine/threonine kinase (EC 2.7.1.-) - sorghum >gi|2632254|emb|CAA73068.1| serine/threonine kinase
  misc_feature (8)..(375): Homolog of NCBI NO: 18397430 NR Description: serine/threonine kinase, putative; protein id: supported by cDNA: gi_14486385, supported by cDNA: gi_15912282,
  misc_feature (8)..(375): Homolog of NCBI NO: 25387051 NR Description: probable serine/threonine kinase [imported] - thaliana >gi|12320856|gb|AAG50566.1|AC073506_8 serine/threonine
  misc_feature (8)..(375): Homolog of NCBI NO: 15223317 NR Description: serine threonine kinase, putative; protein id: supported by cDNA: gi_14423523, supported by cDNA: gi_20259787
  misc_feature (8)..(375): Homolog of NCBI NO: 14423524 NR Description: similar to wpk4 protein kinase [Arabidopsis >gi|20259788|gb|AAM13241.1| similar to wpk4 protein kinase
  misc_feature (8)..(375): Homolog of NCBI NO: 30677898 NR Description: CBL-interacting protein kinase 9 [Arabidopsis
  misc_feature (8)..(375): Homolog of NCBI NO: 30677901 NR Description: CBL-interacting protein kinase 9 [Arabidopsis
MNRRQQVKRRVGKYEVGRTIGEGTFAKVKFARNSETGEPVALKILDKEKVLKHKMAEQIRREIATMKLIKHPNVVQLYEVMASKTKIFIILEYVTGGELFDKIVNDGRMKEDEARRYFQQLIHAVDYCHSRGVYHRDLKPENLLLDSYGNLKISDFGLSALSQQVRDDGLLHTSCGTPNYVAPEVLNDRGYDGATADMWSCGVVLYVLLAGYLPFDDSNLMNLYKKISSGEFNCPPWLSLGAMKLITRILDPNPMTRVTPQEVFEDEWFKKDYKPPVFEERDDSNMDDIDAVFKDSEEHLVTEKREEQPAAINAFEIISMSRGLNLENLFDPEQEFKRETRITLRGGANEIIEKIEEAAKPLGFDVQKKNYKYIT

SEQ ID NO: 89482 - protein, 321 aa, Arabidopsis thaliana
  peptide (1)..(321): Ceres Seq. ID no. 12719098
  misc_feature (1)..(215): Pfam Name: Protein kinase domain Pfam Description: Protein kinase domain
  misc_feature (1)..(321): Homolog of NCBI NO: 30683336 NR Description: CBL-interacting protein kinase 3 [Arabidopsis
  misc_feature (1)..(321): Homolog of NCBI NO: 30688193 NR Description: NAF specific protein kinase family [Arabidopsis >gi|29294047|gb|AAO73884.1| NAF specific protein kinase family
  misc_feature (1)..(321): Homolog of NCBI NO: 7446371 NR Description: probable serine/threonine kinase (EC 2.7.1.-) - sorghum >gi|2632252|emb|CAA73067.1| serine/threonine kinase
  misc_feature (1)..(321): Homolog of NCBI NO: 7446372 NR Description: probable serine/threonine kinase (EC 2.7.1.-) - sorghum >gi|2632254|emb|CAA73068.1| serine/threonine kinase
  misc_feature (1)..(321): Homolog of NCBI NO: 18397430 NR Description: serine/threonine kinase, putative; protein id: supported by cDNA: gi_14486385, supported by cDNA: gi_15912282,
  misc_feature (1)..(321): Homolog of NCBI NO: 25387051 NR Description: probable serine/threonine kinase [imported] - thaliana >gi|12320856|gb|AAG50566.1|AC073506_8 serine/threonine
  misc_feature (1)..(321): Homolog of NCBI NO: 15223317 NR Description: serine threonine kinase, putative; protein id: supported by cDNA: gi_14423523, supported by cDNA: gi_20259787
  misc_feature (1)..(321): Homolog of NCBI NO: 14423524 NR Description: similar to wpk4 protein kinase [Arabidopsis >gi|20259788|gb|AAM13241.1| similar to wpk4 protein kinase
  misc_feature (1)..(321): Homolog of NCBI NO: 30677898 NR Description: CBL-interacting protein kinase 9 [Arabidopsis
  misc_feature (1)..(321): Homolog of NCBI NO: 30677901 NR Description: CBL-interacting protein kinase 9 [Arabidopsis
MAEQIRREIATMKLIKHPNVVQLYEVMASKTKIFIILEYVTGGELFDKIVNDGRMKEDEARRYFQQLIHAVDYCHSRGVYHRDLKPENLLLDSYGNLKISDFGLSALSQQVRDDGLLHTSCGTPNYVAPEVLNDRGYDGATADMWSCGVVLYVLLAGYLPFDDSNLMNLYKKISSGEFNCPPWLSLGAMKLITRILDPNPMTRVTPQEVFEDEWFKKDYKPPVFEERDDSNMDDIDAVFKDSEEHLVTEKREEQPAAINAFEIISMSRGLNLENLFDPEQEFKRETRITLRGGANEIIEKIEEAAKPLGFDVQKKNYKYIT

SEQ ID NO: 89483 - protein, 310 aa, Arabidopsis thaliana
  peptide (1)..(310): Ceres Seq. ID no. 12719099
  misc_feature (1)..(204): Pfam Name: Protein kinase domain Pfam Description: Protein kinase domain
  misc_feature (1)..(310): Homolog of NCBI NO: 30683336 NR Description: CBL-interacting protein kinase 3 [Arabidopsis
  misc_feature (1)..(310): Homolog of NCBI NO: 30688193 NR Description: NAF specific protein kinase family [Arabidopsis >gi|29294047|gb|AAO73884.1| NAF specific protein kinase family
  misc_feature (1)..(310): Homolog of NCBI NO: 7446371 NR Description: probable serine/threonine kinase (EC 2.7.1.-) - sorghum >gi|2632252|emb|CAA73067.1| serine/threonine kinase
  misc_feature (1)..(310): Homolog of NCBI NO: 7446372 NR Description: probable serine/threonine kinase (EC 2.7.1.-) - sorghum >gi|2632254|emb|CAA73068.1| serine/threonine kinase
  misc_feature (1)..(310): Homolog of NCBI NO: 18397430 NR Description: serine/threonine kinase, putative; protein id: supported by cDNA: gi_14486385, supported by cDNA: gi_15912282,
  misc_feature (1)..(310): Homolog of NCBI NO: 25387051 NR Description: probable serine/threonine kinase [imported] - thaliana >gi|12320856|gb|AAG50566.1|AC073506_8 serine/threonine
  misc_feature (1)..(310): Homolog of NCBI NO: 15223317 NR Description: serine threonine kinase, putative; protein id: supported by cDNA: gi_14423523, supported by cDNA: gi_20259787
  misc_feature (1)..(310): Homolog of NCBI NO: 14423524 NR Description: similar to wpk4 protein kinase [Arabidopsis >gi|20259788|gb|AAM13241.1| similar to wpk4 protein kinase
  misc_feature (1)..(310): Homolog of NCBI NO: 30677898 NR Description: CBL-interacting protein kinase 9 [Arabidopsis
  misc_feature (1)..(310): Homolog of NCBI NO: 30677901 NR Description: CBL-interacting protein kinase 9 [Arabidopsis
MKLIKHPNVVQLYEVMASKTKIFIILEYVTGGELFDKIVNDGRMKEDEARRYFQQLIHAVDYCHSRGVYHRDLKPENLLLDSYGNLKISDFGLSALSQQVRDDGLLHTSCGTPNYVAPEVLNDRGYDGATADMWSCGVVLYVLLAGYLPFDDSNLMNLYKKISSGEFNCPPWLSLGAMKLITRILDPNPMTRVTPQEVFEDEWFKKDYKPPVFEERDDSNMDDIDAVFKDSEEHLVTEKREEQPAAINAFEIISMSRGLNLENLFDPEQEFKRETRITLRGGANEIIEKIEEAAKPLGFDVQKKNYKYIT

SEQ ID NO: 89484 - DNA, 1724 bp, Arabidopsis thaliana
  misc_feature (1)..(1724): Ceres Seq. ID no. 12719100
  misc_feature: MA Experiment ID: 20000173 Result: Down-regulated in Transcription
  misc_feature: MA Experiment 20000173 PARAMETER Experiment Name: At_42deg_Heat_P Parameter: Age (day) Value: 14
  misc_feature: MA Experiment 20000173 PARAMETER Experiment Name: At_42deg_Heat_P Parameter: Organism Value: A. thaliana
  misc_feature: MA Experiment 20000173 PARAMETER Experiment Name: At_42deg_Heat_P Parameter: Plant Line Value: WS
  misc_feature: MA Experiment 20000173 PARAMETER Experiment Name: At_42deg_Heat_P Parameter: Temperature (deg C) Value: 42 vs. 22
  misc_feature: MA Experiment 20000173 PARAMETER Experiment Name: At_42deg_Heat_P Parameter: Timepoint (hr) Value: 6
  misc_feature: MA Experiment 20000173 PARAMETER Experiment Name: At_42deg_Heat_P Parameter: Tissue Value: Aerial
  misc_feature: MA Experiment ID: 20000180 Result: Down-regulated in Transcription
  misc_feature: MA Experiment 20000180 PARAMETER Experiment Name: At_Germinating_Seeds_P Parameter: Age (hr) Value: 24 vs. 0
  misc_feature: MA Experiment 20000180 PARAMETER Experiment Name: At_Germinating_Seeds_P Parameter: Tissue Value: Germinating Seeds
  misc_feature: MA Experiment ID: 20000184 Result: Down-regulated in Transcription
  misc_feature: MA Experiment 20000184 PARAMETER Experiment Name: At_Shoots__P Parameter: Age (day) Value: 7
  misc_feature: MA Experiment 20000184 PARAMETER Experiment Name: At_Shoots__P Parameter: Tissue Value: Shoots vs. Whole Plant
  misc_feature: MA Experiment ID: 20000234 Result: Down-regulated in Transcription
  misc_feature: MA Experiment 20000234 PARAMETER Experiment Name: At_Siliques_P Parameter: Age (day) Value: 21
  misc_feature: MA Experiment 20000234 PARAMETER Experiment Name: At_Siliques_P Parameter: Organism Value: A. thaliana
  misc_feature: MA Experiment 20000234 PARAMETER Experiment Name: At_Siliques_P Parameter: Plant Line Value: WS
  misc_feature: MA Experiment 20000234 PARAMETER Experiment Name: At_Siliques_P Parameter: Tissue Value: Less Than 5mm Siliques vs. Whole Plant
  misc_feature: MA Experiment ID: 20000264 Result: Down-regulated in Transcription
  misc_feature: MA Experiment 20000264 PARAMETER Experiment Name: At_Open_Flower_P Parameter: Age (day) Value: 21
  misc_feature: MA Experiment 20000264 PARAMETER Experiment Name: At_Open_Flower_P Parameter: Plant Line Value: WS
  misc_feature: MA Experiment 20000264 PARAMETER Experiment Name: At_Open_Flower_P Parameter: Tissue Value: Open Flower vs. Whole Plant
  misc_feature: MA Experiment ID: 20000286 Result: Down-regulated in Transcription
  misc_feature: MA Experiment 20000286 PARAMETER Experiment Name: At_Open_Flower_P Parameter: Age (day) Value: 21
  misc_feature: MA Experiment 20000286 PARAMETER Experiment Name: At_Open_Flower_P Parameter: Plant Line Value: WS
  misc_feature: MA Experiment 20000286 PARAMETER Experiment Name: At_Open_Flower_P Parameter: Tissue Value: Half Open vs. Whole Plant
  misc_feature: MA Experiment ID: 20000308 Result: Down-regulated in Transcription
  misc_feature: MA Experiment 20000308 PARAMETER Experiment Name: At_100mM_NaCl__P Parameter: Age (day) Value: 17
  misc_feature: MA Experiment 20000308 PARAMETER Experiment Name: At_100mM_NaCl__P Parameter: Organism Value: A. thaliana
  misc_feature: MA Experiment 20000308 PARAMETER Experiment Name: At_100mM_NaCl__P Parameter: Plant Line Value: WS
  misc_feature: MA Experiment 20000308 PARAMETER Experiment Name: At_100mM_NaCl__P Parameter: Timepoint (hr) Value: 72
  misc_feature: MA Experiment 20000308 PARAMETER Experiment Name: At_100mM_NaCl__P Parameter: Tissue Value: Whole Plant
  misc_feature: MA Experiment 20000308 PARAMETER Experiment Name: At_100mM_NaCl__P Parameter: Treatment Value: 100mM NaCl vs. No Treatment
  misc_feature: MA Experiment ID: 20000709 Result: Up-regulated in Transcription
  misc_feature: MA Experiment 20000709 PARAMETER Experiment Name: At_15mM_NH4NO3_L-to-H_P Parameter: Age (hr) Value: 14
  misc_feature: MA Experiment 20000709 PARAMETER Experiment Name: At_15mM_NH4NO3_L-to-H_P Parameter: Organism Value: A. thaliana
  misc_feature: MA Experiment 20000709 PARAMETER Experiment Name: At_15mM_NH4NO3_L-to-H_P Parameter: Plant Line Value: WS
  misc_feature: MA Experiment 20000709 PARAMETER Experiment Name: At_15mM_NH4NO3_L-to-H_P Parameter: Timepoint (hr) Value: 4
  misc_feature: MA Experiment 20000709 PARAMETER Experiment Name: At_15mM_NH4NO3_L-to-H_P Parameter: Tissue Value: Aerial
  misc_feature: MA Experiment 20000709 PARAMETER Experiment Name: At_15mM_NH4NO3_L-to-H_P Parameter: Treatment Value: 15mM NH4NO3 vs. 30mM Mannitol
  misc_feature: MA Experiment ID: 20001247 Result: Up-regulated in Transcription
  misc_feature: MA Experiment 20001247 PARAMETER Experiment Name: At_Far-red-induction_P Parameter: Age (day) Value: 7
  misc_feature: MA Experiment 20001247 PARAMETER Experiment Name: At_Far-red-induction_P Parameter: Light Value: Far-red vs. White
  misc_feature: MA Experiment 20001247 PARAMETER Experiment Name: At_Far-red-induction_P Parameter: Organism Value: A. thaliana
  misc_feature: MA Experiment 20001247 PARAMETER Experiment Name: At_Far-red-induction_P Parameter: Plant Line Value: Columbia
  misc_feature: MA Experiment 20001247 PARAMETER Experiment Name: At_Far-red-induction_P Parameter: Timepoint (hr) Value: 1
  misc_feature: MA Experiment 20001247 PARAMETER Experiment Name: At_Far-red-induction_P Parameter: Tissue Value: Whole Plant
  misc_feature: MA Experiment ID: 20001248 Result: Up-regulated in Transcription
  misc_feature: MA Experiment 20001248 PARAMETER Experiment Name: At_Far-red-induction_P Parameter: Age (day) Value: 7
  misc_feature: MA Experiment 20001248 PARAMETER Experiment Name: At_Far-red-induction_P Parameter: Light Value: Far-red vs. White
  misc_feature: MA Experiment 20001248 PARAMETER Experiment Name: At_Far-red-induction_P Parameter: Organism Value: A. thaliana
  misc_feature: MA Experiment 20001248 PARAMETER Experiment Name: At_Far-red-induction_P Parameter: Plant Line Value: Columbia
  misc_feature: MA Experiment 20001248 PARAMETER Experiment Name: At_Far-red-induction_P Parameter: Timepoint (hr) Value: 4
  misc_feature: MA Experiment 20001248 PARAMETER Experiment Name: At_Far-red-induction_P Parameter: Tissue Value: Whole Plant
  misc_feature: MA Experiment ID: 20001457 Result: Up-regulated in Transcription
  misc_feature: MA Experiment 20001457 PARAMETER Experiment Name: At_50mM_NH4NO3_L-to-H_P Parameter: Age (day) Value: Undefined
  misc_feature: MA Experiment 20001457 PARAMETER Experiment Name: At_50mM_NH4NO3_L-to-H_P Parameter: Organism Value: Undefined
  misc_feature: MA Experiment 20001457 PARAMETER Experiment Name: At_50mM_NH4NO3_L-to-H_P Parameter: Plant Line Value: Undefined
  misc_feature: MA Experiment 20001457 PARAMETER Experiment Name: At_50mM_NH4NO3_L-to-H_P Parameter: Timepoint (hr) Value: 0.5
  misc_feature: MA Experiment 20001457 PARAMETER Experiment Name: At_50mM_NH4NO3_L-to-H_P Parameter: Tissue Value: Siliques
  misc_feature: MA Experiment 20001457 PARAMETER Experiment Name: At_50mM_NH4NO3_L-to-H_P Parameter: Treatment Value: 50mM NH4NO3 vs. 100mM Manitol
  misc_feature: MA Experiment ID: 20001458 Result: Up-regulated in Transcription
  misc_feature: MA Experiment 20001458 PARAMETER Experiment Name: At_50mM_NH4NO3_L-to-H_P Parameter: Age (day) Value: Undefined
  misc_feature: MA Experiment 20001458 PARAMETER Experiment Name: At_50mM_NH4NO3_L-to-H_P Parameter: Organism Value: Undefined
  misc_feature: MA Experiment 20001458 PARAMETER Experiment Name: At_50mM_NH4NO3_L-to-H_P Parameter: Plant Line Value: Undefined
  misc_feature: MA Experiment 20001458 PARAMETER Experiment Name: At_50mM_NH4NO3_L-to-H_P Parameter: Timepoint (hr) Value: 2
  misc_feature: MA Experiment 20001458 PARAMETER Experiment Name: At_50mM_NH4NO3_L-to-H_P Parameter: Tissue Value: Siliques
  misc_feature: MA Experiment 20001458 PARAMETER Experiment Name: At_50mM_NH4NO3_L-to-H_P Parameter: Treatment Value: 50mM NH4NO3 vs. 100mM Manitol
  misc_feature: MA Experiment ID: 20001459 Result: Up-regulated in Transcription
  misc_feature: MA Experiment 20001459 PARAMETER Experiment Name: At_50mM_NH4NO3_L-to-H_P Parameter: Age (day) Value: Undefined
  misc_feature: MA Experiment 20001459 PARAMETER Experiment Name: At_50mM_NH4NO3_L-to-H_P Parameter: Organism Value: Undefined
  misc_feature: MA Experiment 20001459 PARAMETER Experiment Name: At_50mM_NH4NO3_L-to-H_P Parameter: Plant Line Value: Undefined
  misc_feature: MA Experiment 20001459 PARAMETER Experiment Name: At_50mM_NH4NO3_L-to-H_P Parameter: Timepoint (hr) Value: 4
  misc_feature: MA Experiment 20001459 PARAMETER Experiment Name: At_50mM_NH4NO3_L-to-H_P Parameter: Tissue Value: Siliques
  misc_feature: MA Experiment 20001459 PARAMETER Experiment Name: At_50mM_NH4NO3_L-to-H_P Parameter: Treatment Value: 50mM NH4NO3 vs. 100mM Manitol
  misc_feature: MA Experiment ID: 20001557 Result: Up-regulated in Transcription
  misc_feature: MA Experiment 20001557 PARAMETER Experiment Name: At_Drought_Soil_Dry_P Parameter: Age (day) Value: 27
  misc_feature: MA Experiment 20001557 PARAMETER Experiment Name: At_Drought_Soil_Dry_P Parameter: Organism Value: A. thaliana
  misc_feature: MA Experiment 20001557 PARAMETER Experiment Name: At_Drought_Soil_Dry_P Parameter: Plant Line Value: WS
  misc_feature: MA Experiment 20001557 PARAMETER Experiment Name: At_Drought_Soil_Dry_P Parameter: Post Timepoint (hr) Value: 3
  misc_feature: MA Experiment 20001557 PARAMETER Experiment Name: At_Drought_Soil_Dry_P Parameter: Post-Treatment Value: Re-Water vs. No Drought
  misc_feature: MA Experiment 20001557 PARAMETER Experiment Name: At_Drought_Soil_Dry_P Parameter: Timepoint (day) Value: 13
  misc_feature: MA Experiment 20001557 PARAMETER Experiment Name: At_Drought_Soil_Dry_P Parameter: Treatment Value: Drought vs. No Drought
  misc_feature: MA Experiment ID: 20001756 Result: Up-regulated in Transcription
  misc_feature: MA Experiment 20001756 PARAMETER Experiment Name: At_50mM_NH4NO3_L-to-H_P Parameter: Timepoint (hr) Value: 4
  misc_feature: MA Experiment 20001756 PARAMETER Experiment Name: At_50mM_NH4NO3_L-to-H_P Parameter: Tissue Value: Leaf
  misc_feature: MA Experiment 20001756 PARAMETER Experiment Name: At_50mM_NH4NO3_L-to-H_P Parameter: Treatment Value: 50mM NH4NO3 vs 100mM Mannitol
  misc_feature: MA Experiment ID: 20001759 Result: Up-regulated in Transcription
  misc_feature: MA Experiment 20001759 PARAMETER Experiment Name: At_50mM_NH4NO3_L-to-H_P Parameter: Timepoint (hr) Value: 1
  misc_feature: MA Experiment 20001759 PARAMETER Experiment Name: At_50mM_NH4NO3_L-to-H_P Parameter: Tissue Value: Siliques
  misc_feature: MA Experiment 20001759 PARAMETER Experiment Name: At_50mM_NH4NO3_L-to-H_P Parameter: Treatment Value: 50mM NH4NO3 vs 100mM Mannitol
  misc_feature: MA Experiment ID: 20001760 Result: Up-regulated in Transcription
  misc_feature: MA Experiment 20001760 PARAMETER Experiment Name: At_50mM_NH4NO3_L-to-H_P Parameter: Timepoint (hr) Value: 2
  misc_feature: MA Experiment 20001760 PARAMETER Experiment Name: At_50mM_NH4NO3_L-to-H_P Parameter: Tissue Value: Siliques
  misc_feature: MA Experiment 20001760 PARAMETER Experiment Name: At_50mM_NH4NO3_L-to-H_P Parameter: Treatment Value: 50mM NH4NO3 vs 100mM Mannitol
attctctgtcttgcttcttctttacccttttcttgtttccaatcaaatcctctaaagtttcgttctttgttctaagttttctgaaggagtgatatttgtttgtggtgtggttagagaaatgaatcggagacagcaagtgaaacgtagagtaggtaaatatgaagttggaagaacaattggagaaggaacgtttgctaaagttaagtttgctagaaactctgaaactggagaacctgttgctctcaagattcttgataaagagaaagttctcaagcataaaatggctgaacagattagaagagagatagctactatgaagttgataaaacatccaaatgttgttcaattatatgaggtgatggcaagtaagacgaaaatatttatcatcttggagtatgttacaggaggagaactctttgataagattgtaaatgatgggcggatgaaagaagatgaggcgcggagatatttccaacagcttatacatgctgtggactactgtcatagcagaggggtctaccatagagacctcaagcctgaaaatttactattggactcctatggaaacctcaagatctcagattttggattaagtgctttgtcccaacaagtcagggatgatggactcttgcatacatcgtgtggaacaccaaactacgttgctcctgaggttctcaatgatagaggctatgatggagcaacagctgacatgtggtcatgcggtgttgtactctatgtcctgcttgcaggttacttaccttttgatgattctaatctaatgaatctttataaaaaaatatcatctggtgaattcaactgtcctccgtggctctcactcggtgccatgaaactcatcactagaatcttagatccgaatccgatgactcgtgtaacaccgcaagaggttttcgaagatgaatggttcaagaaagattacaagccacctgttttcgaggagagggatgattcaaacatggacgatattgatgctgttttcaaggactctgaggaacatcttgttactgagaagagagaagaacagccagcggcgatcaatgccttcgagatcatttcaatgtcaaggggacttaacctagagaatctgtttgatccagaacaggaatttaagagggaaacaaggataacattgagaggaggcgcgaatgagatcatcgagaagatagaagaagctgcaaagcctctcggtttcgatgttcaaaagaagaactacaaggttagtgaaaactctgtaacggaaatgaaatgaaatgaaaagaatcaataactaaagacgtcgtagtacattacttgaaatcagatgaggcttgagaatgtgaaggctggaagaaaggggaatctcaatgtagcgacagagatattccaagtagcgccaagtcttcatatggttcaagtatcgaagtcgaaaggagacactctcgaatttcacaagttctataagaagctctctaattctctggagcaagtagtctggacgaataacgaagttaagaaagaaacagcaaagtgatgtatgagagttttcttttgggacaattcttgctttctttgtgtataagagcttttttgctttaccggctactttgtgtggatgatgagaaagggagtgggattggttttgtgtaaaagaaaggtgtaaatatgaactgcattactcgataaggtgctgcgatgccagttataaagtcatatcaaagcttgttggc

SEQ ID NO: 89485 - protein, 382 aa, Arabidopsis thaliana
  peptide (1)..(382): Ceres Seq. ID no. 12719101
  misc_feature (14)..(269): Pfam Name: Protein kinase domain Pfam Description: Protein kinase domain
  misc_feature (1)..(376): Homolog of NCBI NO: 30683336 NR Description: CBL-interacting protein kinase 3 [Arabidopsis
  misc_feature (6)..(373): Homolog of NCBI NO: 7446371 NR Description: probable serine/threonine kinase (EC 2.7.1.-) - sorghum >gi|2632252|emb|CAA73067.1| serine/threonine kinase
  misc_feature (6)..(373): Homolog of NCBI NO: 7446372 NR Description: probable serine/threonine kinase (EC 2.7.1.-) - sorghum >gi|2632254|emb|CAA73068.1| serine/threonine kinase
  misc_feature (1)..(382): Homolog of NCBI NO: 30688193 NR Description: NAF specific protein kinase family [Arabidopsis >gi|29294047|gb|AAO73884.1| NAF specific protein kinase family
  misc_feature (8)..(373): Homolog of NCBI NO: 18397430 NR Description: serine/threonine kinase, putative; protein id: supported by cDNA: gi_14486385, supported by cDNA: gi_15912282,
  misc_feature (8)..(373): Homolog of NCBI NO: 15223317 NR Description: serine threonine kinase, putative; protein id: supported by cDNA: gi_14423523, supported by cDNA: gi_20259787
  misc_feature (8)..(373): Homolog of NCBI NO: 25387051 NR Description: probable serine/threonine kinase [imported] - thaliana >gi|12320856|gb|AAG50566.1|AC073506_8 serine/threonine
  misc_feature (8)..(373): Homolog of NCBI NO: 14423524 NR Description: similar to wpk4 protein kinase [Arabidopsis >gi|20259788|gb|AAM13241.1| similar to wpk4 protein kinase
  misc_feature (8)..(373): Homolog of NCBI NO: 30677898 NR Description: CBL-interacting protein kinase 9 [Arabidopsis
  misc_feature (8)..(373): Homolog of NCBI NO: 30677901 NR Description: CBL-interacting protein kinase 9 [Arabidopsis
MNRRQQVKRRVGKYEVGRTIGEGTFAKVKFARNSETGEPVALKILDKEKVLKHKMAEQIRREIATMKLIKHPNVVQLYEVMASKTKIFIILEYVTGGELFDKIVNDGRMKEDEARRYFQQLIHAVDYCHSRGVYHRDLKPENLLLDSYGNLKISDFGLSALSQQVRDDGLLHTSCGTPNYVAPEVLNDRGYDGATADMWSCGVVLYVLLAGYLPFDDSNLMNLYKKISSGEFNCPPWLSLGAMKLITRILDPNPMTRVTPQEVFEDEWFKKDYKPPVFEERDDSNMDDIDAVFKDSEEHLVTEKREEQPAAINAFEIISMSRGLNLENLFDPEQEFKRETRITLRGGANEIIEKIEEAAKPLGFDVQKKNYKVSENSVTEMK

SEQ ID NO: 89486 - protein, 328 aa, Arabidopsis thaliana
  peptide (1)..(328): Ceres Seq. ID no. 12719102
  misc_feature (1)..(215): Pfam Name: Protein kinase domain Pfam Description: Protein kinase domain
  misc_feature (1)..(322): Homolog of NCBI NO: 30683336 NR Description: CBL-interacting protein kinase 3 [Arabidopsis
  misc_feature (1)..(319): Homolog of NCBI NO: 7446371 NR Description: probable serine/threonine kinase (EC 2.7.1.-) - sorghum >gi|2632252|emb|CAA73067.1| serine/threonine kinase
  misc_feature (1)..(319): Homolog of NCBI NO: 7446372 NR Description: probable serine/threonine kinase (EC 2.7.1.-) - sorghum >gi|2632254|emb|CAA73068.1| serine/threonine kinase
  misc_feature (1)..(328): Homolog of NCBI NO: 30688193 NR Description: NAF specific protein kinase family [Arabidopsis >gi|29294047|gb|AAO73884.1| NAF specific protein kinase family
  misc_feature (1)..(319): Homolog of NCBI NO: 18397430 NR Description: serine/threonine kinase, putative; protein id: supported by cDNA: gi_14486385, supported by cDNA: gi_15912282,
  misc_feature (1)..(319): Homolog of NCBI NO: 15223317 NR Description: serine threonine kinase, putative; protein id: supported by cDNA: gi_14423523, supported by cDNA: gi_20259787
  misc_feature (1)..(319): Homolog of NCBI NO: 25387051 NR Description: probable serine/threonine kinase [imported] - thaliana >gi|12320856|gb|AAG50566.1|AC073506_8 serine/threonine
  misc_feature (1)..(319): Homolog of NCBI NO: 14423524 NR Description: similar to wpk4 protein kinase [Arabidopsis >gi|20259788|gb|AAM13241.1| similar to wpk4 protein kinase
  misc_feature (1)..(319): Homolog of NCBI NO: 30677898 NR Description: CBL-interacting protein kinase 9 [Arabidopsis
  misc_feature (1)..(319): Homolog of NCBI NO: 30677901 NR Description: CBL-interacting protein kinase 9 [Arabidopsis
MAEQIRREIATMKLIKHPNVVQLYEVMASKTKIFIILEYVTGGELFDKIVNDGRMKEDEARRYFQQLIHAVDYCHSRGVYHRDLKPENLLLDSYGNLKISDFGLSALSQQVRDDGLLHTSCGTPNYVAPEVLNDRGYDGATADMWSCGVVLYVLLAGYLPFDDSNLMNLYKKISSGEFNCPPWLSLGAMKLITRILDPNPMTRVTPQEVFEDEWFKKDYKPPVFEERDDSNMDDIDAVFKDSEEHLVTEKREEQPAAINAFEIISMSRGLNLENLFDPEQEFKRETRITLRGGANEIIEKIEEAAKPLGFDVQKKNYKVSENSVTEMK

SEQ ID NO: 89487 - protein, 317 aa, Arabidopsis thaliana
  peptide (1)..(317): Ceres Seq. ID no. 12719103
  misc_feature (1)..(204): Pfam Name: Protein kinase domain Pfam Description: Protein kinase domain
  misc_feature (1)..(311): Homolog of NCBI NO: 30683336 NR Description: CBL-interacting protein kinase 3 [Arabidopsis
  misc_feature (1)..(308): Homolog of NCBI NO: 7446371 NR Description: probable serine/threonine kinase (EC 2.7.1.-) - sorghum >gi|2632252|emb|CAA73067.1| serine/threonine kinase
  misc_feature (1)..(308): Homolog of NCBI NO: 7446372 NR Description: probable serine/threonine kinase (EC 2.7.1.-) - sorghum >gi|2632254|emb|CAA73068.1| serine/threonine kinase
  misc_feature (1)..(317): Homolog of NCBI NO: 30688193 NR Description: NAF specific protein kinase family [Arabidopsis >gi|29294047|gb|AAO73884.1| NAF specific protein kinase family
  misc_feature (1)..(308): Homolog of NCBI NO: 18397430 NR Description: serine/threonine kinase, putative; protein id: supported by cDNA: gi_14486385, supported by cDNA: gi_15912282,
  misc_feature (1)..(308): Homolog of NCBI NO: 15223317 NR Description: serine threonine kinase, putative; protein id: supported by cDNA: gi_14423523, supported by cDNA: gi_20259787
  misc_feature (1)..(308): Homolog of NCBI NO: 25387051 NR Description: probable serine/threonine kinase [imported] - thaliana >gi|12320856|gb|AAG50566.1|AC073506_8 serine/threonine
  misc_feature (1)..(308): Homolog of NCBI NO: 14423524 NR Description: similar to wpk4 protein kinase [Arabidopsis >gi|20259788|gb|AAM13241.1| similar to wpk4 protein kinase
  misc_feature (1)..(308): Homolog of NCBI NO: 30677898 NR Description: CBL-interacting protein kinase 9 [Arabidopsis
  misc_feature (1)..(308): Homolog of NCBI NO: 30677901 NR Description: CBL-interacting protein kinase 9 [Arabidopsis
MKLIKHPNVVQLYEVMASKTKIFIILEYVTGGELFDKIVNDGRMKEDEARRYFQQLIHAVDYCHSRGVYHRDLKPENLLLDSYGNLKISDFGLSALSQQVRDDGLLHTSCGTPNYVAPEVLNDRGYDGATADMWSCGVVLYVLLAGYLPFDDSNLMNLYKKISSGEFNCPPWLSLGAMKLITRILDPNPMTRVTPQEVFEDEWFKKDYKPPVFEERDDSNMDDIDAVFKDSEEHLVTEKREEQPAAINAFEIISMSRGLNLENLFDPEQEFKRETRITLRGGANEIIEKIEEAAKPLGFDVQKKNYKVSENSVTEMK

SEQ ID NO: 89488 - DNA, 1545 bp, Arabidopsis thaliana
  misc_feature (1)..(1545): Ceres Seq. ID no. 12719104
  misc_feature: MA Experiment ID: 20000171 Result: Up-regulated in Transcription
  misc_feature: MA Experiment 20000171 PARAMETER Experiment Name: At_42deg_Heat_P Parameter: Age (day) Value: 14
  misc_feature: MA Experiment 20000171 PARAMETER Experiment Name: At_42deg_Heat_P Parameter: Organism Value: A. thaliana
  misc_feature: MA Experiment 20000171 PARAMETER Experiment Name: At_42deg_Heat_P Parameter: Plant Line Value: WS
  misc_feature: MA Experiment 20000171 PARAMETER Experiment Name: At_42deg_Heat_P Parameter: Temperature (deg C) Value: 42 vs. 22
  misc_feature: MA Experiment 20000171 PARAMETER Experiment Name: At_42deg_Heat_P Parameter: Timepoint (hr) Value: 1
  misc_feature: MA Experiment 20000171 PARAMETER Experiment Name: At_42deg_Heat_P Parameter: Tissue Value: Aerial
  misc_feature: MA Experiment ID: 20000173 Result: Up-regulated in Transcription
  misc_feature: MA Experiment 20000173 PARAMETER Experiment Name: At_42deg_Heat_P Parameter: Age (day) Value: 14
  misc_feature: MA Experiment 20000173 PARAMETER Experiment Name: At_42deg_Heat_P Parameter: Organism Value: A. thaliana
  misc_feature: MA Experiment 20000173 PARAMETER Experiment Name: At_42deg_Heat_P Parameter: Plant Line Value: WS
  misc_feature: MA Experiment 20000173 PARAMETER Experiment Name: At_42deg_Heat_P Parameter: Temperature (deg C) Value: 42 vs. 22
  misc_feature: MA Experiment 20000173 PARAMETER Experiment Name: At_42deg_Heat_P Parameter: Timepoint (hr) Value: 6
  misc_feature: MA Experiment 20000173 PARAMETER Experiment Name: At_42deg_Heat_P Parameter: Tissue Value: Aerial
  misc_feature: MA Experiment ID: 20000180 Result: Up-regulated in Transcription
  misc_feature: MA Experiment 20000180 PARAMETER Experiment Name: At_Germinating_Seeds_P Parameter: Age (hr) Value: 24 vs. 0
  misc_feature: MA Experiment 20000180 PARAMETER Experiment Name: At_Germinating_Seeds_P Parameter: Tissue Value: Germinating Seeds
  misc_feature: MA Experiment ID: 20000184 Result: Up-regulated in Transcription
  misc_feature: MA Experiment 20000184 PARAMETER Experiment Name: At_Shoots__P Parameter: Age (day) Value: 7
  misc_feature: MA Experiment 20000184 PARAMETER Experiment Name: At_Shoots__P Parameter: Tissue Value: Shoots vs. Whole Plant
  misc_feature: MA Experiment ID: 20000185 Result: Up-regulated in Transcription
  misc_feature: MA Experiment 20000185 PARAMETER Experiment Name: At_Roots__P Parameter: Age (day) Value: 7 vs. 21
  misc_feature: MA Experiment 20000185 PARAMETER Experiment Name: At_Roots__P Parameter: Organism Value: A. thaliana
  misc_feature: MA Experiment 20000185 PARAMETER Experiment Name: At_Roots__P Parameter: Tissue Value: Roots vs. Whole Plant
  misc_feature: MA Experiment ID: 20000437 Result: Down-regulated in Transcription
  misc_feature: MA Experiment 20000437 PARAMETER Experiment Name: At_Drought_P Parameter: Age (day) Value: 8
  misc_feature: MA Experiment 20000437 PARAMETER Experiment Name: At_Drought_P Parameter: Organism Value: A. thaliana
  misc_feature: MA Experiment 20000437 PARAMETER Experiment Name: At_Drought_P Parameter: Plant Line Value: WS
  misc_feature: MA Experiment 20000437 PARAMETER Experiment Name: At_Drought_P Parameter: Timepoint (hr) Value: 24
  misc_feature: MA Experiment 20000437 PARAMETER Experiment Name: At_Drought_P Parameter: Tissue Value: Whole Plant
  misc_feature: MA Experiment 20000437 PARAMETER Experiment Name: At_Drought_P Parameter: Treatment Value: Drought vs. No Drought
  misc_feature: MA Experiment ID: 20000438 Result: Up-regulated in Transcription
  misc_feature: MA Experiment 20000438 PARAMETER Experiment Name: At_Shoots__P Parameter: Age (day) Value: 14
  misc_feature: MA Experiment 20000438 PARAMETER Experiment Name: At_Shoots__P Parameter: Tissue Value: Shoots vs. Whole Plant
  misc_feature: MA Experiment ID: 20000439 Result: Up-regulated in Transcription
  misc_feature: MA Experiment 20000439 PARAMETER Experiment Name: At_Roots__P Parameter: Age (day) Value: 14 vs. 21
  misc_feature: MA Experiment 20000439 PARAMETER Experiment Name: At_Roots__P Parameter: Organism Value: A. thaliana
  misc_feature: MA Experiment 20000439 PARAMETER Experiment Name: At_Roots__P Parameter: Tissue Value: Roots vs. Whole Plant
atgggagagataatgaacgttgactttgtaaactgtttgatcttaatcctcctctgcctcctttcaatcctctgttactctttcttcttcaagaaaccaaaggatggtttcaatttgccaccgagccctccctctctaccgatcattggccatcttcatcatctcctctctctttttatgcacagatctttgcaaaaactctcctccaagtatggacctctcctctatcttcacgtcttcaatgttcccatactccttgtctcctctccctcaatagcctatgagatctttagggcacaagacgtaaacgtttccactcgcgacttccctacgaatgaggggtctctcttcctcggatcatttagcttcattaccgcaccttacggagaatactggaagttcatgaagaagctcatcgtcacaaagctcctcgggcctcaagcactcgagaggtcacaacgcatccgtgcaaatgaagtagagaggttttactcaaacctattagataaggcgatgaagaaagaaagtgttgagattgctgatgaagctatgaagctagtcaacaacataatctgcaagatgattatggggaggacctgttcagaagaaaatggtgaagcagagagaattagaggcttggtgaccaagtcagatgccttgttgaagaagtttttgctggcggccatcttgcggaaaccacttaagaagattgggatcacactgtttaaaaaggtgttcatggatatttctctcaagtttgacgaggtgttagagaagattcttgtggaaaacgaagagagacttgaggagaatcaacaaggtactgacataatggataagctcttagaagtttatggagacaaaacttccgagtataagatcactagagaccatatcaagtccttgtttgtggatcttttctttgcaggtactgacaccgcaacacacactatagagtggaccatggccgagatcatgaacaactctttgattcttgagagattgagagaagaaattgattctgttgtagggaaaacaaggttgattcaagaaactgatctaccgaatctcctttacttgcaagcaactgtcaaagaagggctaagattgcaccctacgatccctcttgtgttgaggacgtttcaagacgggtgtacgatcggaggcttttctatacctaagaagacaaaacttgttgttaatggttatgctataatgagagatcctgataactgggaagatccactggagtttaaaccagagaggtttctagcttcttcaagatcaagccaaaaagacgcaataaaagaagaagttctaaaatatctttcattcggaagcggaaggagaggatgtcctggagtgaatctagcttatgtgtctgtagaaaccgctattggagtgatggtgcaatgctttgattggaagatcgacggacataagatcaacatgaatgaggttgctggtaaaggaacgttgagcatggctcatcctcttaagtgcactcttgttcctcgaagtgtaaccccattaacttcaaagtag

SEQ ID NO: 89489 - protein, 514 aa, Arabidopsis thaliana
  peptide (1)..(514): Ceres Seq. ID no. 12719105
  misc_feature (40)..(505): Pfam Name: Cytochrome P450 Pfam Description: Cytochrome P450
  misc_feature (1)..(514): Homolog of NCBI NO: 15225832 NR Description: cytochrome p450 family; protein id: At2g27000.1
  misc_feature (146)..(513): Homolog of NCBI NO: 15225834 NR Description: cytochrome p450, putative; protein id: [Arabidopsis thaliana] >gi|25282589|pir||F84667 probable
  misc_feature (5)..(127): Homolog of NCBI NO: 15225834 NR Description: cytochrome p450, putative; protein id: [Arabidopsis thaliana] >gi|25282589|pir||F84667 probable
  misc_feature (13)..(511): Homolog of NCBI NO: 15233774 NR Description: cytochrome p450 family; protein id: At4g15350.1
  misc_feature (13)..(511): Homolog of NCBI NO: 7430617 NR Description: cytochrome P450 - Arabidopsis thaliana
  misc_feature (1)..(513): Homolog of NCBI NO: 15232418 NR Description: cytochrome P450, putative; protein id: At3g20950.1
  misc_feature (1)..(512): Homolog of NCBI NO: 15231052 NR Description: cytochrome p450 family; protein id: At3g20130.1
  misc_feature (1)..(510): Homolog of NCBI NO: 15231053 NR Description: cytochrome p450 family; protein id: At3g20140.1
  misc_feature (1)..(513): Homolog of NCBI NO: 30685997 NR Description: cytochrome P450 family [Arabidopsis thaliana]
  misc_feature (5)..(512): Homolog of NCBI NO: 18402480 NR Description: cytochrome P450, putative; protein id: supported by cDNA: 147792. [Arabidopsis thaliana]
MGEIMNVDFVNCLILILLCLLSILCYSFFFKKPKDGFNLPPSPPSLPIIGHLHHLLSLFMHRSLQKLSSKYGPLLYLHVFNVPILLVSSPSIAYEIFRAQDVNVSTRDFPTNEGSLFLGSFSFITAPYGEYWKFMKKLIVTKLLGPQALERSQRIRANEVERFYSNLLDKAMKKESVEIADEAMKLVNNIICKMIMGRTCSEENGEAERIRGLVTKSDALLKKFLLAAILRKPLKKIGITLFKKVFMDISLKFDEVLEKILVENEERLEENQQGTDIMDKLLEVYGDKTSEYKITRDHIKSLFVDLFFAGTDTATHTIEWTMAEIMNNSLILERLREEIDSVVGKTRLIQETDLPNLLYLQATVKEGLRLHPTIPLVLRTFQDGCTIGGFSIPKKTKLVVNGYAIMRDPDNWEDPLEFKPERFLASSRSSQKDAIKEEVLKYLSFGSGRRGCPGVNLAYVSVETAIGVMVQCFDWKIDGHKINMNEVAGKGTLSMAHPLKCTLVPRSVTPLTSK

SEQ ID NO: 89490 - protein, 510 aa, Arabidopsis thaliana
  peptide (1)..(510): Ceres Seq. ID no. 12719106
  misc_feature (36)..(501): Pfam Name: Cytochrome P450 Pfam Description: Cytochrome P450
  misc_feature (1)..(510): Homolog of NCBI NO: 15225832 NR Description: cytochrome p450 family; protein id: At2g27000.1
  misc_feature (142)..(509): Homolog of NCBI NO: 15225834 NR Description: cytochrome p450, putative; protein id: [Arabidopsis thaliana] >gi|25282589|pir||F84667 probable
  misc_feature (1)..(123): Homolog of NCBI NO: 15225834 NR Description: cytochrome p450, putative; protein id: [Arabidopsis thaliana] >gi|25282589|pir||F84667 probable
  misc_feature (9)..(507): Homolog of NCBI NO: 15233774 NR Description: cytochrome p450 family; protein id: At4g15350.1
  misc_feature (9)..(507): Homolog of NCBI NO: 7430617 NR Description: cytochrome P450 - Arabidopsis thaliana
  misc_feature (1)..(509): Homolog of NCBI NO: 15232418 NR Description: cytochrome P450, putative; protein id: At3g20950.1
  misc_feature (1)..(508): Homolog of NCBI NO: 15231052 NR Description: cytochrome p450 family; protein id: At3g20130.1
  misc_feature (1)..(506): Homolog of NCBI NO: 15231053 NR Description: cytochrome p450 family; protein id: At3g20140.1
  misc_feature (1)..(509): Homolog of NCBI NO: 30685997 NR Description: cytochrome P450 family [Arabidopsis thaliana]
  misc_feature (1)..(508): Homolog of NCBI NO: 18402480 NR Description: cytochrome P450, putative; protein id: supported by cDNA: 147792. [Arabidopsis thaliana]
MNVDFVNCLILILLCLLSILCYSFFFKKPKDGFNLPPSPPSLPIIGHLHHLLSLFMHRSLQKLSSKYGPLLYLHVFNVPILLVSSPSIAYEIFRAQDVNVSTRDFPTNEGSLFLGSFSFITAPYGEYWKFMKKLIVTKLLGPQALERSQRIRANEVERFYSNLLDKAMKKESVEIADEAMKLVNNIICKMIMGRTCSEENGEAERIRGLVTKSDALLKKFLLAAILRKPLKKIGITLFKKVFMDISLKFDEVLEKILVENEERLEENQQGTDIMDKLLEVYGDKTSEYKITRDHIKSLFVDLFFAGTDTATHTIEWTMAEIMNNSLILERLREEIDSVVGKTRLIQETDLPNLLYLQATVKEGLRLHPTIPLVLRTFQDGCTIGGFSIPKKTKLVVNGYAIMRDPDNWEDPLEFKPERFLASSRSSQKDAIKEEVLKYLSFGSGRRGCPGVNLAYVSVETAIGVMVQCFDWKIDGHKINMNEVAGKGTLSMAHPLKCTLVPRSVTPLTSK

SEQ ID NO: 89491 - protein, 455 aa, Arabidopsis thaliana
  peptide (1)..(455): Ceres Seq. ID no. 12719107
  misc_feature (1)..(446): Pfam Name: Cytochrome P450 Pfam Description: Cytochrome P450
  misc_feature (1)..(455): Homolog of NCBI NO: 15225832 NR Description: cytochrome p450 family; protein id: At2g27000.1
  misc_feature (87)..(454): Homolog of NCBI NO: 15225834 NR Description: cytochrome p450, putative; protein id: [Arabidopsis thaliana] >gi|25282589|pir||F84667 probable
  misc_feature (1)..(68): Homolog of NCBI NO: 15225834 NR Description: cytochrome p450, putative; protein id: [Arabidopsis thaliana] >gi|25282589|pir||F84667 probable
  misc_feature (1)..(452): Homolog of NCBI NO: 15233774 NR Description: cytochrome p450 family; protein id: At4g15350.1
  misc_feature (1)..(452): Homolog of NCBI NO: 7430617 NR Description: cytochrome P450 - Arabidopsis thaliana
  misc_feature (1)..(454): Homolog of NCBI NO: 15232418 NR Description: cytochrome P450, putative; protein id: At3g20950.1
  misc_feature (1)..(453): Homolog of NCBI NO: 15231052 NR Description: cytochrome p450 family; protein id: At3g20130.1
  misc_feature (1)..(451): Homolog of NCBI NO: 15231053 NR Description: cytochrome p450 family; protein id: At3g20140.1
  misc_feature (1)..(454): Homolog of NCBI NO: 30685997 NR Description: cytochrome P450 family [Arabidopsis thaliana]
  misc_feature (1)..(453): Homolog of NCBI NO: 18402480 NR Description: cytochrome P450, putative; protein id: supported by cDNA: 147792. [Arabidopsis thaliana]
MHRSLQKLSSKYGPLLYLHVFNVPILLVSSPSIAYEIFRAQDVNVSTRDFPTNEGSLFLGSFSFITAPYGEYWKFMKKLIVTKLLGPQALERSQRIRANEVERFYSNLLDKAMKKESVEIADEAMKLVNNIICKMIMGRTCSEENGEAERIRGLVTKSDALLKKFLLAAILRKPLKKIGITLFKKVFMDISLKFDEVLEKILVENEERLEENQQGTDIMDKLLEVYGDKTSEYKITRDHIKSLFVDLFFAGTDTATHTIEWTMAEIMNNSLILERLREEIDSVVGKTRLIQETDLPNLLYLQATVKEGLRLHPTIPLVLRTFQDGCTIGGFSIPKKTKLVVNGYAIMRDPDNWEDPLEFKPERFLASSRSSQKDAIKEEVLKYLSFGSGRRGCPGVNLAYVSVETAIGVMVQCFDWKIDGHKINMNEVAGKGTLSMAHPLKCTLVPRSVTPLTSK

SEQ ID NO: 89492 - DNA, 1118 bp, Arabidopsis thaliana
  misc_feature (1)..(1118): Ceres Seq. ID no. 12719112
  misc_feature: MA Experiment ID: 20000234 Result: Down-regulated in Transcription
  misc_feature: MA Experiment 20000234 PARAMETER Experiment Name: At_Siliques_P Parameter: Age (day) Value: 21
  misc_feature: MA Experiment 20000234 PARAMETER Experiment Name: At_Siliques_P Parameter: Organism Value: A. thaliana
  misc_feature: MA Experiment 20000234 PARAMETER Experiment Name: At_Siliques_P Parameter: Plant Line Value: WS
  misc_feature: MA Experiment 20000234 PARAMETER Experiment Name: At_Siliques_P Parameter: Tissue Value: Less Than 5mm Siliques vs. Whole Plant
  misc_feature: MA Experiment ID: 20000235 Result: Down-regulated in Transcription
  misc_feature: MA Experiment 20000235 PARAMETER Experiment Name: At_Siliques_P Parameter: Age (day) Value: 21
  misc_feature: MA Experiment 20000235 PARAMETER Experiment Name: At_Siliques_P Parameter: Organism Value: A. thaliana
  misc_feature: MA Experiment 20000235 PARAMETER Experiment Name: At_Siliques_P Parameter: Plant Line Value: WS
  misc_feature: MA Experiment 20000235 PARAMETER Experiment Name: At_Siliques_P Parameter: Tissue Value: 5-10mm Siliques vs. Whole Plant
  misc_feature: MA Experiment ID: 20000264 Result: Down-regulated in Transcription
  misc_feature: MA Experiment 20000264 PARAMETER Experiment Name: At_Open_Flower_P Parameter: Age (day) Value: 21
  misc_feature: MA Experiment 20000264 PARAMETER Experiment Name: At_Open_Flower_P Parameter: Plant Line Value: WS
  misc_feature: MA Experiment 20000264 PARAMETER Experiment Name: At_Open_Flower_P Parameter: Tissue Value: Open Flower vs. Whole Plant
  misc_feature: MA Experiment ID: 20000265 Result: Down-regulated in Transcription
  misc_feature: MA Experiment 20000265 PARAMETER Experiment Name: At_Open_Flower_P Parameter: Age (day) Value: 21
  misc_feature: MA Experiment 20000265 PARAMETER Experiment Name: At_Open_Flower_P Parameter: Plant Line Value: WS
  misc_feature: MA Experiment 20000265 PARAMETER Experiment Name: At_Open_Flower_P Parameter: Tissue Value: Closed Flower vs. Whole Plant
  misc_feature: MA Experiment ID: 20000268 Result: Down-regulated in Transcription
  misc_feature: MA Experiment 20000268 PARAMETER Experiment Name: At_100mM_NaCl__P Parameter: Age (day) Value: 14
  misc_feature: MA Experiment 20000268 PARAMETER Experiment Name: At_100mM_NaCl__P Parameter: Organism Value: A. thaliana
  misc_feature: MA Experiment 20000268 PARAMETER Experiment Name: At_100mM_NaCl__P Parameter: Plant Line Value: WS
  misc_feature: MA Experiment 20000268 PARAMETER Experiment Name: At_100mM_NaCl__P Parameter: Timepoint (hr) Value: 6
  misc_feature: MA Experiment 20000268 PARAMETER Experiment Name: At_100mM_NaCl__P Parameter: Tissue Value: Whole Plant
  misc_feature: MA Experiment 20000268 PARAMETER Experiment Name: At_100mM_NaCl__P Parameter: Treatment Value: 100mM NaCl vs. No Treatment
  misc_feature: MA Experiment ID: 20000286 Result: Down-regulated in Transcription
  misc_feature: MA Experiment 20000286 PARAMETER Experiment Name: At_Open_Flower_P Parameter: Age (day) Value: 21
  misc_feature: MA Experiment 20000286 PARAMETER Experiment Name: At_Open_Flower_P Parameter: Plant Line Value: WS
  misc_feature: MA Experiment 20000286 PARAMETER Experiment Name: At_Open_Flower_P Parameter: Tissue Value: Half Open vs. Whole Plant
  misc_feature: MA Experiment ID: 20000437 Result: Down-regulated in Transcription
  misc_feature: MA Experiment 20000437 PARAMETER Experiment Name: At_Drought_P Parameter: Age (day) Value: 8
  misc_feature: MA Experiment 20000437 PARAMETER Experiment Name: At_Drought_P Parameter: Organism Value: A. thaliana
  misc_feature: MA Experiment 20000437 PARAMETER Experiment Name: At_Drought_P Parameter: Plant Line Value: WS
  misc_feature: MA Experiment 20000437 PARAMETER Experiment Name: At_Drought_P Parameter: Timepoint (hr) Value: 24
  misc_feature: MA Experiment 20000437 PARAMETER Experiment Name: At_Drought_P Parameter: Tissue Value: Whole Plant
  misc_feature: MA Experiment 20000437 PARAMETER Experiment Name: At_Drought_P Parameter: Treatment Value: Drought vs. No Drought
  misc_feature: MA Experiment ID: 20000438 Result: Down-regulated in Transcription
  misc_feature: MA Experiment 20000438 PARAMETER Experiment Name: At_Shoots__P Parameter: Age (day) Value: 14
  misc_feature: MA Experiment 20000438 PARAMETER Experiment Name: At_Shoots__P Parameter: Tissue Value: Shoots vs. Whole Plant
  misc_feature: MA Experiment ID: 20000460 Result: Up-regulated in Transcription
  misc_feature: MA Experiment 20000460 PARAMETER Experiment Name: At_10percent_PEG_P Parameter: Age (day) Value: 12
  misc_feature: MA Experiment 20000460 PARAMETER Experiment Name: At_10percent_PEG_P Parameter: Organism Value: A. thaliana
  misc_feature: MA Experiment 20000460 PARAMETER Experiment Name: At_10percent_PEG_P Parameter: Plant Line Value: WS
  misc_feature: MA Experiment 20000460 PARAMETER Experiment Name: At_10percent_PEG_P Parameter: Timepoint (day) Value: 12
  misc_feature: MA Experiment 20000460 PARAMETER Experiment Name: At_10percent_PEG_P Parameter: Tissue Value: Whole Plant
  misc_feature: MA Experiment 20000460 PARAMETER Experiment Name: At_10percent_PEG_P Parameter: Treatment Value: 10percent PEG vs. No Treatment
  misc_feature: MA Experiment ID: 20000495 Result: Down-regulated in Transcription
  misc_feature: MA Experiment 20000495 PARAMETER Experiment Name: At_Guard_Cells_P Parameter: Harvest Date Value: 8/2/2002
  misc_feature: MA Experiment 20000495 PARAMETER Experiment Name: At_Guard_Cells_P Parameter: Organism Value: A. thaliana
  misc_feature: MA Experiment 20000495 PARAMETER Experiment Name: At_Guard_Cells_P Parameter: Tissue Value: Guard Cells vs. Leaves
  misc_feature: MA Experiment ID: 20000527 Result: Up-regulated in Transcription
  misc_feature: MA Experiment 20000527 PARAMETER Experiment Name: At_10percent_PEG_P Parameter: Age (day) Value: 20
  misc_feature: MA Experiment 20000527 PARAMETER Experiment Name: At_10percent_PEG_P Parameter: Organism Value: A. thaliana
  misc_feature: MA Experiment 20000527 PARAMETER Experiment Name: At_10percent_PEG_P Parameter: Plant Line Value: WS
  misc_feature: MA Experiment 20000527 PARAMETER Experiment Name: At_10percent_PEG_P Parameter: Timepoint (day) Value: 20
  misc_feature: MA Experiment 20000527 PARAMETER Experiment Name: At_10percent_PEG_P Parameter: Tissue Value: Whole Plant
  misc_feature: MA Experiment 20000527 PARAMETER Experiment Name: At_10percent_PEG_P Parameter: Treatment Value: 10percent PEG vs. No Treatment
  misc_feature: MA Experiment ID: 20000794 Result: Down-regulated in Transcription
  misc_feature: MA Experiment 20000794 PARAMETER Experiment Name: At_Petals_P Parameter: Age (day) Value: 23-25 days
  misc_feature: MA Experiment 20000794 PARAMETER Experiment Name: At_Petals_P Parameter: Plant Line Value: WS
  misc_feature: MA Experiment 20000794 PARAMETER Experiment Name: At_Petals_P Parameter: Tissue Value: Petals vs. Whole plant
  misc_feature: MA Experiment ID: 20001247 Result: Up-regulated in Transcription
  misc_feature: MA Experiment 20001247 PARAMETER Experiment Name: At_Far-red-induction_P Parameter: Age (day) Value: 7
  misc_feature: MA Experiment 20001247 PARAMETER Experiment Name: At_Far-red-induction_P Parameter: Light Value: Far-red vs. White
  misc_feature: MA Experiment 20001247 PARAMETER Experiment Name: At_Far-red-induction_P Parameter: Organism Value: A. thaliana
  misc_feature: MA Experiment 20001247 PARAMETER Experiment Name: At_Far-red-induction_P Parameter: Plant Line Value: Columbia
  misc_feature: MA Experiment 20001247 PARAMETER Experiment Name: At_Far-red-induction_P Parameter: Timepoint (hr) Value: 1
  misc_feature: MA Experiment 20001247 PARAMETER Experiment Name: At_Far-red-induction_P Parameter: Tissue Value: Whole Plant
  misc_feature: MA Experiment ID: 20001557 Result: Up-regulated in Transcription
  misc_feature: MA Experiment 20001557 PARAMETER Experiment Name: At_Drought_Soil_Dry_P Parameter: Age (day) Value: 27
  misc_feature: MA Experiment 20001557 PARAMETER Experiment Name: At_Drought_Soil_Dry_P Parameter: Organism Value: A. thaliana
  misc_feature: MA Experiment 20001557 PARAMETER Experiment Name: At_Drought_Soil_Dry_P Parameter: Plant Line Value: WS
  misc_feature: MA Experiment 20001557 PARAMETER Experiment Name: At_Drought_Soil_Dry_P Parameter: Post Timepoint (hr) Value: 3
  misc_feature: MA Experiment 20001557 PARAMETER Experiment Name: At_Drought_Soil_Dry_P Parameter: Post-Treatment Value: Re-Water vs. No Drought
  misc_feature: MA Experiment 20001557 PARAMETER Experiment Name: At_Drought_Soil_Dry_P Parameter: Timepoint (day) Value: 13
  misc_feature: MA Experiment 20001557 PARAMETER Experiment Name: At_Drought_Soil_Dry_P Parameter: Treatment Value: Drought vs. No Drought
  misc_feature: MA Experiment ID: 20001558 Result: Up-regulated in Transcription
  misc_feature: MA Experiment 20001558 PARAMETER Experiment Name: At_Drought_Soil_Dry_P Parameter: Age (day) Value: 27
  misc_feature: MA Experiment 20001558 PARAMETER Experiment Name: At_Drought_Soil_Dry_P Parameter: Organism Value: A. thaliana
  misc_feature: MA Experiment 20001558 PARAMETER Experiment Name: At_Drought_Soil_Dry_P Parameter: Plant Line Value: WS
  misc_feature: MA Experiment 20001558 PARAMETER Experiment Name: At_Drought_Soil_Dry_P Parameter: Post Timepoint (hr) Value: 6
  misc_feature: MA Experiment 20001558 PARAMETER Experiment Name: At_Drought_Soil_Dry_P Parameter: Post-Treatment Value: Re-Water vs. No Drought
  misc_feature: MA Experiment 20001558 PARAMETER Experiment Name: At_Drought_Soil_Dry_P Parameter: Timepoint (day) Value: 13
  misc_feature: MA Experiment 20001558 PARAMETER Experiment Name: At_Drought_Soil_Dry_P Parameter: Treatment Value: Drought vs. No Drought
  misc_feature: MA Experiment ID: 20001560 Result: Up-regulated in Transcription
  misc_feature: MA Experiment 20001560 PARAMETER Experiment Name: At_Drought_Soil_Dry_P Parameter: Age (day) Value: 28
  misc_feature: MA Experiment 20001560 PARAMETER Experiment Name: At_Drought_Soil_Dry_P Parameter: Organism Value: A. thaliana
  misc_feature: MA Experiment 20001560 PARAMETER Experiment Name: At_Drought_Soil_Dry_P Parameter: Plant Line Value: WS
  misc_feature: MA Experiment 20001560 PARAMETER Experiment Name: At_Drought_Soil_Dry_P Parameter: Post Timepoint (hr) Value: None
  misc_feature: MA Experiment 20001560 PARAMETER Experiment Name: At_Drought_Soil_Dry_P Parameter: Post-Treatment Value: None
  misc_feature: MA Experiment 20001560 PARAMETER Experiment Name: At_Drought_Soil_Dry_P Parameter: Timepoint (day) Value: 14
  misc_feature: MA Experiment 20001560 PARAMETER Experiment Name: At_Drought_Soil_Dry_P Parameter: Treatment Value: Drought vs. No Drought
  misc_feature: MA Experiment ID: 20001761 Result: Down-regulated in Transcription
  misc_feature: MA Experiment 20001761 PARAMETER Experiment Name: At_50mM_NH4NO3_L-to-H_P Parameter: Timepoint (hr) Value: 4
  misc_feature: MA Experiment 20001761 PARAMETER Experiment Name: At_50mM_NH4NO3_L-to-H_P Parameter: Tissue Value: Siliques
  misc_feature: MA Experiment 20001761 PARAMETER Experiment Name: At_50mM_NH4NO3_L-to-H_P Parameter: Treatment Value: 50mM NH4NO3 vs 100mM Mannitol
gtttctcatttctcaactctcaaactcaaatcacttcctttgtctcagtgactctagtctatctccaatggctgaacgagtctatcccgccgattcaccaccacaaagcggacaattctccggcaacttcagctccggcgaattccccaaaaaaccagcaccaccaccatcaacatacgtaatccaagtcccaaaagatcaaatctaccgtataccaccgccggaaaacgcacaccgctttgaacaactctctcgtaaaaaaaccaaccgcagtaactgtagatgctgcttctgctcattcctcgccgcggttttcatcttaatcgtcctcgccggaatatccttcgcggttctctacctaatctaccgtcccgaagctcctaaatactccatcgaaggattctctgtttccggtatcaatctgaattcaacatctccgatttcgccgagttttaacgttaccgttagatcacgtaacggtaacggtaaaatcggggtttactacgagaaagaaagctctgttgatgtgtattacaacgacgttgatataagtaacggtgttatgccggtgttttatcagccggcgaagaatgtaacggtcgttaagttggttttaagtggttctaaaatacagttgactagtggtatgaggaaggagatgcgtaatgaggtgagtaagaaaacggtgccgtttaagttgaagattaaagctccggtgaagattaagtttggttctgttaagacgtggactatgattgttaatgttgactgtgatgtaacggtggataaattgacggcgccgtcgaggattgtgtcgagaaaatgcagtcatgacgtggatctttggtgatgaatttgctctttgttttttttttttaaagaagaaaataagaaaagaaatgagtacagaggatgtttttggatttgtaggattttttttttataaattataatgttgactttgcattttttattttgggatgttttttttgatgagaacatataatgttgtgaatttgtgattggccggaacatttccaatttgaaccttattttatgtaagttgaaaacttcttttttgtacagttcacattttgaaggagtagtttgctgttgag

SEQ ID NO: 89493 - protein, 282 aa, Arabidopsis thaliana
  peptide (1)..(282): Ceres Seq. ID no. 12719113
  misc_feature (23)..(282): Homolog of NCBI NO: 18401317 NR Description: expressed protein; protein id: At2g27080.1, by cDNA: gi_13877664, supported by cDNA: gi_15450380, supported cDNA: gi_16974488 [Arabidopsis thaliana] >gi|25407856|pir||E84668
  misc_feature (40)..(281): Homolog of NCBI NO: 15242167 NR Description: putative protein; protein id: At5g21130.1 thaliana] >gi|29294053|gb|AAO73890.1| hypothetical protein
  misc_feature (52)..(275): Homolog of NCBI NO: 34909192 NR Description: P0425G02.19 [Oryza sativa (japonica
  misc_feature (70)..(275): Homolog of NCBI NO: 18408342 NR Description: expressed protein; protein id: At1g65690.1, by cDNA: 21639. [Arabidopsis thaliana]
  misc_feature (70)..(275): Homolog of NCBI NO: 6686408 NR Description: F1E22.7 [Arabidopsis thaliana]
  misc_feature (49)..(277): Homolog of NCBI NO: 15239459 NR Description: putative protein; protein id: At5g36970.1
  misc_feature (49)..(277): Homolog of NCBI NO: 10178216 NR Description: gb|AAF23842.1~gene_id:MLF18.15~similar to unknown
  misc_feature (29)..(276): Homolog of NCBI NO: 38344198 NR Description: OSJNBa0064G10.14 [Oryza sativa (japonica
  misc_feature (89)..(270): Homolog of NCBI NO: 15221846 NR Description: hypothetical protein; protein id: At1g54540.1
  misc_feature (43)..(281): Homolog of NCBI NO: 38636986 NR Description: unknown protein [Oryza sativa (japonica
FLISQLSNSNHFLCLSDSSLSPMAERVYPADSPPQSGQFSGNFSSGEFPKKPAPPPSTYVIQVPKDQIYRIPPPENAHRFEQLSRKKTNRSNCRCCFCSFLAAVFILIVLAGISFAVLYLIYRPEAPKYSIEGFSVSGINLNSTSPISPSFNVTVRSRNGNGKIGVYYEKESSVDVYYNDVDISNGVMPVFYQPAKNVTVVKLVLSGSKIQLTSGMRKEMRNEVSKKTVPFKLKIKAPVKIKFGSVKTWTMIVNVDCDVTVDKLTAPSRIVSRKCSHDVDLW

SEQ ID NO: 89494 - protein, 260 aa, Arabidopsis thaliana
  peptide (1)..(260): Ceres Seq. ID no. 12719114
  misc_feature (1)..(260): Homolog of NCBI NO: 18401317 NR Description: expressed protein; protein id: At2g27080.1, by cDNA: gi_13877664, supported by cDNA: gi_15450380, supported cDNA: gi_16974488 [Arabidopsis thaliana] >gi|25407856|pir||E84668
  misc_feature (18)..(259): Homolog of NCBI NO: 15242167 NR Description: putative protein; protein id: At5g21130.1 thaliana] >gi|29294053|gb|AAO73890.1| hypothetical protein
  misc_feature (30)..(253): Homolog of NCBI NO: 34909192 NR Description: P0425G02.19 [Oryza sativa (japonica
  misc_feature (48)..(253): Homolog of NCBI NO: 18408342 NR Description: expressed protein; protein id: At1g65690.1, by cDNA: 21639. [Arabidopsis thaliana]
  misc_feature (48)..(253): Homolog of NCBI NO: 6686408 NR Description: F1E22.7 [Arabidopsis thaliana]
  misc_feature (27)..(255): Homolog of NCBI NO: 15239459 NR Description: putative protein; protein id: At5g36970.1
  misc_feature (27)..(255): Homolog of NCBI NO: 10178216 NR Description: gb|AAF23842.1~gene_id:MLF18.15~similar to unknown
  misc_feature (7)..(254): Homolog of NCBI NO: 38344198 NR Description: OSJNBa0064G10.14 [Oryza sativa (japonica
  misc_feature (67)..(248): Homolog of NCBI NO: 15221846 NR Description: hypothetical protein; protein id: At1g54540.1
  misc_feature (21)..(259): Homolog of NCBI NO: 38636986 NR Description: unknown protein [Oryza sativa (japonica
MAERVYPADSPPQSGQFSGNFSSGEFPKKPAPPPSTYVIQVPKDQIYRIPPPENAHRFEQLSRKKTNRSNCRCCFCSFLAAVFILIVLAGISFAVLYLIYRPEAPKYSIEGFSVSGINLNSTSPISPSFNVTVRSRNGNGKIGVYYEKESSVDVYYNDVDISNGVMPVFYQPAKNVTVVKLVLSGSKIQLTSGMRKEMRNEVSKKTVPFKLKIKAPVKIKFGSVKTWTMIVNVDCDVTVDKLTAPSRIVSRKCSHDVDLW

SEQ ID NO: 89495 - DNA, 2232 bp, Arabidopsis thaliana
  misc_feature (1)..(2232): Ceres Seq. ID no. 12719115
  misc_feature: MA Experiment ID: 20000179 Result: Down-regulated in Transcription
  misc_feature: MA Experiment 20000179 PARAMETER Experiment Name: At_Germinating_Seeds_P Parameter: Age (hr) Value: 6 vs. 0
  misc_feature: MA Experiment 20000179 PARAMETER Experiment Name: At_Germinating_Seeds_P Parameter: Tissue Value: Germinating Seeds
  misc_feature: MA Experiment ID: 20000180 Result: Down-regulated in Transcription
  misc_feature: MA Experiment 20000180 PARAMETER Experiment Name: At_Germinating_Seeds_P Parameter: Age (hr) Value: 24 vs. 0
  misc_feature: MA Experiment 20000180 PARAMETER Experiment Name: At_Germinating_Seeds_P Parameter: Tissue Value: Germinating Seeds
  misc_feature: MA Experiment ID: 20000184 Result: Down-regulated in Transcription
  misc_feature: MA Experiment 20000184 PARAMETER Experiment Name: At_Shoots__P Parameter: Age (day) Value: 7
  misc_feature: MA Experiment 20000184 PARAMETER Experiment Name: At_Shoots__P Parameter: Tissue Value: Shoots vs. Whole Plant
atgggtgcatcaacatccagaatagatgaagataaagccttacagttatgtcgagaaagaaaaaaattcgtccaacaagcactcgatggaagatgtttgttagctgctgctcacgtttcatacgttcagtctcttaagagtaccggaactgccctcaggaaattttctgagactgaagttccagttgaatcttccttgtacacgtccactagtgcaacaccagaacaacctcttgctttaatcgagaaatctgtttctcatttgtcatactctcctccacctgcttcacattcccaccatgacacgtattctcctcctccgtcgcctcctagtaccagtccgttccaggtcaatcatatgaaattcaaagggttttcttcaaaaaaagtggaagagaaaccaccagtatctattattgccactgttacctcatccagtatcccaccaagcaggtctatagaaaagatggaatcaaccccatttgaggaatcttcttccatgccacctgaagcaccttgggattattttggtctttctcatccaattgacaaccagttttcttcttctcatgttgggaatggtcatgtgtcgagatctgttaaggaggaagatggaactccagaggaggaagatgatggtgaggacttttcttttcaagaaagggaagagtccagagattcggatgatgatgagtttgatgaacccacaagtgatactcttgttagaagctttgaaaacttcaatagagtgcgccgtgatcacagtactttgcctcaaagagagggagtggaaagcgactcctcagacgctgagaaaagtaaaactcctgagttatcaccaccagtgacgcctttagtagctactccagtgaacaaaacaccaaacaagggagatcacaccgagaacaagcttcctcccagggacttcttgtcaagtatgaaagagatagagttgctctttgttaaagcttcagagactggaaaagaggttcctaggatgcttgaagccaataaactacatttccgtccaatagttccatcaaaagaaagtggctccggtgcatcatcactgttcaaaacctgtctctcttgtggggaagatccaaaagatgtaccggaagagcctgctcagaactctgtgaaatacttgacctggcataggactgaatcttcacgatcctcatcttctcggaatcctctcggaggaatgaattctgatgatgtggaagagctcaatagtaatctctttgaaaacatttgcatgattgctggaagccatgcctcaacgctagacagattgtatgcatgggagcggaagctctatgatgaagttaaggggagtcagactgtgcggagagagtatgacgaaaagtgcagaattttgagagaacttgaatcagaaggtaaaggttcacaaagaatagacaagacacgtgcagttgtgaaagaccttcactccagaatcagagtggcgattcataggatcgactcaatatcaagacggattgaagaactccgtgacaatgagctccagcctcaacttgaagaactcattgaagggttgagtcgtatgtgggaagtaatgttggaatgccacaaggttcagtttcagttaatcaaagcgtgttacagaggcggaaacattaaactcaacatgcaatcagagttgcacagacaagtaacatctcaccttgaagatgagctctgcgcattggcctcaagctttacaaaatggatcacaggccagaaatcgtatattcaagcgataaacgagtggctggtgaaatgtgtcgccttaccacaacgatccaaacgaaaaaggcgtgcaccacaaccgtctttgagaaactatgggccccccatttatgcaacctgtggaatctggctagaaaagctcgaagtcttacctaccaaagaggtttcaggctccattaaagcacttgcttctgatgttgccaggttcttgccacgtcaggagaagaatcgcaccaagaaacatcgatctggtgagaacaaaaacgatttgacagctcacatgttgcaagatgagacattggaggattgtggtccgggatttgatcggtttaggacaagcttggaaggatttgttggacaactcaaccagtttgcagaatcatcagtgaaaatgtatgaggaacttaaagaaggaatccacggagctaaaaacaactacgagcagttgaagaaggcgtactcttcacaaggaaaatga

SEQ ID NO: 89496 - protein, 743 aa, Arabidopsis thaliana
  peptide (1)..(743): Ceres Seq. ID no. 12719116
  misc_feature (287)..(655): Pfam Name: Protein of unknown function (DUF632) Pfam Description: Protein of unknown function (DUF632)
  misc_feature (307)..(651): Homolog of NCBI NO: 15236022 NR Description: putative protein; protein id: At4g39790.1
  misc_feature (10)..(253): Homolog of NCBI NO: 15236022 NR Description: putative protein; protein id: At4g39790.1
  misc_feature (390)..(735): Homolog of NCBI NO: 15234640 NR Description: putative protein; protein id: At4g30130.1, by cDNA: gi_15810478 [Arabidopsis thaliana]
  misc_feature (1)..(341): Homolog of NCBI NO: 15234640 NR Description: putative protein; protein id: At4g30130.1, by cDNA: gi_15810478 [Arabidopsis thaliana]
  misc_feature (426)..(733): Homolog of NCBI NO: 22324428 NR Description: hypothetical protein~predicted by GeneMark.hmm
  misc_feature (380)..(733): Homolog of NCBI NO: 15219083 NR Description: putative bzip-like transcription factor; protein At1g21740.1 [Arabidopsis thaliana] >gi|25518309|pir||A86351
  misc_feature (1)..(98): Homolog of NCBI NO: 15219083 NR Description: putative bzip-like transcription factor; protein At1g21740.1 [Arabidopsis thaliana] >gi|25518309|pir||A86351
  misc_feature (1)..(410): Homolog of NCBI NO: 15223973 NR Description: unknown protein; protein id: At1g77500.1
  misc_feature (424)..(668): Homolog of NCBI NO: 15223973 NR Description: unknown protein; protein id: At1g77500.1
  misc_feature (413)..(674): Homolog of NCBI NO: 15236929 NR Description: putative protein; protein id: At4g35240.1
MGASTSRIDEDKALQLCRERKKFVQQALDGRCLLAAAHVSYVQSLKSTGTALRKFSETEVPVESSLYTSTSATPEQPLALIEKSVSHLSYSPPPASHSHHDTYSPPPSPPSTSPFQVNHMKFKGFSSKKVEEKPPVSIIATVTSSSIPPSRSIEKMESTPFEESSSMPPEAPWDYFGLSHPIDNQFSSSHVGNGHVSRSVKEEDGTPEEEDDGEDFSFQEREESRDSDDDEFDEPTSDTLVRSFENFNRVRRDHSTLPQREGVESDSSDAEKSKTPELSPPVTPLVATPVNKTPNKGDHTENKLPPRDFLSSMKEIELLFVKASETGKEVPRMLEANKLHFRPIVPSKESGSGASSLFKTCLSCGEDPKDVPEEPAQNSVKYLTWHRTESSRSSSSRNPLGGMNSDDVEELNSNLFENICMIAGSHASTLDRLYAWERKLYDEVKGSQTVRREYDEKCRILRELESEGKGSQRIDKTRAVVKDLHSRIRVAIHRIDSISRRIEELRDNELQPQLEELIEGLSRMWEVMLECHKVQFQLIKACYRGGNIKLNMQSELHRQVTSHLEDELCALASSFTKWITGQKSYIQAINEWLVKCVALPQRSKRKRRAPQPSLRNYGPPIYATCGIWLEKLEVLPTKEVSGSIKALASDVARFLPRQEKNRTKKHRSGENKNDLTAHMLQDETLEDCGPGFDRFRTSLEGFVGQLNQFAESSVKMYEELKEGIHGAKNNYEQLKKAYSSQGK

SEQ ID NO: 89497 - protein, 624 aa, Arabidopsis thaliana
  peptide (1)..(624): Ceres Seq. ID no. 12719117
  misc_feature (168)..(536): Pfam Name: Protein of unknown function (DUF632) Pfam Description: Protein of unknown function (DUF632)
  misc_feature (188)..(532): Homolog of NCBI NO: 15236022 NR Description: putative protein; protein id: At4g39790.1
  misc_feature (1)..(134): Homolog of NCBI NO: 15236022 NR Description: putative protein; protein id: At4g39790.1
  misc_feature (271)..(616): Homolog of NCBI NO: 15234640 NR Description: putative protein; protein id: At4g30130.1, by cDNA: gi_15810478 [Arabidopsis thaliana]
  misc_feature (1)..(222): Homolog of NCBI NO: 15234640 NR Description: putative protein; protein id: At4g30130.1, by cDNA: gi_15810478 [Arabidopsis thaliana]
  misc_feature (307)..(614): Homolog of NCBI NO: 22324428 NR Description: hypothetical protein~predicted by GeneMark.hmm
  misc_feature (261)..(614): Homolog of NCBI NO: 15219083 NR Description: putative bzip-like transcription factor; protein At1g21740.1 [Arabidopsis thaliana] >gi|25518309|pir||A86351
  misc_feature (1)..(291): Homolog of NCBI NO: 15223973 NR Description: unknown protein; protein id: At1g77500.1
  misc_feature (305)..(549): Homolog of NCBI NO: 15223973 NR Description: unknown protein; protein id: At1g77500.1
  misc_feature (294)..(555): Homolog of NCBI NO: 15236929 NR Description: putative protein; protein id: At4g35240.1
  misc_feature (49)..(219): Homolog of NCBI NO: 15236929 NR Description: putative protein; protein id: At4g35240.1
MKFKGFSSKKVEEKPPVSIIATVTSSSIPPSRSIEKMESTPFEESSSMPPEAPWDYFGLSHPIDNQFSSSHVGNGHVSRSVKEEDGTPEEEDDGEDFSFQEREESRDSDDDEFDEPTSDTLVRSFENFNRVRRDHSTLPQREGVESDSSDAEKSKTPELSPPVTPLVATPVNKTPNKGDHTENKLPPRDFLSSMKEIELLFVKASETGKEVPRMLEANKLHFRPIVPSKESGSGASSLFKTCLSCGEDPKDVPEEPAQNSVKYLTWHRTESSRSSSSRNPLGGMNSDDVEELNSNLFENICMIAGSHASTLDRLYAWERKLYDEVKGSQTVRREYDEKCRILRELESEGKGSQRIDKTRAVVKDLHSRIRVAIHRIDSISRRIEELRDNELQPQLEELIEGLSRMWEVMLECHKVQFQLIKACYRGGNIKLNMQSELHRQVTSHLEDELCALASSFTKWITGQKSYIQAINEWLVKCVALPQRSKRKRRAPQPSLRNYGPPIYATCGIWLEKLEVLPTKEVSGSIKALASDVARFLPRQEKNRTKKHRSGENKNDLTAHMLQDETLEDCGPGFDRFRTSLEGFVGQLNQFAESSVKMYEELKEGIHGAKNNYEQLKKAYSSQGK

SEQ ID NO: 89498 - protein, 588 aa, Arabidopsis thaliana
  peptide (1)..(588): Ceres Seq. ID no. 12719118
  misc_feature (132)..(500): Pfam Name: Protein of unknown function (DUF632) Pfam Description: Protein of unknown function (DUF632)
  misc_feature (152)..(496): Homolog of NCBI NO: 15236022 NR Description: putative protein; protein id: At4g39790.1
  misc_feature (1)..(98): Homolog of NCBI NO: 15236022 NR Description: putative protein; protein id: At4g39790.1
  misc_feature (235)..(580): Homolog of NCBI NO: 15234640 NR Description: putative protein; protein id: At4g30130.1, by cDNA: gi_15810478 [Arabidopsis thaliana]
  misc_feature (1)..(186): Homolog of NCBI NO: 15234640 NR Description: putative protein; protein id: At4g30130.1, by cDNA: gi_15810478 [Arabidopsis thaliana]
  misc_feature (271)..(578): Homolog of NCBI NO: 22324428 NR Description: hypothetical protein~predicted by GeneMark.hmm
  misc_feature (225)..(578): Homolog of NCBI NO: 15219083 NR Description: putative bzip-like transcription factor; protein At1g21740.1 [Arabidopsis thaliana] >gi|25518309|pir||A86351
  misc_feature (1)..(255): Homolog of NCBI NO: 15223973 NR Description: unknown protein; protein id: At1g77500.1
  misc_feature (269)..(513): Homolog of NCBI NO: 15223973 NR Description: unknown protein; protein id: At1g77500.1
  misc_feature (258)..(519): Homolog of NCBI NO: 15236929 NR Description: putative protein; protein id: At4g35240.1
  misc_feature (13)..(183): Homolog of NCBI NO: 15236929 NR Description: putative protein; protein id: At4g35240.1
MESTPFEESSSMPPEAPWDYFGLSHPIDNQFSSSHVGNGHVSRSVKEEDGTPEEEDDGEDFSFQEREESRDSDDDEFDEPTSDTLVRSFENFNRVRRDHSTLPQREGVESDSSDAEKSKTPELSPPVTPLVATPVNKTPNKGDHTENKLPPRDFLSSMKEIELLFVKASETGKEVPRMLEANKLHFRPIVPSKESGSGASSLFKTCLSCGEDPKDVPEEPAQNSVKYLTWHRTESSRSSSSRNPLGGMNSDDVEELNSNLFENICMIAGSHASTLDRLYAWERKLYDEVKGSQTVRREYDEKCRILRELESEGKGSQRIDKTRAVVKDLHSRIRVAIHRIDSISRRIEELRDNELQPQLEELIEGLSRMWEVMLECHKVQFQLIKACYRGGNIKLNMQSELHRQVTSHLEDELCALASSFTKWITGQKSYIQAINEWLVKCVALPQRSKRKRRAPQPSLRNYGPPIYATCGIWLEKLEVLPTKEVSGSIKALASDVARFLPRQEKNRTKKHRSGENKNDLTAHMLQDETLEDCGPGFDRFRTSLEGFVGQLNQFAESSVKMYEELKEGIHGAKNNYEQLKKAYSSQGK

SEQ ID NO: 89499 - DNA, 2286 bp, Arabidopsis thaliana
  misc_feature (1)..(2286): Ceres Seq. ID no. 12719134
  misc_feature: MA Experiment ID: 20000180 Result: Down-regulated in Transcription
  misc_feature: MA Experiment 20000180 PARAMETER Experiment Name: At_Germinating_Seeds_P Parameter: Age (hr) Value: 24 vs. 0
  misc_feature: MA Experiment 20000180 PARAMETER Experiment Name: At_Germinating_Seeds_P Parameter: Tissue Value: Germinating Seeds
  misc_feature: MA Experiment ID: 20000227 Result: Up-regulated in Transcription
  misc_feature: MA Experiment 20000227 PARAMETER Experiment Name: At_Root-Tips-vs-Tops_P Parameter: Tissue Value: Root Tips vs. Root Tops
  misc_feature: MA Experiment ID: 20001906 Result: Up-regulated in Transcription
  misc_feature: MA Experiment 20001906 PARAMETER Experiment Name: At_Drought_Reproduction_P Parameter: Age (day) Value: 35
  misc_feature: MA Experiment 20001906 PARAMETER Experiment Name: At_Drought_Reproduction_P Parameter: Organism Value: A. thaliana
  misc_feature: MA Experiment 20001906 PARAMETER Experiment Name: At_Drought_Reproduction_P Parameter: Plant Line Value: WS
  misc_feature: MA Experiment 20001906 PARAMETER Experiment Name: At_Drought_Reproduction_P Parameter: Timepoint (day) Value: 5
  misc_feature: MA Experiment 20001906 PARAMETER Experiment Name: At_Drought_Reproduction_P Parameter: Tissue Value: Siliques
  misc_feature: MA Experiment 20001906 PARAMETER Experiment Name: At_Drought_Reproduction_P Parameter: Treatment Value: Drought vs. No Drought
  misc_feature: MA Experiment ID: 20001908 Result: Up-regulated in Transcription
  misc_feature: MA Experiment 20001908 PARAMETER Experiment Name: At_Drought_Reproduction_P Parameter: Age (day) Value: 40
  misc_feature: MA Experiment 20001908 PARAMETER Experiment Name: At_Drought_Reproduction_P Parameter: Organism Value: A. thaliana
  misc_feature: MA Experiment 20001908 PARAMETER Experiment Name: At_Drought_Reproduction_P Parameter: Plant Line Value: WS
  misc_feature: MA Experiment 20001908 PARAMETER Experiment Name: At_Drought_Reproduction_P Parameter: Timepoint (day) Value: 10
  misc_feature: MA Experiment 20001908 PARAMETER Experiment Name: At_Drought_Reproduction_P Parameter: Tissue Value: Siliques
  misc_feature: MA Experiment 20001908 PARAMETER Experiment Name: At_Drought_Reproduction_P Parameter: Treatment Value: Drought vs. No Drought
atgagagtcccactaatagatttcttgagattcttagtactcattctttctcttagtggtgcttcagttgctgcagatgcaacggtgaagcaaaactttaataagtatgagactgatagtggtcacgcacatccgccaccaatttatggtgccccacccagctacacaacaccaccaccaccaatttacagtcctcccatatatccaccaccaatacaaaagcctccgacttatagtcctcccatatatccaccaccaatacaaaaacctcccaccccaacttatagtcctcccatatatccaccaccaatacaaaagcccccgacaccaacttacagtcctcccatttatccaccaccaatacaaaagcctccgaccccaacttatagtcctcccatatatccaccaccaatacaaaagcctccgacaccaagttatagtcctcctgttaaaccacctccggtacaaatgcctcctacaccaacttatagtccccctataaaaccaccaccagtacataagcctccgacaccaacttacagcccccctataaaaccaccagtgcataagcctccgacaccaatttacagtcctccaatcaagccaccaccagtgcacaagcctccgacaccaatttatagtcctccgatcaaaccaccaccagtgcacaagcctccaacaccaacttatagtcccccggtcaagccaccgccagtgcataaacctccaacaccaatatatagtcctccaatcaagccaccaccagtgcacaagcctccaacaccaatttacagtccccctgttaaaccaccacctgtgcaaacgcctccaacaccaatatacagtcctcctgtaaagccaccaccagtgcataagcctccaacaccgacttacagccctccagtaaaatcacctcccgttcagaagcctcctacccctacttatagtcctccgattaagccaccaccagtgcaaaagcctccaacaccaacttatagtccaccaattaaaccgccaccagtgaagcctccaactccaatatacagtccacctgtgaagccaccaccagtacataagcctcctacaccaatttatagcccacctgtcaagccaccaccagtgcataagcctccaacaccaatttacagccctccagtaaaaccacctcccattcagaagcctcctacccctacttatagtcctccgattaagccaccaccacttcaaaagcctccaacaccaacttatagtccaccaattaaactgccaccagtgaagcctccaactccaatatacagtccacctgtgaagccaccaccagtacataagcctcctacaccaatttatagtccacctgtcaagccaccaccagtgcataagcctccaacaccaacttatagtccaccaattaaacccccaccagtgaagcccccaacacccacatacagtccacctgttcagccaccaccagtgcaaaaaccgccaacaccgacttatagtccacctgtcaagccaccgccaatacaaaaaccaccgacgccgacttacagtccacctattaaaccaccaccagtgaagcctccgacaccaacatatagtcctccaatcaagccaccaccagttcataagcctccgacaccaacttacagtccacctatcaagccacctccaattcataaacctccgacaccaacttacagtccacctatcaagccaccaccagtgcataagcctccgacaccaacttacagtccacctatcaagccaccaccagtgcataagcctccgacaccaacttacagtccacctatcaagccaccaccagtgcataagcctccgacaccaacttacagtccacctatcaagccaccaccagtgcataagcctccgacaccaacatacagtcctcctatcaagccaccaccagttcataagcctccgacaccaacatacagtccacctatcaagccaccaccagtgcaaaagcctcctaccccaacttatagccctccagtaaagccaccaccagtacaattgcctccaaccccaacttatagccctcccgtaaaaccaccaccagtacaagtgcctccaaccccaacttatagccctcccgtaaaaccaccaccagtacaagtacctccaacaccaacttatagccctcccataaaaccaccaccggtacaagtgcctccaacaccaactactccatcacctccccaaggtggatacggtactcctcctccatatgcatatctatcgcatcctatagacataaggaactag

SEQ ID NO: 89500 - protein, 761 aa, Arabidopsis thaliana
  peptide (1)..(761): Ceres Seq. ID no. 12719135
  misc_feature (180)..(593): Pfam Name: Extensin-like region Pfam Description: Extensin-like region
  misc_feature (46)..(748): Homolog of NCBI NO: 11994733 NR Description: contains similarity to cell wall-plasma membrane
  misc_feature (46)..(757): Homolog of NCBI NO: 11994733 NR Description: contains similarity to cell wall-plasma membrane
  misc_feature (46)..(751): Homolog of NCBI NO: 11994733 NR Description: contains similarity to cell wall-plasma membrane
  misc_feature (46)..(758): Homolog of NCBI NO: 11994733 NR Description: contains similarity to cell wall-plasma membrane
  misc_feature (37)..(750): Homolog of NCBI NO: 1754989 NR Description: proline-rich protein PRP2 precursor [Lupinus
  misc_feature (46)..(748): Homolog of NCBI NO: 11994733 NR Description: contains similarity to cell wall-plasma membrane
  misc_feature (9)..(750): Homolog of NCBI NO: 1754989 NR Description: proline-rich protein PRP2 precursor [Lupinus
  misc_feature (42)..(727): Homolog of NCBI NO: 1754989 NR Description: proline-rich protein PRP2 precursor [Lupinus
  misc_feature (42)..(748): Homolog of NCBI NO: 11994733 NR Description: contains similarity to cell wall-plasma membrane
  misc_feature (36)..(748): Homolog of NCBI NO: 11994733 NR Description: contains similarity to cell wall-plasma membrane
MRVPLIDFLRFLVLILSLSGASVAADATVKQNFNKYETDSGHAHPPPIYGAPPSYTTPPPPIYSPPIYPPPIQKPPTYSPPIYPPPIQKPPTPTYSPPIYPPPIQKPPTPTYSPPIYPPPIQKPPTPTYSPPIYPPPIQKPPTPSYSPPVKPPPVQMPPTPTYSPPIKPPPVHKPPTPTYSPPIKPPVHKPPTPIYSPPIKPPPVHKPPTPIYSPPIKPPPVHKPPTPTYSPPVKPPPVHKPPTPIYSPPIKPPPVHKPPTPIYSPPVKPPPVQTPPTPIYSPPVKPPPVHKPPTPTYSPPVKSPPVQKPPTPTYSPPIKPPPVQKPPTPTYSPPIKPPPVKPPTPIYSPPVKPPPVHKPPTPIYSPPVKPPPVHKPPTPIYSPPVKPPPIQKPPTPTYSPPIKPPPLQKPPTPTYSPPIKLPPVKPPTPIYSPPVKPPPVHKPPTPIYSPPVKPPPVHKPPTPTYSPPIKPPPVKPPTPTYSPPVQPPPVQKPPTPTYSPPVKPPPIQKPPTPTYSPPIKPPPVKPPTPTYSPPIKPPPVHKPPTPTYSPPIKPPPIHKPPTPTYSPPIKPPPVHKPPTPTYSPPIKPPPVHKPPTPTYSPPIKPPPVHKPPTPTYSPPIKPPPVHKPPTPTYSPPIKPPPVHKPPTPTYSPPIKPPPVQKPPTPTYSPPVKPPPVQLPPTPTYSPPVKPPPVQVPPTPTYSPPVKPPPVQVPPTPTYSPPIKPPPVQVPPTPTTPSPPQGGYGTPPPYAYLSHPIDIRN

SEQ ID NO: 89501 - protein, 605 aa, Arabidopsis thaliana
  peptide (1)..(605): Ceres Seq. ID no. 12719136
  misc_feature (24)..(437): Pfam Name: Extensin-like region Pfam Description: Extensin-like region
  misc_feature (1)..(592): Homolog of NCBI NO: 11994733 NR Description: contains similarity to cell wall-plasma membrane
  misc_feature (1)..(601): Homolog of NCBI NO: 11994733 NR Description: contains similarity to cell wall-plasma membrane
  misc_feature (1)..(595): Homolog of NCBI NO: 11994733 NR Description: contains similarity to cell wall-plasma membrane
  misc_feature (1)..(602): Homolog of NCBI NO: 11994733 NR Description: contains similarity to cell wall-plasma membrane
  misc_feature (1)..(594): Homolog of NCBI NO: 1754989 NR Description: proline-rich protein PRP2 precursor [Lupinus
  misc_feature (1)..(592): Homolog of NCBI NO: 11994733 NR Description: contains similarity to cell wall-plasma membrane
  misc_feature (1)..(594): Homolog of NCBI NO: 1754989 NR Description: proline-rich protein PRP2 precursor [Lupinus
  misc_feature (1)..(571): Homolog of NCBI NO: 1754989 NR Description: proline-rich protein PRP2 precursor [Lupinus
  misc_feature (1)..(592): Homolog of NCBI NO: 11994733 NR Description: contains similarity to cell wall-plasma membrane
  misc_feature (1)..(592): Homolog of NCBI NO: 11994733 NR Description: contains similarity to cell wall-plasma membrane
MPPTPTYSPPIKPPPVHKPPTPTYSPPIKPPVHKPPTPIYSPPIKPPPVHKPPTPIYSPPIKPPPVHKPPTPTYSPPVKPPPVHKPPTPIYSPPIKPPPVHKPPTPIYSPPVKPPPVQTPPTPIYSPPVKPPPVHKPPTPTYSPPVKSPPVQKPPTPTYSPPIKPPPVQKPPTPTYSPPIKPPPVKPPTPIYSPPVKPPPVHKPPTPIYSPPVKPPPVHKPPTPIYSPPVKPPPIQKPPTPTYSPPIKPPPLQKPPTPTYSPPIKLPPVKPPTPIYSPPVKPPPVHKPPTPIYSPPVKPPPVHKPPTPTYSPPIKPPPVKPPTPTYSPPVQPPPVQKPPTPTYSPPVKPPPIQKPPTPTYSPPIKPPPVKPPTPTYSPPIKPPPVHKPPTPTYSPPIKPPPIHKPPTPTYSPPIKPPPVHKPPTPTYSPPIKPPPVHKPPTPTYSPPIKPPPVHKPPTPTYSPPIKPPPVHKPPTPTYSPPIKPPPVHKPPTPTYSPPIKPPPVQKPPTPTYSPPVKPPPVQLPPTPTYSPPVKPPPVQVPPTPTYSPPVKPPPVQVPPTPTYSPPIKPPPVQVPPTPTTPSPPQGGYGTPPPYAYLSHPIDIRN

SEQ ID NO: 89502 - DNA, 1307 bp, Arabidopsis thaliana
  misc_feature (1)..(1307): Ceres Seq. ID no. 12719142
  misc_feature: MA Experiment ID: 20000307 Result: Up-regulated in Transcription
  misc_feature: MA Experiment 20000307 PARAMETER Experiment Name: At_Germinating_Seeds_Sub_P Parameter: Age (hr) Value: 24 vs. 0
  misc_feature: MA Experiment 20000307 PARAMETER Experiment Name: At_Germinating_Seeds_Sub_P Parameter: Organism Value: A. thaliana
  misc_feature: MA Experiment 20000307 PARAMETER Experiment Name: At_Germinating_Seeds_Sub_P Parameter: Plant Line Value: WS
  misc_feature: MA Experiment 20000307 PARAMETER Experiment Name: At_Germinating_Seeds_Sub_P Parameter: Tissue Value: Germinating Seeds
  misc_feature: MA Experiment ID: 20000315 Result: Up-regulated in Transcription
  misc_feature: MA Experiment 20000315 PARAMETER Experiment Name: At_14day_Shoots-Roots_Sub_P Parameter: Age (day) Value: 14
  misc_feature: MA Experiment 20000315 PARAMETER Experiment Name: At_14day_Shoots-Roots_Sub_P Parameter: Organism Value: A. thaliana
  misc_feature: MA Experiment 20000315 PARAMETER Experiment Name: At_14day_Shoots-Roots_Sub_P Parameter: Plant Line Value: WS
  misc_feature: MA Experiment 20000315 PARAMETER Experiment Name: At_14day_Shoots-Roots_Sub_P Parameter: Tissue Value: Shoots vs. Whole Plant
  misc_feature: MA Experiment ID: 20000328 Result: Up-regulated in Transcription
  misc_feature: MA Experiment 20000328 PARAMETER Experiment Name: At_42deg_Heat_Sub_P Parameter: Age (day) Value: 14
  misc_feature: MA Experiment 20000328 PARAMETER Experiment Name: At_42deg_Heat_Sub_P Parameter: Organism Value: A. thaliana
  misc_feature: MA Experiment 20000328 PARAMETER Experiment Name: At_42deg_Heat_Sub_P Parameter: Plant Line Value: WS
  misc_feature: MA Experiment 20000328 PARAMETER Experiment Name: At_42deg_Heat_Sub_P Parameter: Temperature (deg C) Value: 42 vs. 22
  misc_feature: MA Experiment 20000328 PARAMETER Experiment Name: At_42deg_Heat_Sub_P Parameter: Timepoint (hr) Value: 6
  misc_feature: MA Experiment 20000328 PARAMETER Experiment Name: At_42deg_Heat_Sub_P Parameter: Tissue Value: Aerial
aaaccaagtaacaaaaaccaaaacatttgtattataagagtatttttattgatactatttttaaattgtgcccatacatattacctatagggaatggcgtcaactatcatcttcattctaactatttttttaagttacagaacttcgctagctacatctcgtggtagcctttttgaagcttctgccattgagaaacatgagcaatggatggctcgattcaatcgcgtttactctgacgaaaccgagaaaagaaatcggtttaatatcttcaagaagaatttggagttcgtccagaacttcaacatgaataataaaatcacgtacaaggttgatatcaacgagttctctgatcttacggacgaagaatttcgggcgacacacactggactagttgtgcccgaggctataaccagaatttcaactctgtcttcgggcaaaaacacggtgccgtttagatatggtaatgttagtgataatggcgagagcatggattggagacaagagggggctgttacacccgttaagtatcaaggccgatgtggaggatgctgggcgttttccgcggtggcggcagtggaaggcattacaaagattactaaaggcgagcttgtatcgctatcggagcaacaactcttagactgcgacagagactacaatcaaggatgtcgtggagggataatgtcgaaagctttcgagtacataatcaaaaaccaaggcatcactactgaggataactatccataccaagaatcacaacaaacttgtagttcatcaactaccctatcatcgtcttttcgtgcagccacaatcagcggatatgagaccgttccaatgaataatgaggaagcgttgctacaagcagtgtctcaacagcctgtttctgtggggatagaagggacaggggccgcgtttaggcactactcgggaggggtattcaacggagaatgtgggacggatttgcatcatgcggttacaattgttggttatggaatgagtgaagaagggactaagtattgggtggtgaagaattcttggggggaaacttggggagaaaatggttacatgaggatcaagagagacgtggatgcaccccaaggaatgtgtggtttggccattcttgctttctatccacttgcttgaatacatgaagattgattgggtgggcttgaagtagttgaaagtattctgatcaaaatgttattttgagaaacattatggtccccatgttttcgtgcaaatggattgatatatatttttaatctgatgtgggtagaagaataaaagcaccaagtaaaagtttaaattgc

SEQ ID NO: 89503 - protein, 348 aa, Arabidopsis thaliana
  peptide (1)..(348): Ceres Seq. ID no. 12719143
  misc_feature (128)..(347): Pfam Name: Papain family cysteine protease Pfam Description: Papain family cysteine protease
  misc_feature (1)..(348): Homolog of NCBI NO: 18401420 NR Description: cysteine proteinase; protein id: At2g27420.1, by cDNA: gi_17381153, supported by cDNA: gi_20465848 [Arabidopsis >gi|25289995|pir||F84672 probable cysteine proteinase cysteine
  misc_feature (1)..(348): Homolog of NCBI NO: 18408828 NR Description: cysteine protease; protein id: At3g49340.1
  misc_feature (1)..(348): Homolog of NCBI NO: 18403438 NR Description: cysteine proteinase; protein id: At2g34080.1
  misc_feature (3)..(348): Homolog of NCBI NO: 30690594 NR Description: cysteine proteinase [Arabidopsis thaliana]
  misc_feature (13)..(348): Homolog of NCBI NO: 25289991 NR Description: cysteine proteinase (EC 3.4.22.-) [similarity] - thaliana >gi|9502421|gb|AAF88120.1|AC021043_13 Putative cysteine
  misc_feature (5)..(348): Homolog of NCBI NO: 18396939 NR Description: cysteine protease; protein id: At1g29080.1
  misc_feature (3)..(348): Homolog of NCBI NO: 24285904 NR Description: cysteine proteinase precursor [Ipomoea batatas]
  misc_feature (1)..(348): Homolog of NCBI NO: 13491750 NR Description: cysteine protease [Ipomoea batatas]
  misc_feature (17)..(348): Homolog of NCBI NO: 535454 NR Description: cysteine proteinase
  misc_feature (22)..(347): Homolog of NCBI NO: 2118132 NR Description: cysteine proteinase (EC 3.4.22.-) - Douglas fir
MASTIIFILTIFLSYRTSLATSRGSLFEASAIEKHEQWMARFNRVYSDETEKRNRFNIFKKNLEFVQNFNMNNKITYKVDINEFSDLTDEEFRATHTGLVVPEAITRISTLSSGKNTVPFRYGNVSDNGESMDWRQEGAVTPVKYQGRCGGCWAFSAVAAVEGITKITKGELVSLSEQQLLDCDRDYNQGCRGGIMSKAFEYIIKNQGITTEDNYPYQESQQTCSSSTTLSSSFRAATISGYETVPMNNEEALLQAVSQQPVSVGIEGTGAAFRHYSGGVFNGECGTDLHHAVTIVGYGMSEEGTKYWVVKNSWGETWGENGYMRIKRDVDAPQGMCGLAILAFYPLA

SEQ ID NO: 89504 - protein, 310 aa, Arabidopsis thaliana
  peptide (1)..(310): Ceres Seq. ID no. 12719144
  misc_feature (90)..(309): Pfam Name: Papain family cysteine protease Pfam Description: Papain family cysteine protease
  misc_feature (1)..(310): Homolog of NCBI NO: 18401420 NR Description: cysteine proteinase; protein id: At2g27420.1, by cDNA: gi_17381153, supported by cDNA: gi_20465848 [Arabidopsis >gi|25289995|pir||F84672 probable cysteine proteinase cysteine
  misc_feature (1)..(310): Homolog of NCBI NO: 18408828 NR Description: cysteine protease; protein id: At3g49340.1
  misc_feature (1)..(310): Homolog of NCBI NO: 18403438 NR Description: cysteine proteinase; protein id: At2g34080.1
  misc_feature (1)..(310): Homolog of NCBI NO: 30690594 NR Description: cysteine proteinase [Arabidopsis thaliana]
  misc_feature (1)..(310): Homolog of NCBI NO: 25289991 NR Description: cysteine proteinase (EC 3.4.22.-) [similarity] - thaliana >gi|9502421|gb|AAF88120.1|AC021043_13 Putative cysteine
  misc_feature (1)..(310): Homolog of NCBI NO: 18396939 NR Description: cysteine protease; protein id: At1g29080.1
  misc_feature (1)..(310): Homolog of NCBI NO: 24285904 NR Description: cysteine proteinase precursor [Ipomoea batatas]
  misc_feature (1)..(310): Homolog of NCBI NO: 13491750 NR Description: cysteine protease [Ipomoea batatas]
  misc_feature (1)..(310): Homolog of NCBI NO: 535454 NR Description: cysteine proteinase
  misc_feature (1)..(309): Homolog of NCBI NO: 2118132 NR Description: cysteine proteinase (EC 3.4.22.-) - Douglas fir
MARFNRVYSDETEKRNRFNIFKKNLEFVQNFNMNNKITYKVDINEFSDLTDEEFRATHTGLVVPEAITRISTLSSGKNTVPFRYGNVSDNGESMDWRQEGAVTPVKYQGRCGGCWAFSAVAAVEGITKITKGELVSLSEQQLLDCDRDYNQGCRGGIMSKAFEYIIKNQGITTEDNYPYQESQQTCSSSTTLSSSFRAATISGYETVPMNNEEALLQAVSQQPVSVGIEGTGAAFRHYSGGVFNGECGTDLHHAVTIVGYGMSEEGTKYWVVKNSWGETWGENGYMRIKRDVDAPQGMCGLAILAFYPLA

SEQ ID NO: 89505 - protein, 278 aa, Arabidopsis thaliana
  peptide (1)..(278): Ceres Seq. ID no. 12719145
  misc_feature (58)..(277): Pfam Name: Papain family cysteine protease Pfam Description: Papain family cysteine protease
  misc_feature (1)..(278): Homolog of NCBI NO: 18401420 NR Description: cysteine proteinase; protein id: At2g27420.1, by cDNA: gi_17381153, supported by cDNA: gi_20465848 [Arabidopsis >gi|25289995|pir||F84672 probable cysteine proteinase cysteine
  misc_feature (1)..(278): Homolog of NCBI NO: 18408828 NR Description: cysteine protease; protein id: At3g49340.1
  misc_feature (1)..(278): Homolog of NCBI NO: 18403438 NR Description: cysteine proteinase; protein id: At2g34080.1
  misc_feature (1)..(278): Homolog of NCBI NO: 30690594 NR Description: cysteine proteinase [Arabidopsis thaliana]
  misc_feature (1)..(278): Homolog of NCBI NO: 25289991 NR Description: cysteine proteinase (EC 3.4.22.-) [similarity] - thaliana >gi|9502421|gb|AAF88120.1|AC021043_13 Putative cysteine
  misc_feature (1)..(278): Homolog of NCBI NO: 18396939 NR Description: cysteine protease; protein id: At1g29080.1
  misc_feature (1)..(278): Homolog of NCBI NO: 24285904 NR Description: cysteine proteinase precursor [Ipomoea batatas]
  misc_feature (1)..(278): Homolog of NCBI NO: 13491750 NR Description: cysteine protease [Ipomoea batatas]
  misc_feature (1)..(278): Homolog of NCBI NO: 535454 NR Description: cysteine proteinase
  misc_feature (1)..(277): Homolog of NCBI NO: 2118132 NR Description: cysteine proteinase (EC 3.4.22.-) - Douglas fir
MNNKITYKVDINEFSDLTDEEFRATHTGLVVPEAITRISTLSSGKNTVPFRYGNVSDNGESMDWRQEGAVTPVKYQGRCGGCWAFSAVAAVEGITKITKGELVSLSEQQLLDCDRDYNQGCRGGIMSKAFEYIIKNQGITTEDNYPYQESQQTCSSSTTLSSSFRAATISGYETVPMNNEEALLQAVSQQPVSVGIEGTGAAFRHYSGGVFNGECGTDLHHAVTIVGYGMSEEGTKYWVVKNSWGETWGENGYMRIKRDVDAPQGMCGLAILAFYPLA

SEQ ID NO: 89506 - DNA, 1683 bp, Arabidopsis thaliana
  misc_feature (1)..(1683): Ceres Seq. ID no. 12719182
  misc_feature: MA Experiment ID: 20000166 Result: Down-regulated in Transcription
  misc_feature: MA Experiment 20000166 PARAMETER Experiment Name: At_100uM_ABA_P Parameter: Age (day) Value: 14
  misc_feature: MA Experiment 20000166 PARAMETER Experiment Name: At_100uM_ABA_P Parameter: Organism Value: A. thaliana
  misc_feature: MA Experiment 20000166 PARAMETER Experiment Name: At_100uM_ABA_P Parameter: Plant Line Value: WS
  misc_feature: MA Experiment 20000166 PARAMETER Experiment Name: At_100uM_ABA_P Parameter: Timepoint (hr) Value: 1
  misc_feature: MA Experiment 20000166 PARAMETER Experiment Name: At_100uM_ABA_P Parameter: Tissue Value: Aerial
  misc_feature: MA Experiment 20000166 PARAMETER Experiment Name: At_100uM_ABA_P Parameter: Treatment Value: 100uM ABA vs. No Treatment
  misc_feature: MA Experiment ID: 20000169 Result: Down-regulated in Transcription
  misc_feature: MA Experiment 20000169 PARAMETER Experiment Name: At_100uM_ABA_P Parameter: Age (day) Value: 14
  misc_feature: MA Experiment 20000169 PARAMETER Experiment Name: At_100uM_ABA_P Parameter: Organism Value: A. thaliana
  misc_feature: MA Experiment 20000169 PARAMETER Experiment Name: At_100uM_ABA_P Parameter: Plant Line Value: WS
  misc_feature: MA Experiment 20000169 PARAMETER Experiment Name: At_100uM_ABA_P Parameter: Timepoint (hr) Value: 6
  misc_feature: MA Experiment 20000169 PARAMETER Experiment Name: At_100uM_ABA_P Parameter: Tissue Value: Aerial
  misc_feature: MA Experiment 20000169 PARAMETER Experiment Name: At_100uM_ABA_P Parameter: Treatment Value: 100uM ABA vs. No Treatment
  misc_feature: MA Experiment ID: 20000179 Result: Up-regulated in Transcription
  misc_feature: MA Experiment 20000179 PARAMETER Experiment Name: At_Germinating_Seeds_P Parameter: Age (hr) Value: 6 vs. 0
  misc_feature: MA Experiment 20000179 PARAMETER Experiment Name: At_Germinating_Seeds_P Parameter: Tissue Value: Germinating Seeds
  misc_feature: MA Experiment ID: 20000180 Result: Up-regulated in Transcription
  misc_feature: MA Experiment 20000180 PARAMETER Experiment Name: At_Germinating_Seeds_P Parameter: Age (hr) Value: 24 vs. 0
  misc_feature: MA Experiment 20000180 PARAMETER Experiment Name: At_Germinating_Seeds_P Parameter: Tissue Value: Germinating Seeds
  misc_feature: MA Experiment ID: 20000182 Result: Up-regulated in Transcription
  misc_feature: MA Experiment 20000182 PARAMETER Experiment Name: At_2mM_SA_P Parameter: Age (day) Value: 14
  misc_feature: MA Experiment 20000182 PARAMETER Experiment Name: At_2mM_SA_P Parameter: Organism Value: A. thaliana
  misc_feature: MA Experiment 20000182 PARAMETER Experiment Name: At_2mM_SA_P Parameter: Plant Line Value: WS
  misc_feature: MA Experiment 20000182 PARAMETER Experiment Name: At_2mM_SA_P Parameter: Timepoint (hr) Value: 6
  misc_feature: MA Experiment 20000182 PARAMETER Experiment Name: At_2mM_SA_P Parameter: Tissue Value: Aerial
  misc_feature: MA Experiment 20000182 PARAMETER Experiment Name: At_2mM_SA_P Parameter: Treatment Value: 2mM SA vs. No Treatment
  misc_feature: MA Experiment ID: 20000184 Result: Down-regulated in Transcription
  misc_feature: MA Experiment 20000184 PARAMETER Experiment Name: At_Shoots__P Parameter: Age (day) Value: 7
  misc_feature: MA Experiment 20000184 PARAMETER Experiment Name: At_Shoots__P Parameter: Tissue Value: Shoots vs. Whole Plant
  misc_feature: MA Experiment ID: 20000185 Result: Down-regulated in Transcription
  misc_feature: MA Experiment 20000185 PARAMETER Experiment Name: At_Roots__P Parameter: Age (day) Value: 7 vs. 21
  misc_feature: MA Experiment 20000185 PARAMETER Experiment Name: At_Roots__P Parameter: Organism Value: A. thaliana
  misc_feature: MA Experiment 20000185 PARAMETER Experiment Name: At_Roots__P Parameter: Tissue Value: Roots vs. Whole Plant
  misc_feature: MA Experiment ID: 20000211 Result: Up-regulated in Transcription
  misc_feature: MA Experiment 20000211 PARAMETER Experiment Name: At_0.001percent_MeJA__P Parameter: Age (day) Value: 14
  misc_feature: MA Experiment 20000211 PARAMETER Experiment Name: At_0.001percent_MeJA__P Parameter: Organism Value: A. thaliana
  misc_feature: MA Experiment 20000211 PARAMETER Experiment Name: At_0.001percent_MeJA__P Parameter: Plant Line Value: WS
  misc_feature: MA Experiment 20000211 PARAMETER Experiment Name: At_0.001percent_MeJA__P Parameter: Timepoint (hr) Value: 1
  misc_feature: MA Experiment 20000211 PARAMETER Experiment Name: At_0.001percent_MeJA__P Parameter: Tissue Value: Aerial
  misc_feature: MA Experiment 20000211 PARAMETER Experiment Name: At_0.001percent_MeJA__P Parameter: Treatment Value: 0.001percent MeJA vs. No Treatment
  misc_feature: MA Experiment ID: 20000264 Result: Down-regulated in Transcription
  misc_feature: MA Experiment 20000264 PARAMETER Experiment Name: At_Open_Flower_P Parameter: Age (day) Value: 21
  misc_feature: MA Experiment 20000264 PARAMETER Experiment Name: At_Open_Flower_P Parameter: Plant Line Value: WS
  misc_feature: MA Experiment 20000264 PARAMETER Experiment Name: At_Open_Flower_P Parameter: Tissue Value: Open Flower vs. Whole Plant
  misc_feature: MA Experiment ID: 20000265 Result: Down-regulated in Transcription
  misc_feature: MA Experiment 20000265 PARAMETER Experiment Name: At_Open_Flower_P Parameter: Age (day) Value: 21
  misc_feature: MA Experiment 20000265 PARAMETER Experiment Name: At_Open_Flower_P Parameter: Plant Line Value: WS
  misc_feature: MA Experiment 20000265 PARAMETER Experiment Name: At_Open_Flower_P Parameter: Tissue Value: Closed Flower vs. Whole Plant
  misc_feature: MA Experiment ID: 20000267 Result: Up-regulated in Transcription
  misc_feature: MA Experiment 20000267 PARAMETER Experiment Name: At_Drought_P Parameter: Age (day) Value: 7
  misc_feature: MA Experiment 20000267 PARAMETER Experiment Name: At_Drought_P Parameter: Organism Value: A. thaliana
  misc_feature: MA Experiment 20000267 PARAMETER Experiment Name: At_Drought_P Parameter: Plant Line Value: WS
  misc_feature: MA Experiment 20000267 PARAMETER Experiment Name: At_Drought_P Parameter: Timepoint (hr) Value: 6
  misc_feature: MA Experiment 20000267 PARAMETER Experiment Name: At_Drought_P Parameter: Tissue Value: Whole Plant
  misc_feature: MA Experiment 20000267 PARAMETER Experiment Name: At_Drought_P Parameter: Treatment Value: Drought vs. No Drought
  misc_feature: MA Experiment ID: 20000286 Result: Down-regulated in Transcription
  misc_feature: MA Experiment 20000286 PARAMETER Experiment Name: At_Open_Flower_P Parameter: Age (day) Value: 21
  misc_feature: MA Experiment 20000286 PARAMETER Experiment Name: At_Open_Flower_P Parameter: Plant Line Value: WS
  misc_feature: MA Experiment 20000286 PARAMETER Experiment Name: At_Open_Flower_P Parameter: Tissue Value: Half Open vs. Whole Plant
  misc_feature: MA Experiment ID: 20000438 Result: Down-regulated in Transcription
  misc_feature: MA Experiment 20000438 PARAMETER Experiment Name: At_Shoots__P Parameter: Age (day) Value: 14
  misc_feature: MA Experiment 20000438 PARAMETER Experiment Name: At_Shoots__P Parameter: Tissue Value: Shoots vs. Whole Plant
  misc_feature: MA Experiment ID: 20000439 Result: Down-regulated in Transcription
  misc_feature: MA Experiment 20000439 PARAMETER Experiment Name: At_Roots__P Parameter: Age (day) Value: 14 vs. 21
  misc_feature: MA Experiment 20000439 PARAMETER Experiment Name: At_Roots__P Parameter: Organism Value: A. thaliana
  misc_feature: MA Experiment 20000439 PARAMETER Experiment Name: At_Roots__P Parameter: Tissue Value: Roots vs. Whole Plant
  misc_feature: MA Experiment ID: 20000451 Result: Up-regulated in Transcription
  misc_feature: MA Experiment 20000451 PARAMETER Experiment Name: At_CS6879_Shoots-Roots_P Parameter: Age (day) Value: 14
  misc_feature: MA Experiment 20000451 PARAMETER Experiment Name: At_CS6879_Shoots-Roots_P Parameter: Organism Value: A. thaliana
  misc_feature: MA Experiment 20000451 PARAMETER Experiment Name: At_CS6879_Shoots-Roots_P Parameter: Plant Line Value: CS6879 vs. WS
  misc_feature: MA Experiment 20000451 PARAMETER Experiment Name: At_CS6879_Shoots-Roots_P Parameter: Tissue Value: Roots
  misc_feature: MA Experiment ID: 20000460 Result: Up-regulated in Transcription
  misc_feature: MA Experiment 20000460 PARAMETER Experiment Name: At_10percent_PEG_P Parameter: Age (day) Value: 12
  misc_feature: MA Experiment 20000460 PARAMETER Experiment Name: At_10percent_PEG_P Parameter: Organism Value: A. thaliana
  misc_feature: MA Experiment 20000460 PARAMETER Experiment Name: At_10percent_PEG_P Parameter: Plant Line Value: WS
  misc_feature: MA Experiment 20000460 PARAMETER Experiment Name: At_10percent_PEG_P Parameter: Timepoint (day) Value: 12
  misc_feature: MA Experiment 20000460 PARAMETER Experiment Name: At_10percent_PEG_P Parameter: Tissue Value: Whole Plant
  misc_feature: MA Experiment 20000460 PARAMETER Experiment Name: At_10percent_PEG_P Parameter: Treatment Value: 10percent PEG vs. No Treatment
  misc_feature: MA Experiment ID: 20000495 Result: Down-regulated in Transcription
  misc_feature: MA Experiment 20000495 PARAMETER Experiment Name: At_Guard_Cells_P Parameter: Harvest Date Value: 8/2/2002
  misc_feature: MA Experiment 20000495 PARAMETER Experiment Name: At_Guard_Cells_P Parameter: Organism Value: A. thaliana
  misc_feature: MA Experiment 20000495 PARAMETER Experiment Name: At_Guard_Cells_P Parameter: Tissue Value: Guard Cells vs. Leaves
  misc_feature: MA Experiment ID: 20000496 Result: Down-regulated in Transcription
  misc_feature: MA Experiment 20000496 PARAMETER Experiment Name: At_Guard_Cells_P Parameter: Harvest Date Value: 7/19/2002
  misc_feature: MA Experiment 20000496 PARAMETER Experiment Name: At_Guard_Cells_P Parameter: Organism Value: Canola
  misc_feature: MA Experiment 20000496 PARAMETER Experiment Name: At_Guard_Cells_P Parameter: Tissue Value: Guard Cells vs. Leaves
  misc_feature: MA Experiment ID: 20000527 Result: Up-regulated in Transcription
  misc_feature: MA Experiment 20000527 PARAMETER Experiment Name: At_10percent_PEG_P Parameter: Age (day) Value: 20
  misc_feature: MA Experiment 20000527 PARAMETER Experiment Name: At_10percent_PEG_P Parameter: Organism Value: A. thaliana
  misc_feature: MA Experiment 20000527 PARAMETER Experiment Name: At_10percent_PEG_P Parameter: Plant Line Value: WS
  misc_feature: MA Experiment 20000527 PARAMETER Experiment Name: At_10percent_PEG_P Parameter: Timepoint (day) Value: 20
  misc_feature: MA Experiment 20000527 PARAMETER Experiment Name: At_10percent_PEG_P Parameter: Tissue Value: Whole Plant
  misc_feature: MA Experiment 20000527 PARAMETER Experiment Name: At_10percent_PEG_P Parameter: Treatment Value: 10percent PEG vs. No Treatment
  misc_feature: MA Experiment ID: 20000573 Result: Up-regulated in Transcription
  misc_feature: MA Experiment 20000573 PARAMETER Experiment Name: At_100uM_ABA_Mutants__P Parameter: Organism Value: A. thaliana
  misc_feature: MA Experiment 20000573 PARAMETER Experiment Name: At_100uM_ABA_Mutants__P Parameter: Plant Line Value: CS22 vs. Ler wt
  misc_feature: MA Experiment 20000573 PARAMETER Experiment Name: At_100uM_ABA_Mutants__P Parameter: Timepoint (hr) Value: N/A
  misc_feature: MA Experiment 20000573 PARAMETER Experiment Name: At_100uM_ABA_Mutants__P Parameter: Tissue Value: Whole Plant
  misc_feature: MA Experiment 20000573 PARAMETER Experiment Name: At_100uM_ABA_Mutants__P Parameter: Treatment Value: None
  misc_feature: MA Experiment ID: 20000574 Result: Up-regulated in Transcription
  misc_feature: MA Experiment 20000574 PARAMETER Experiment Name: At_100uM_ABA_Mutants__P Parameter: Organism Value: A. thaliana
  misc_feature: MA Experiment 20000574 PARAMETER Experiment Name: At_100uM_ABA_Mutants__P Parameter: Plant Line Value: CS23 vs. Ler wt
  misc_feature: MA Experiment 20000574 PARAMETER Experiment Name: At_100uM_ABA_Mutants__P Parameter: Timepoint (hr) Value: N/A
  misc_feature: MA Experiment 20000574 PARAMETER Experiment Name: At_100uM_ABA_Mutants__P Parameter: Tissue Value: Whole Plant
  misc_feature: MA Experiment 20000574 PARAMETER Experiment Name: At_100uM_ABA_Mutants__P Parameter: Treatment Value: None
  misc_feature: MA Experiment ID: 20000575 Result: Down-regulated in Transcription
  misc_feature: MA Experiment 20000575 PARAMETER Experiment Name: At_100uM_ABA_Mutants__P Parameter: Organism Value: A. thaliana
  misc_feature: MA Experiment 20000575 PARAMETER Experiment Name: At_100uM_ABA_Mutants__P Parameter: Plant Line Value: CS22
  misc_feature: MA Experiment 20000575 PARAMETER Experiment Name: At_100uM_ABA_Mutants__P Parameter: Timepoint (hr) Value: 6
  misc_feature: MA Experiment 20000575 PARAMETER Experiment Name: At_100uM_ABA_Mutants__P Parameter: Tissue Value: Whole Plant
  misc_feature: MA Experiment 20000575 PARAMETER Experiment Name: At_100uM_ABA_Mutants__P Parameter: Treatment Value: 1uM ABA vs. No Treatment
  misc_feature: MA Experiment ID: 20000794 Result: Down-regulated in Transcription
  misc_feature: MA Experiment 20000794 PARAMETER Experiment Name: At_Petals_P Parameter: Age (day) Value: 23-25 days
  misc_feature: MA Experiment 20000794 PARAMETER Experiment Name: At_Petals_P Parameter: Plant Line Value: WS
  misc_feature: MA Experiment 20000794 PARAMETER Experiment Name: At_Petals_P Parameter: Tissue Value: Petals vs. Whole plant
  misc_feature: MA Experiment ID: 20001247 Result: Up-regulated in Transcription
  misc_feature: MA Experiment 20001247 PARAMETER Experiment Name: At_Far-red-induction_P Parameter: Age (day) Value: 7
  misc_feature: MA Experiment 20001247 PARAMETER Experiment Name: At_Far-red-induction_P Parameter: Light Value: Far-red vs. White
  misc_feature: MA Experiment 20001247 PARAMETER Experiment Name: At_Far-red-induction_P Parameter: Organism Value: A. thaliana
  misc_feature: MA Experiment 20001247 PARAMETER Experiment Name: At_Far-red-induction_P Parameter: Plant Line Value: Columbia
  misc_feature: MA Experiment 20001247 PARAMETER Experiment Name: At_Far-red-induction_P Parameter: Timepoint (hr) Value: 1
  misc_feature: MA Experiment 20001247 PARAMETER Experiment Name: At_Far-red-induction_P Parameter: Tissue Value: Whole Plant
  misc_feature: MA Experiment ID: 20001450 Result: Down-regulated in Transcription
  misc_feature: MA Experiment 20001450 PARAMETER Experiment Name: At_Far-red-induction_P Parameter: Age (day) Value: 7
  misc_feature: MA Experiment 20001450 PARAMETER Experiment Name: At_Far-red-induction_P Parameter: Light Value: Far-red vs. White
  misc_feature: MA Experiment 20001450 PARAMETER Experiment Name: At_Far-red-induction_P Parameter: Organism Value: A. thaliana
  misc_feature: MA Experiment 20001450 PARAMETER Experiment Name: At_Far-red-induction_P Parameter: Plant Line Value: Columbia
  misc_feature: MA Experiment 20001450 PARAMETER Experiment Name: At_Far-red-induction_P Parameter: Timepoint (hr) Value: 8
  misc_feature: MA Experiment 20001450 PARAMETER Experiment Name: At_Far-red-induction_P Parameter: Tissue Value: Whole Plant
  misc_feature: MA Experiment ID: 20001557 Result: Up-regulated in Transcription
  misc_feature: MA Experiment 20001557 PARAMETER Experiment Name: At_Drought_Soil_Dry_P Parameter: Age (day) Value: 27
  misc_feature: MA Experiment 20001557 PARAMETER Experiment Name: At_Drought_Soil_Dry_P Parameter: Organism Value: A. thaliana
  misc_feature: MA Experiment 20001557 PARAMETER Experiment Name: At_Drought_Soil_Dry_P Parameter: Plant Line Value: WS
  misc_feature: MA Experiment 20001557 PARAMETER Experiment Name: At_Drought_Soil_Dry_P Parameter: Post Timepoint (hr) Value: 3
  misc_feature: MA Experiment 20001557 PARAMETER Experiment Name: At_Drought_Soil_Dry_P Parameter: Post-Treatment Value: Re-Water vs. No Drought
  misc_feature: MA Experiment 20001557 PARAMETER Experiment Name: At_Drought_Soil_Dry_P Parameter: Timepoint (day) Value: 13
  misc_feature: MA Experiment 20001557 PARAMETER Experiment Name: At_Drought_Soil_Dry_P Parameter: Treatment Value: Drought vs. No Drought
  misc_feature: MA Experiment ID: 20001770 Result: Up-regulated in Transcription
  misc_feature: MA Experiment 20001770 PARAMETER Experiment Name: At_Far-red-enriched-adult_P Parameter: Age (day) Value: 28
  misc_feature: MA Experiment 20001770 PARAMETER Experiment Name: At_Far-red-enriched-adult_P Parameter: Light Value: Far-red enriched vs. White
  misc_feature: MA Experiment 20001770 PARAMETER Experiment Name: At_Far-red-enriched-adult_P Parameter: Organism Value: A. thaliana
  misc_feature: MA Experiment 20001770 PARAMETER Experiment Name: At_Far-red-enriched-adult_P Parameter: Plant Line Value: Columbia
  misc_feature: MA Experiment 20001770 PARAMETER Experiment Name: At_Far-red-enriched-adult_P Parameter: Timepoint (hr) Value: 8
  misc_feature: MA Experiment 20001770 PARAMETER Experiment Name: At_Far-red-enriched-adult_P Parameter: Tissue Value: Aerial
  misc_feature: MA Experiment ID: 20001904 Result: Down-regulated in Transcription
  misc_feature: MA Experiment 20001904 PARAMETER Experiment Name: At_Drought_Reproduction_P Parameter: Age (day) Value: 37
  misc_feature: MA Experiment 20001904 PARAMETER Experiment Name: At_Drought_Reproduction_P Parameter: Organism Value: A. thaliana
  misc_feature: MA Experiment 20001904 PARAMETER Experiment Name: At_Drought_Reproduction_P Parameter: Plant Line Value: WS
  misc_feature: MA Experiment 20001904 PARAMETER Experiment Name: At_Drought_Reproduction_P Parameter: Timepoint (day) Value: 7
  misc_feature: MA Experiment 20001904 PARAMETER Experiment Name: At_Drought_Reproduction_P Parameter: Tissue Value: Rosettes
  misc_feature: MA Experiment 20001904 PARAMETER Experiment Name: At_Drought_Reproduction_P Parameter: Treatment Value: Drought vs. No Drought
aaactcatctctttcctctcaccttcctcatacatcatctctctttctctttgtctcctcatcaacaatgttactaatcatatcattcaccatcgtctccttcttcttcatcataatattctcactctttcacttactcttccttcaaaaactacgttactgcaactgcgagatctgtcatgcttatctcacttcaagctggaaaaaagacttcatcaatctcagtgattggtacactcatcttctccggcggtctccgacgtcaacgatcaaagtacacgtcttaaacagcgttatcacagcgaatccatcaaacgttgaacatatcctcaaaaccaatttccacaattacccaaaaggcaaacaattctctgttatcctcggtgatcttttaggccgtggaatcttcaattccgatggtgacacgtggcgtttccagagaaaactcgcgagtttggaacttggaagtgtttctgtaagagttttcgctcatgagattgttaagaccgagatcgagacacgtcttcttccgatattgacttcgttttccgacaatcctggttctgttttggatctacaagatgtgtttagaagattctcgtttgatacgattagtaaattgtcgtttgggtttgacccagattgtctccggttaccttttccgatatcggaattcgccgtcgctttcgatacggcgtcgttgttatcggcgaaacgagctttagctccgtttcctctgttatggaaaaccaaaaggcttttaagaattggttctgagaaaaagcttcaagaatctatcaatgtgataaaccggttagctggtgatttaatcaagcaacggaggttaaccggtttgatgggtaaaaatgatttgatttctagattcatggcggttgtggcggaggacgatgatgagtatctccgagacatcgttgtgagttttctattggctggtcgggatacggtagctgctggtttaaccggatttttctggttattgacccgtcatccggaagtggagaaccggatccgggaagaactggaccgggttatggggaccggttttgactcagtcactgctcgttgcgatgaaatgagagagatggattatttgcatgcgtcgctgtacgagagcatgagattgtttccgccggttcaattcgattccaaattcgctttaaacgatgacgttttgtctgatggtacatttgtgaatagtgggactagagtcacgtaccatgcttatgcaatgggtcggatggaccggatctggggcccggattacgaagagtttaaaccagagaggtggttggataacgaaggtaagttccggcccgagaatccggttaagtacccggttttccaggccggagctagggtttgtatcgggaaagagatggctatcatggagatgaaatccatagctgtggcaatcattaggaggttcgaaacacgggtcgcaagtcccgaaacaaccgagacactccggtttgcgcctggtttaactgcgacggttaacggtggattgccggttatgatccaagaaaggagttagactcataaaagcattaagtcaagatatataataatacttaatgaaaaccatagatagagtctttgttctctaactgaccaattattgttaacatgcaaacacacttgttgacaacaattatgtgtacc

SEQ ID NO: 89507 - protein, 517 aa, Arabidopsis thaliana
  peptide (1)..(517): Ceres Seq. ID no. 12719183
  misc_feature (23)..(517): Homolog of NCBI NO: 15226228 NR Description: cytochrome p450, putative; protein id: supported by cDNA: gi_13877668, supported by cDNA: gi_18087601 thaliana] >gi|25282628|pir||G84675 probable cytochrome P450
  misc_feature (28)..(516): Homolog of NCBI NO: 34908446 NR Description: putative cytochrome P450 [Oryza sativa (japonica group)] >gi|15290017|dbj|BAB63711.1| putative cytochrome P450
  misc_feature (23)..(517): Homolog of NCBI NO: 15228396 NR Description: cytochrome p450, putative; protein id: At3g48520.1
  misc_feature (24)..(516): Homolog of NCBI NO: 21536522 NR Description: cytochrome P450-like protein [Arabidopsis
  misc_feature (24)..(516): Homolog of NCBI NO: 26452145 NR Description: putative cytochrome P450 [Arabidopsis thaliana]
  misc_feature (24)..(516): Homolog of NCBI NO: 15242759 NR Description: cytochrome P450, putative; protein id: supported by cDNA: 101598. [Arabidopsis thaliana]
  misc_feature (77)..(516): Homolog of NCBI NO: 18000072 NR Description: cytochrome P450-dependent fatty acid hydroxylase
  misc_feature (16)..(516): Homolog of NCBI NO: 18000066 NR Description: cytochrome P450-dependent fatty acid hydroxylase
  misc_feature (77)..(516): Homolog of NCBI NO: 34909022 NR Description: cytochrome P450-like protein [Oryza sativa
  misc_feature (16)..(517): Homolog of NCBI NO: 18000070 NR Description: cytochrome P450-dependent fatty acid hydroxylase
NSSLSSHLPHTSSLFLFVSSSTMLLIISFTIVSFFFIIIFSLFHLLFLQKLRYCNCEICHAYLTSSWKKDFINLSDWYTHLLRRSPTSTIKVHVLNSVITANPSNVEHILKTNFHNYPKGKQFSVILGDLLGRGIFNSDGDTWRFQRKLASLELGSVSVRVFAHEIVKTEIETRLLPILTSFSDNPGSVLDLQDVFRRFSFDTISKLSFGFDPDCLRLPFPISEFAVAFDTASLLSAKRALAPFPLLWKTKRLLRIGSEKKLQESINVINRLAGDLIKQRRLTGLMGKNDLISRFMAVVAEDDDEYLRDIVVSFLLAGRDTVAAGLTGFFWLLTRHPEVENRIREELDRVMGTGFDSVTARCDEMREMDYLHASLYESMRLFPPVQFDSKFALNDDVLSDGTFVNSGTRVTYHAYAMGRMDRIWGPDYEEFKPERWLDNEGKFRPENPVKYPVFQAGARVCIGKEMAIMEMKSIAVAIIRRFETRVASPETTETLRFAPGLTATVNGGLPVMIQERS

SEQ ID NO: 89508 - protein, 495 aa, Arabidopsis thaliana
  peptide (1)..(495): Ceres Seq. ID no. 12719184
  misc_feature (1)..(495): Homolog of NCBI NO: 15226228 NR Description: cytochrome p450, putative; protein id: supported by cDNA: gi_13877668, supported by cDNA: gi_18087601 thaliana] >gi|25282628|pir||G84675 probable cytochrome P450
  misc_feature (6)..(494): Homolog of NCBI NO: 34908446 NR Description: putative cytochrome P450 [Oryza sativa (japonica group)] >gi|15290017|dbj|BAB63711.1| putative cytochrome P450
  misc_feature (1)..(495): Homolog of NCBI NO: 15228396 NR Description: cytochrome p450, putative; protein id: At3g48520.1
  misc_feature (2)..(494): Homolog of NCBI NO: 21536522 NR Description: cytochrome P450-like protein [Arabidopsis
  misc_feature (2)..(494): Homolog of NCBI NO: 26452145 NR Description: putative cytochrome P450 [Arabidopsis thaliana]
  misc_feature (2)..(494): Homolog of NCBI NO: 15242759 NR Description: cytochrome P450, putative; protein id: supported by cDNA: 101598. [Arabidopsis thaliana]
  misc_feature (55)..(494): Homolog of NCBI NO: 18000072 NR Description: cytochrome P450-dependent fatty acid hydroxylase
  misc_feature (1)..(494): Homolog of NCBI NO: 18000066 NR Description: cytochrome P450-dependent fatty acid hydroxylase
  misc_feature (55)..(494): Homolog of NCBI NO: 34909022 NR Description: cytochrome P450-like protein [Oryza sativa
  misc_feature (1)..(495): Homolog of NCBI NO: 18000070 NR Description: cytochrome P450-dependent fatty acid hydroxylase
MLLIISFTIVSFFFIIIFSLFHLLFLQKLRYCNCEICHAYLTSSWKKDFINLSDWYTHLLRRSPTSTIKVHVLNSVITANPSNVEHILKTNFHNYPKGKQFSVILGDLLGRGIFNSDGDTWRFQRKLASLELGSVSVRVFAHEIVKTEIETRLLPILTSFSDNPGSVLDLQDVFRRFSFDTISKLSFGFDPDCLRLPFPISEFAVAFDTASLLSAKRALAPFPLLWKTKRLLRIGSEKKLQESINVINRLAGDLIKQRRLTGLMGKNDLISRFMAVVAEDDDEYLRDIVVSFLLAGRDTVAAGLTGFFWLLTRHPEVENRIREELDRVMGTGFDSVTARCDEMREMDYLHASLYESMRLFPPVQFDSKFALNDDVLSDGTFVNSGTRVTYHAYAMGRMDRIWGPDYEEFKPERWLDNEGKFRPENPVKYPVFQAGARVCIGKEMAIMEMKSIAVAIIRRFETRVASPETTETLRFAPGLTATVNGGLPVMIQERS

SEQ ID NO: 89509 - DNA, 1371 bp, Arabidopsis thaliana
  misc_feature (1)..(1371): Ceres Seq. ID no. 12719239
  misc_feature: MA Experiment ID: 20000180 Result: Up-regulated in Transcription
  misc_feature: MA Experiment 20000180 PARAMETER Experiment Name: At_Germinating_Seeds_P Parameter: Age (hr) Value: 24 vs. 0
  misc_feature: MA Experiment 20000180 PARAMETER Experiment Name: At_Germinating_Seeds_P Parameter: Tissue Value: Germinating Seeds
atggctctctccatcctcttccttctcctcttcattctcttctctatttcgccgtcaaatgcacagtcgtttatcggagtaaactacggcttactatccgacaacctcccgccaccttctcaaacggccaaactcctccaatctacctccatccagaaagtgaggctatacaatgcggattcctccatcatcacatccttggttggaaccggtattggtattgttatcggagtagcaaatggcgatctcccgtctatcgcctcggatctcaacattgcctctcagtggataaattccaacgtacttcctttctatcctgcctccaacatcattctcatcaatgtcggcaacgaggtgttgttgtcaaatgatctgaatcttgtaaaccaacttctcccggctatgcaaaatgttcaaaaggctctcgaggcggtttcactaggtggaaaaatcaaggtgtctactgtccatgcaatgacagtactaggcaactccgaaccgccatcagctggttcgtttgctcctagttatcaggccggtttaaagggcattctacagtttcttagcgataccgggtcgccttttgccatcaacccgtacccgttctttgcatatcagagcgacccgagacccgaaacgctggcgttttgtcttttccagcctaaccctggacgggtagactcaaacactggaatcaagtacatgaacatgtttgatgctcaggttgatgcagtgcactcagctttgaaatcgataggattcgagaaagtggaagtgttggtggccgaaactggttggccatcaaccggtgacagcaacgaggtaggtccgagtgttgagaatgctaaagcttacaacggaaatctcattgctcacttaaggtccatggttgggactccgctcatgcccggaaaatccatcgacacttacattttcgctctctttgacgagaatctcaagcctggtccttcttttgagcaatcttttggccttttcaagcctgatctttccatggcctacgacattggactcactaaaactactagtagccagacgtcacaatctccacagttgggaaaagtaacatcaatgggatggtgtgtgccaaaggaggatgcaactcaagagcagttgcaagatagtctagattgggtttgtgggcagggaattgattgtggcccaataatgccaggaggagtttgtttcgagcctaacaatgtcgcctctcatacagcctatgccatgaatctttatttccaaaaatctcctgaaaaccctacggattgcgatttctctaaaaccgccaggatcacttctgagaaccctagtaagttattttcctcttcatctttcatatcctacttgttatag

SEQ ID NO: 89510 - protein, 456 aa, Arabidopsis thaliana
  peptide (1)..(456): Ceres Seq. ID no. 12719240
  misc_feature (25)..(344): Pfam Name: Glycosyl hydrolases family 17 Pfam Description: Glycosyl hydrolases family 17
  misc_feature (1)..(456): Homolog of NCBI NO: 15226720 NR Description: glycosyl hydrolase family 17; protein id:
  misc_feature (1)..(350): Homolog of NCBI NO: 30690053 NR Description: glycosyl hydrolase family 17 [Arabidopsis
  misc_feature (21)..(350): Homolog of NCBI NO: 7447982 NR Description: hypothetical protein T4L20.60 - Arabidopsis (fragment) >gi|3641838|emb|CAA18827.1| putative protein
  misc_feature (4)..(443): Homolog of NCBI NO: 14279169 NR Description: beta-1,3-glucanase-like protein [Olea europaea]
  misc_feature (5)..(443): Homolog of NCBI NO: 31126737 NR Description: putative beta 1,3-glucanase [Oryza sativa
  misc_feature (8)..(356): Homolog of NCBI NO: 22327528 NR Description: glycosyl hydrolase family 17; protein id:
  misc_feature (8)..(362): Homolog of NCBI NO: 10177275 NR Description: beta-1,3-glucanase-like protein [Arabidopsis
  misc_feature (4)..(368): Homolog of NCBI NO: 34902328 NR Description: Putative glycosyl hydrolase [Oryza sativa
  misc_feature (1)..(452): Homolog of NCBI NO: 9758115 NR Description: beta-1,3-glucanase-like protein [Arabidopsis
  misc_feature (3)..(451): Homolog of NCBI NO: 11071974 NR Description: elicitor inducible beta-1,3-glucanase Nt-SubE76
MALSILFLLLFILFSISPSNAQSFIGVNYGLLSDNLPPPSQTAKLLQSTSIQKVRLYNADSSIITSLVGTGIGIVIGVANGDLPSIASDLNIASQWINSNVLPFYPASNIILINVGNEVLLSNDLNLVNQLLPAMQNVQKALEAVSLGGKIKVSTVHAMTVLGNSEPPSAGSFAPSYQAGLKGILQFLSDTGSPFAINPYPFFAYQSDPRPETLAFCLFQPNPGRVDSNTGIKYMNMFDAQVDAVHSALKSIGFEKVEVLVAETGWPSTGDSNEVGPSVENAKAYNGNLIAHLRSMVGTPLMPGKSIDTYIFALFDENLKPGPSFEQSFGLFKPDLSMAYDIGLTKTTSSQTSQSPQLGKVTSMGWCVPKEDATQEQLQDSLDWVCGQGIDCGPIMPGGVCFEPNNVASHTAYAMNLYFQKSPENPTDCDFSKTARITSENPSKLFSSSSFISYLL

SEQ ID NO: 89511 - protein, 322 aa, Arabidopsis thaliana
  peptide (1)..(322): Ceres Seq. ID no. 12719241
  misc_feature (1)..(210): Pfam Name: Glycosyl hydrolases family 17 Pfam Description: Glycosyl hydrolases family 17
  misc_feature (1)..(322): Homolog of NCBI NO: 15226720 NR Description: glycosyl hydrolase family 17; protein id:
  misc_feature (1)..(216): Homolog of NCBI NO: 30690053 NR Description: glycosyl hydrolase family 17 [Arabidopsis
  misc_feature (1)..(216): Homolog of NCBI NO: 7447982 NR Description: hypothetical protein T4L20.60 - Arabidopsis (fragment) >gi|3641838|emb|CAA18827.1| putative protein
  misc_feature (1)..(309): Homolog of NCBI NO: 14279169 NR Description: beta-1,3-glucanase-like protein [Olea europaea]
  misc_feature (1)..(309): Homolog of NCBI NO: 31126737 NR Description: putative beta 1,3-glucanase [Oryza sativa
  misc_feature (1)..(222): Homolog of NCBI NO: 22327528 NR Description: glycosyl hydrolase family 17; protein id:
  misc_feature (1)..(228): Homolog of NCBI NO: 10177275 NR Description: beta-1,3-glucanase-like protein [Arabidopsis
  misc_feature (1)..(234): Homolog of NCBI NO: 34902328 NR Description: Putative glycosyl hydrolase [Oryza sativa
  misc_feature (1)..(318): Homolog of NCBI NO: 9758115 NR Description: beta-1,3-glucanase-like protein [Arabidopsis
  misc_feature (1)..(317): Homolog of NCBI NO: 11071974 NR Description: elicitor inducible beta-1,3-glucanase Nt-SubE76
MQNVQKALEAVSLGGKIKVSTVHAMTVLGNSEPPSAGSFAPSYQAGLKGILQFLSDTGSPFAINPYPFFAYQSDPRPETLAFCLFQPNPGRVDSNTGIKYMNMFDAQVDAVHSALKSIGFEKVEVLVAETGWPSTGDSNEVGPSVENAKAYNGNLIAHLRSMVGTPLMPGKSIDTYIFALFDENLKPGPSFEQSFGLFKPDLSMAYDIGLTKTTSSQTSQSPQLGKVTSMGWCVPKEDATQEQLQDSLDWVCGQGIDCGPIMPGGVCFEPNNVASHTAYAMNLYFQKSPENPTDCDFSKTARITSENPSKLFSSSSFISYLL

SEQ ID NO: 89512 - protein, 298 aa, Arabidopsis thaliana
  peptide (1)..(298): Ceres Seq. ID no. 12719242
  misc_feature (1)..(186): Pfam Name: Glycosyl hydrolases family 17 Pfam Description: Glycosyl hydrolases family 17
  misc_feature (1)..(298): Homolog of NCBI NO: 15226720 NR Description: glycosyl hydrolase family 17; protein id:
  misc_feature (1)..(192): Homolog of NCBI NO: 30690053 NR Description: glycosyl hydrolase family 17 [Arabidopsis
  misc_feature (1)..(192): Homolog of NCBI NO: 7447982 NR Description: hypothetical protein T4L20.60 - Arabidopsis (fragment) >gi|3641838|emb|CAA18827.1| putative protein
  misc_feature (1)..(285): Homolog of NCBI NO: 14279169 NR Description: beta-1,3-glucanase-like protein [Olea europaea]
  misc_feature (1)..(285): Homolog of NCBI NO: 31126737 NR Description: putative beta 1,3-glucanase [Oryza sativa
  misc_feature (1)..(198): Homolog of NCBI NO: 22327528 NR Description: glycosyl hydrolase family 17; protein id:
  misc_feature (1)..(204): Homolog of NCBI NO: 10177275 NR Description: beta-1,3-glucanase-like protein [Arabidopsis
  misc_feature (1)..(210): Homolog of NCBI NO: 34902328 NR Description: Putative glycosyl hydrolase [Oryza sativa
  misc_feature (1)..(294): Homolog of NCBI NO: 9758115 NR Description: beta-1,3-glucanase-like protein [Arabidopsis
  misc_feature (1)..(293): Homolog of NCBI NO: 11071974 NR Description: elicitor inducible beta-1,3-glucanase Nt-SubE76
MTVLGNSEPPSAGSFAPSYQAGLKGILQFLSDTGSPFAINPYPFFAYQSDPRPETLAFCLFQPNPGRVDSNTGIKYMNMFDAQVDAVHSALKSIGFEKVEVLVAETGWPSTGDSNEVGPSVENAKAYNGNLIAHLRSMVGTPLMPGKSIDTYIFALFDENLKPGPSFEQSFGLFKPDLSMAYDIGLTKTTSSQTSQSPQLGKVTSMGWCVPKEDATQEQLQDSLDWVCGQGIDCGPIMPGGVCFEPNNVASHTAYAMNLYFQKSPENPTDCDFSKTARITSENPSKLFSSSSFISYLL

SEQ ID NO: 89513 - DNA, 753 bp, Arabidopsis thaliana
  misc_feature (1)..(753): Ceres Seq. ID no. 12719336
  misc_feature: MA Experiment ID: 20000166 Result: Up-regulated in Transcription
  misc_feature: MA Experiment 20000166 PARAMETER Experiment Name: At_100uM_ABA_P Parameter: Age (day) Value: 14
  misc_feature: MA Experiment 20000166 PARAMETER Experiment Name: At_100uM_ABA_P Parameter: Organism Value: A. thaliana
  misc_feature: MA Experiment 20000166 PARAMETER Experiment Name: At_100uM_ABA_P Parameter: Plant Line Value: WS
  misc_feature: MA Experiment 20000166 PARAMETER Experiment Name: At_100uM_ABA_P Parameter: Timepoint (hr) Value: 1
  misc_feature: MA Experiment 20000166 PARAMETER Experiment Name: At_100uM_ABA_P Parameter: Tissue Value: Aerial
  misc_feature: MA Experiment 20000166 PARAMETER Experiment Name: At_100uM_ABA_P Parameter: Treatment Value: 100uM ABA vs. No Treatment
  misc_feature: MA Experiment ID: 20000173 Result: Down-regulated in Transcription
  misc_feature: MA Experiment 20000173 PARAMETER Experiment Name: At_42deg_Heat_P Parameter: Age (day) Value: 14
  misc_feature: MA Experiment 20000173 PARAMETER Experiment Name: At_42deg_Heat_P Parameter: Organism Value: A. thaliana
  misc_feature: MA Experiment 20000173 PARAMETER Experiment Name: At_42deg_Heat_P Parameter: Plant Line Value: WS
  misc_feature: MA Experiment 20000173 PARAMETER Experiment Name: At_42deg_Heat_P Parameter: Temperature (deg C) Value: 42 vs. 22
  misc_feature: MA Experiment 20000173 PARAMETER Experiment Name: At_42deg_Heat_P Parameter: Timepoint (hr) Value: 6
  misc_feature: MA Experiment 20000173 PARAMETER Experiment Name: At_42deg_Heat_P Parameter: Tissue Value: Aerial
  misc_feature: MA Experiment ID: 20000184 Result: Down-regulated in Transcription
  misc_feature: MA Experiment 20000184 PARAMETER Experiment Name: At_Shoots__P Parameter: Age (day) Value: 7
  misc_feature: MA Experiment 20000184 PARAMETER Experiment Name: At_Shoots__P Parameter: Tissue Value: Shoots vs. Whole Plant
  misc_feature: MA Experiment ID: 20000185 Result: Down-regulated in Transcription
  misc_feature: MA Experiment 20000185 PARAMETER Experiment Name: At_Roots__P Parameter: Age (day) Value: 7 vs. 21
  misc_feature: MA Experiment 20000185 PARAMETER Experiment Name: At_Roots__P Parameter: Organism Value: A. thaliana
  misc_feature: MA Experiment 20000185 PARAMETER Experiment Name: At_Roots__P Parameter: Tissue Value: Roots vs. Whole Plant
  misc_feature: MA Experiment ID: 20000234 Result: Down-regulated in Transcription
  misc_feature: MA Experiment 20000234 PARAMETER Experiment Name: At_Siliques_P Parameter: Age (day) Value: 21
  misc_feature: MA Experiment 20000234 PARAMETER Experiment Name: At_Siliques_P Parameter: Organism Value: A. thaliana
  misc_feature: MA Experiment 20000234 PARAMETER Experiment Name: At_Siliques_P Parameter: Plant Line Value: WS
  misc_feature: MA Experiment 20000234 PARAMETER Experiment Name: At_Siliques_P Parameter: Tissue Value: Less Than 5mm Siliques vs. Whole Plant
  misc_feature: MA Experiment ID: 20000235 Result: Down-regulated in Transcription
  misc_feature: MA Experiment 20000235 PARAMETER Experiment Name: At_Siliques_P Parameter: Age (day) Value: 21
  misc_feature: MA Experiment 20000235 PARAMETER Experiment Name: At_Siliques_P Parameter: Organism Value: A. thaliana
  misc_feature: MA Experiment 20000235 PARAMETER Experiment Name: At_Siliques_P Parameter: Plant Line Value: WS
  misc_feature: MA Experiment 20000235 PARAMETER Experiment Name: At_Siliques_P Parameter: Tissue Value: 5-10mm Siliques vs. Whole Plant
  misc_feature: MA Experiment ID: 20000264 Result: Down-regulated in Transcription
  misc_feature: MA Experiment 20000264 PARAMETER Experiment Name: At_Open_Flower_P Parameter: Age (day) Value: 21
  misc_feature: MA Experiment 20000264 PARAMETER Experiment Name: At_Open_Flower_P Parameter: Plant Line Value: WS
  misc_feature: MA Experiment 20000264 PARAMETER Experiment Name: At_Open_Flower_P Parameter: Tissue Value: Open Flower vs. Whole Plant
  misc_feature: MA Experiment ID: 20000265 Result: Down-regulated in Transcription
  misc_feature: MA Experiment 20000265 PARAMETER Experiment Name: At_Open_Flower_P Parameter: Age (day) Value: 21
  misc_feature: MA Experiment 20000265 PARAMETER Experiment Name: At_Open_Flower_P Parameter: Plant Line Value: WS
  misc_feature: MA Experiment 20000265 PARAMETER Experiment Name: At_Open_Flower_P Parameter: Tissue Value: Closed Flower vs. Whole Plant
  misc_feature: MA Experiment ID: 20000267 Result: Up-regulated in Transcription
  misc_feature: MA Experiment 20000267 PARAMETER Experiment Name: At_Drought_P Parameter: Age (day) Value: 7
  misc_feature: MA Experiment 20000267 PARAMETER Experiment Name: At_Drought_P Parameter: Organism Value: A. thaliana
  misc_feature: MA Experiment 20000267 PARAMETER Experiment Name: At_Drought_P Parameter: Plant Line Value: WS
  misc_feature: MA Experiment 20000267 PARAMETER Experiment Name: At_Drought_P Parameter: Timepoint (hr) Value: 6
  misc_feature: MA Experiment 20000267 PARAMETER Experiment Name: At_Drought_P Parameter: Tissue Value: Whole Plant
  misc_feature: MA Experiment 20000267 PARAMETER Experiment Name: At_Drought_P Parameter: Treatment Value: Drought vs. No Drought
  misc_feature: MA Experiment ID: 20000286 Result: Down-regulated in Transcription
  misc_feature: MA Experiment 20000286 PARAMETER Experiment Name: At_Open_Flower_P Parameter: Age (day) Value: 21
  misc_feature: MA Experiment 20000286 PARAMETER Experiment Name: At_Open_Flower_P Parameter: Plant Line Value: WS
  misc_feature: MA Experiment 20000286 PARAMETER Experiment Name: At_Open_Flower_P Parameter: Tissue Value: Half Open vs. Whole Plant
  misc_feature: MA Experiment ID: 20000438 Result: Down-regulated in Transcription
  misc_feature: MA Experiment 20000438 PARAMETER Experiment Name: At_Shoots__P Parameter: Age (day) Value: 14
  misc_feature: MA Experiment 20000438 PARAMETER Experiment Name: At_Shoots__P Parameter: Tissue Value: Shoots vs. Whole Plant
  misc_feature: MA Experiment ID: 20000439 Result: Down-regulated in Transcription
  misc_feature: MA Experiment 20000439 PARAMETER Experiment Name: At_Roots__P Parameter: Age (day) Value: 14 vs. 21
  misc_feature: MA Experiment 20000439 PARAMETER Experiment Name: At_Roots__P Parameter: Organism Value: A. thaliana
  misc_feature: MA Experiment 20000439 PARAMETER Experiment Name: At_Roots__P Parameter: Tissue Value: Roots vs. Whole Plant
  misc_feature: MA Experiment ID: 20000445 Result: Up-regulated in Transcription
  misc_feature: MA Experiment 20000445 PARAMETER Experiment Name: At_100uM_NAA__P Parameter: Age (day) Value: 14
  misc_feature: MA Experiment 20000445 PARAMETER Experiment Name: At_100uM_NAA__P Parameter: Organism Value: A. thaliana
  misc_feature: MA Experiment 20000445 PARAMETER Experiment Name: At_100uM_NAA__P Parameter: Plant Line Value: WS
  misc_feature: MA Experiment 20000445 PARAMETER Experiment Name: At_100uM_NAA__P Parameter: Timepoint (hr) Value: 6
  misc_feature: MA Experiment 20000445 PARAMETER Experiment Name: At_100uM_NAA__P Parameter: Tissue Value: Aerial
  misc_feature: MA Experiment 20000445 PARAMETER Experiment Name: At_100uM_NAA__P Parameter: Treatment Value: 100uM NAA vs. No Treatment
  misc_feature: MA Experiment ID: 20000460 Result: Up-regulated in Transcription
  misc_feature: MA Experiment 20000460 PARAMETER Experiment Name: At_10percent_PEG_P Parameter: Age (day) Value: 12
  misc_feature: MA Experiment 20000460 PARAMETER Experiment Name: At_10percent_PEG_P Parameter: Organism Value: A. thaliana
  misc_feature: MA Experiment 20000460 PARAMETER Experiment Name: At_10percent_PEG_P Parameter: Plant Line Value: WS
  misc_feature: MA Experiment 20000460 PARAMETER Experiment Name: At_10percent_PEG_P Parameter: Timepoint (day) Value: 12
  misc_feature: MA Experiment 20000460 PARAMETER Experiment Name: At_10percent_PEG_P Parameter: Tissue Value: Whole Plant
  misc_feature: MA Experiment 20000460 PARAMETER Experiment Name: At_10percent_PEG_P Parameter: Treatment Value: 10percent PEG vs. No Treatment
  misc_feature: MA Experiment ID: 20000573 Result: Down-regulated in Transcription
  misc_feature: MA Experiment 20000573 PARAMETER Experiment Name: At_100uM_ABA_Mutants__P Parameter: Organism Value: A. thaliana
  misc_feature: MA Experiment 20000573 PARAMETER Experiment Name: At_100uM_ABA_Mutants__P Parameter: Plant Line Value: CS22 vs. Ler wt
  misc_feature: MA Experiment 20000573 PARAMETER Experiment Name: At_100uM_ABA_Mutants__P Parameter: Timepoint (hr) Value: N/A
  misc_feature: MA Experiment 20000573 PARAMETER Experiment Name: At_100uM_ABA_Mutants__P Parameter: Tissue Value: Whole Plant
  misc_feature: MA Experiment 20000573 PARAMETER Experiment Name: At_100uM_ABA_Mutants__P Parameter: Treatment Value: None
  misc_feature: MA Experiment ID: 20000574 Result: Down-regulated in Transcription
  misc_feature: MA Experiment 20000574 PARAMETER Experiment Name: At_100uM_ABA_Mutants__P Parameter: Organism Value: A. thaliana
  misc_feature: MA Experiment 20000574 PARAMETER Experiment Name: At_100uM_ABA_Mutants__P Parameter: Plant Line Value: CS23 vs. Ler wt
  misc_feature: MA Experiment 20000574 PARAMETER Experiment Name: At_100uM_ABA_Mutants__P Parameter: Timepoint (hr) Value: N/A
  misc_feature: MA Experiment 20000574 PARAMETER Experiment Name: At_100uM_ABA_Mutants__P Parameter: Tissue Value: Whole Plant
  misc_feature: MA Experiment 20000574 PARAMETER Experiment Name: At_100uM_ABA_Mutants__P Parameter: Treatment Value: None
  misc_feature: MA Experiment ID: 20000709 Result: Down-regulated in Transcription
  misc_feature: MA Experiment 20000709 PARAMETER Experiment Name: At_15mM_NH4NO3_L-to-H_P Parameter: Age (hr) Value: 14
  misc_feature: MA Experiment 20000709 PARAMETER Experiment Name: At_15mM_NH4NO3_L-to-H_P Parameter: Organism Value: A. thaliana
  misc_feature: MA Experiment 20000709 PARAMETER Experiment Name: At_15mM_NH4NO3_L-to-H_P Parameter: Plant Line Value: WS
  misc_feature: MA Experiment 20000709 PARAMETER Experiment Name: At_15mM_NH4NO3_L-to-H_P Parameter: Timepoint (hr) Value: 4
  misc_feature: MA Experiment 20000709 PARAMETER Experiment Name: At_15mM_NH4NO3_L-to-H_P Parameter: Tissue Value: Aerial
  misc_feature: MA Experiment 20000709 PARAMETER Experiment Name: At_15mM_NH4NO3_L-to-H_P Parameter: Treatment Value: 15mM NH4NO3 vs. 30mM Mannitol
  misc_feature: MA Experiment ID: 20000794 Result: Down-regulated in Transcription
  misc_feature: MA Experiment 20000794 PARAMETER Experiment Name: At_Petals_P Parameter: Age (day) Value: 23-25 days
  misc_feature: MA Experiment 20000794 PARAMETER Experiment Name: At_Petals_P Parameter: Plant Line Value: WS
  misc_feature: MA Experiment 20000794 PARAMETER Experiment Name: At_Petals_P Parameter: Tissue Value: Petals vs. Whole plant
  misc_feature: MA Experiment ID: 20001451 Result: Down-regulated in Transcription
  misc_feature: MA Experiment 20001451 PARAMETER Experiment Name: At_Far-red-induction_P Parameter: Age (day) Value: 7
  misc_feature: MA Experiment 20001451 PARAMETER Experiment Name: At_Far-red-induction_P Parameter: Light Value: Far-red vs. White
  misc_feature: MA Experiment 20001451 PARAMETER Experiment Name: At_Far-red-induction_P Parameter: Organism Value: A. thaliana
  misc_feature: MA Experiment 20001451 PARAMETER Experiment Name: At_Far-red-induction_P Parameter: Plant Line Value: Columbia
  misc_feature: MA Experiment 20001451 PARAMETER Experiment Name: At_Far-red-induction_P Parameter: Timepoint (hr) Value: 24
  misc_feature: MA Experiment 20001451 PARAMETER Experiment Name: At_Far-red-induction_P Parameter: Tissue Value: Whole Plant
  misc_feature: MA Experiment ID: 20001556 Result: Down-regulated in Transcription
  misc_feature: MA Experiment 20001556 PARAMETER Experiment Name: At_Drought_Soil_Dry_P Parameter: Age (day) Value: 26
  misc_feature: MA Experiment 20001556 PARAMETER Experiment Name: At_Drought_Soil_Dry_P Parameter: Organism Value: A. thaliana
  misc_feature: MA Experiment 20001556 PARAMETER Experiment Name: At_Drought_Soil_Dry_P Parameter: Plant Line Value: WS
  misc_feature: MA Experiment 20001556 PARAMETER Experiment Name: At_Drought_Soil_Dry_P Parameter: Post Timepoint (hr) Value: None
  misc_feature: MA Experiment 20001556 PARAMETER Experiment Name: At_Drought_Soil_Dry_P Parameter: Post-Treatment Value: None
  misc_feature: MA Experiment 20001556 PARAMETER Experiment Name: At_Drought_Soil_Dry_P Parameter: Timepoint (day) Value: 12
  misc_feature: MA Experiment 20001556 PARAMETER Experiment Name: At_Drought_Soil_Dry_P Parameter: Treatment Value: Drought vs. No Drought
  misc_feature: MA Experiment ID: 20001557 Result: Down-regulated in Transcription
  misc_feature: MA Experiment 20001557 PARAMETER Experiment Name: At_Drought_Soil_Dry_P Parameter: Age (day) Value: 27
  misc_feature: MA Experiment 20001557 PARAMETER Experiment Name: At_Drought_Soil_Dry_P Parameter: Organism Value: A. thaliana
  misc_feature: MA Experiment 20001557 PARAMETER Experiment Name: At_Drought_Soil_Dry_P Parameter: Plant Line Value: WS
  misc_feature: MA Experiment 20001557 PARAMETER Experiment Name: At_Drought_Soil_Dry_P Parameter: Post Timepoint (hr) Value: 3
  misc_feature: MA Experiment 20001557 PARAMETER Experiment Name: At_Drought_Soil_Dry_P Parameter: Post-Treatment Value: Re-Water vs. No Drought
  misc_feature: MA Experiment 20001557 PARAMETER Experiment Name: At_Drought_Soil_Dry_P Parameter: Timepoint (day) Value: 13
  misc_feature: MA Experiment 20001557 PARAMETER Experiment Name: At_Drought_Soil_Dry_P Parameter: Treatment Value: Drought vs. No Drought
  misc_feature: MA Experiment ID: 20001558 Result: Down-regulated in Transcription
  misc_feature: MA Experiment 20001558 PARAMETER Experiment Name: At_Drought_Soil_Dry_P Parameter: Age (day) Value: 27
  misc_feature: MA Experiment 20001558 PARAMETER Experiment Name: At_Drought_Soil_Dry_P Parameter: Organism Value: A. thaliana
  misc_feature: MA Experiment 20001558 PARAMETER Experiment Name: At_Drought_Soil_Dry_P Parameter: Plant Line Value: WS
  misc_feature: MA Experiment 20001558 PARAMETER Experiment Name: At_Drought_Soil_Dry_P Parameter: Post Timepoint (hr) Value: 6
  misc_feature: MA Experiment 20001558 PARAMETER Experiment Name: At_Drought_Soil_Dry_P Parameter: Post-Treatment Value: Re-Water vs. No Drought
  misc_feature: MA Experiment 20001558 PARAMETER Experiment Name: At_Drought_Soil_Dry_P Parameter: Timepoint (day) Value: 13
  misc_feature: MA Experiment 20001558 PARAMETER Experiment Name: At_Drought_Soil_Dry_P Parameter: Treatment Value: Drought vs. No Drought
  misc_feature: MA Experiment ID: 20001559 Result: Down-regulated in Transcription
  misc_feature: MA Experiment 20001559 PARAMETER Experiment Name: At_Drought_Soil_Dry_P Parameter: Age (day) Value: 28
  misc_feature: MA Experiment 20001559 PARAMETER Experiment Name: At_Drought_Soil_Dry_P Parameter: Organism Value: A. thaliana
  misc_feature: MA Experiment 20001559 PARAMETER Experiment Name: At_Drought_Soil_Dry_P Parameter: Plant Line Value: WS
  misc_feature: MA Experiment 20001559 PARAMETER Experiment Name: At_Drought_Soil_Dry_P Parameter: Post Timepoint (hr) Value: 29
  misc_feature: MA Experiment 20001559 PARAMETER Experiment Name: At_Drought_Soil_Dry_P Parameter: Post-Treatment Value: Re-Water vs. No Drought
  misc_feature: MA Experiment 20001559 PARAMETER Experiment Name: At_Drought_Soil_Dry_P Parameter: Timepoint (day) Value: 14
  misc_feature: MA Experiment 20001559 PARAMETER Experiment Name: At_Drought_Soil_Dry_P Parameter: Treatment Value: Drought vs. No Drought
  misc_feature: MA Experiment ID: 20001560 Result: Down-regulated in Transcription
  misc_feature: MA Experiment 20001560 PARAMETER Experiment Name: At_Drought_Soil_Dry_P Parameter: Age (day) Value: 28
  misc_feature: MA Experiment 20001560 PARAMETER Experiment Name: At_Drought_Soil_Dry_P Parameter: Organism Value: A. thaliana
  misc_feature: MA Experiment 20001560 PARAMETER Experiment Name: At_Drought_Soil_Dry_P Parameter: Plant Line Value: WS
  misc_feature: MA Experiment 20001560 PARAMETER Experiment Name: At_Drought_Soil_Dry_P Parameter: Post Timepoint (hr) Value: None
  misc_feature: MA Experiment 20001560 PARAMETER Experiment Name: At_Drought_Soil_Dry_P Parameter: Post-Treatment Value: None
  misc_feature: MA Experiment 20001560 PARAMETER Experiment Name: At_Drought_Soil_Dry_P Parameter: Timepoint (day) Value: 14
  misc_feature: MA Experiment 20001560 PARAMETER Experiment Name: At_Drought_Soil_Dry_P Parameter: Treatment Value: Drought vs. No Drought
  misc_feature: MA Experiment ID: 20001755 Result: Up-regulated in Transcription
  misc_feature: MA Experiment 20001755 PARAMETER Experiment Name: At_50mM_NH4NO3_L-to-H_P Parameter: Timepoint (hr) Value: 2
  misc_feature: MA Experiment 20001755 PARAMETER Experiment Name: At_50mM_NH4NO3_L-to-H_P Parameter: Tissue Value: Leaf
  misc_feature: MA Experiment 20001755 PARAMETER Experiment Name: At_50mM_NH4NO3_L-to-H_P Parameter: Treatment Value: 50mM NH4NO3 vs 100mM Mannitol
  misc_feature: MA Experiment ID: 20001904 Result: Down-regulated in Transcription
  misc_feature: MA Experiment 20001904 PARAMETER Experiment Name: At_Drought_Reproduction_P Parameter: Age (day) Value: 37
  misc_feature: MA Experiment 20001904 PARAMETER Experiment Name: At_Drought_Reproduction_P Parameter: Organism Value: A. thaliana
  misc_feature: MA Experiment 20001904 PARAMETER Experiment Name: At_Drought_Reproduction_P Parameter: Plant Line Value: WS
  misc_feature: MA Experiment 20001904 PARAMETER Experiment Name: At_Drought_Reproduction_P Parameter: Timepoint (day) Value: 7
  misc_feature: MA Experiment 20001904 PARAMETER Experiment Name: At_Drought_Reproduction_P Parameter: Tissue Value: Rosettes
  misc_feature: MA Experiment 20001904 PARAMETER Experiment Name: At_Drought_Reproduction_P Parameter: Treatment Value: Drought vs. No Drought
  misc_feature: MA Experiment ID: 20001905 Result: Down-regulated in Transcription
  misc_feature: MA Experiment 20001905 PARAMETER Experiment Name: At_Drought_Reproduction_P Parameter: Age (day) Value: 40
  misc_feature: MA Experiment 20001905 PARAMETER Experiment Name: At_Drought_Reproduction_P Parameter: Organism Value: A. thaliana
  misc_feature: MA Experiment 20001905 PARAMETER Experiment Name: At_Drought_Reproduction_P Parameter: Plant Line Value: WS
  misc_feature: MA Experiment 20001905 PARAMETER Experiment Name: At_Drought_Reproduction_P Parameter: Timepoint (day) Value: 10
  misc_feature: MA Experiment 20001905 PARAMETER Experiment Name: At_Drought_Reproduction_P Parameter: Tissue Value: Rosettes
  misc_feature: MA Experiment 20001905 PARAMETER Experiment Name: At_Drought_Reproduction_P Parameter: Treatment Value: Drought vs. No Drought
atggtttacggtaagagatcgagtgtcgaagtcattggtttccttaacatataccgtcatgatccatgggacttacctggtttatcgagaatcggggagagggaatggtacttctttgtaccaagggaaaggaagcatgggaacggtgggaggccaagcaggacaactgaaaaaggatattggaaagcaactggatccgatcgtaaaatcataagcttgtctgagccaaaacgtgttatagggctcaagaagacgcttgtgttctatagaggaagagcaccaggaggaagcaagactgattgggtgatgaacgagtttcggatgcccgataattgctccttaccaaaggatgttgtgctttgtaagatatatagaaaagctacttcattgaaagtattggagcaaagggcagagatggaagctaagatgaatcaaacatgtcctaactctcctctttcgtcttccgagacgatttctttcgttggtaaagaagaaaacatgatgacttcgttccgtgctcctcaagtaatagctatggaagaagcaaacaagatccaaatgcatcaagaaaacgcgaaaaccgaagagaaacaaagagaagcagagaccaaagaaccttcttcatcactgaagctaccgtttggaagtttaccagagctacaattaccaaaaccaggagtagaatgggaccagttgttgagtataagcccatggctccagaatcttacaccaatagttaacatatattggtag

SEQ ID NO: 89514 - protein, 250 aa, Arabidopsis thaliana
  peptide (1)..(250): Ceres Seq. ID no. 12719337
  misc_feature (2)..(109): Pfam Name: No apical meristem (NAM) protein Pfam Description: No apical meristem (NAM) protein
  misc_feature (1)..(250): Homolog of NCBI NO: 18398293 NR Description: NAM (no apical meristem)-like protein; protein At2g17040.1, supported by cDNA: gi_13605646, supported by cDNA: [Arabidopsis thaliana] >gi|13605647|gb|AAK32817.1|AF361804_1
  misc_feature (1)..(250): Homolog of NCBI NO: 25411775 NR Description: NAM (no apical meristem)-like protein [imported]
  misc_feature (2)..(126): Homolog of NCBI NO: 30678000 NR Description: No apical meristem (NAM) protein family thaliana] >gi|24030186|gb|AAN41274.1| putative NAM (no apical
  misc_feature (2)..(126): Homolog of NCBI NO: 30678002 NR Description: No apical meristem (NAM) protein family
  misc_feature (2)..(109): Homolog of NCBI NO: 25410986 NR Description: NAM (no apical meristem)-like protein [imported]
  misc_feature (8)..(225): Homolog of NCBI NO: 15223376 NR Description: putative NAM protein; protein id: At1g26870.1
  misc_feature (8)..(225): Homolog of NCBI NO: 25518578 NR Description: hypothetical protein T2P11.6 - Arabidopsis
  misc_feature (17)..(126): Homolog of NCBI NO: 21450867 NR Description: putative NAM protein [Arabidopsis thaliana]
  misc_feature (2)..(170): Homolog of NCBI NO: 15218843 NR Description: jasmonic acid, putative; protein id: At1g65910.1
  misc_feature (2)..(157): Homolog of NCBI NO: 18416983 NR Description: putative protein; protein id: At4g27410.2, by cDNA: 38344., supported by cDNA: gi_15982728, supported by gi_16226942, supported by cDNA: gi_20259262 [Arabidopsis
MVYGKRSSVEVIGFLNIYRHDPWDLPGLSRIGEREWYFFVPRERKHGNGGRPSRTTEKGYWKATGSDRKIISLSEPKRVIGLKKTLVFYRGRAPGGSKTDWVMNEFRMPDNCSLPKDVVLCKIYRKATSLKVLEQRAEMEAKMNQTCPNSPLSSSETISFVGKEENMMTSFRAPQVIAMEEANKIQMHQENAKTEEKQREAETKEPSSSLKLPFGSLPELQLPKPGVEWDQLLSISPWLQNLTPIVNIYW

SEQ ID NO: 89515 - protein, 148 aa, Arabidopsis thaliana
  peptide (1)..(148): Ceres Seq. ID no. 12719338
  misc_feature (1)..(148): Homolog of NCBI NO: 18398293 NR Description: NAM (no apical meristem)-like protein; protein At2g17040.1, supported by cDNA: gi_13605646, supported by cDNA: [Arabidopsis thaliana] >gi|13605647|gb|AAK32817.1|AF361804_1
  misc_feature (1)..(148): Homolog of NCBI NO: 25411775 NR Description: NAM (no apical meristem)-like protein [imported]
  misc_feature (1)..(24): Homolog of NCBI NO: 30678000 NR Description: No apical meristem (NAM) protein family thaliana] >gi|24030186|gb|AAN41274.1| putative NAM (no apical
  misc_feature (1)..(24): Homolog of NCBI NO: 30678002 NR Description: No apical meristem (NAM) protein family
  misc_feature (1)..(123): Homolog of NCBI NO: 15223376 NR Description: putative NAM protein; protein id: At1g26870.1
  misc_feature (1)..(123): Homolog of NCBI NO: 25518578 NR Description: hypothetical protein T2P11.6 - Arabidopsis
  misc_feature (1)..(24): Homolog of NCBI NO: 21450867 NR Description: putative NAM protein [Arabidopsis thaliana]
  misc_feature (1)..(68): Homolog of NCBI NO: 15218843 NR Description: jasmonic acid, putative; protein id: At1g65910.1
  misc_feature (1)..(55): Homolog of NCBI NO: 18416983 NR Description: putative protein; protein id: At4g27410.2, by cDNA: 38344., supported by cDNA: gi_15982728, supported by gi_16226942, supported by cDNA: gi_20259262 [Arabidopsis
  misc_feature (1)..(55): Homolog of NCBI NO: 23397295 NR Description: unknown protein [Arabidopsis thaliana]
MNEFRMPDNCSLPKDVVLCKIYRKATSLKVLEQRAEMEAKMNQTCPNSPLSSSETISFVGKEENMMTSFRAPQVIAMEEANKIQMHQENAKTEEKQREAETKEPSSSLKLPFGSLPELQLPKPGVEWDQLLSISPWLQNLTPIVNIYW

SEQ ID NO: 89516 - protein, 143 aa, Arabidopsis thaliana
  peptide (1)..(143): Ceres Seq. ID no. 12719339
  misc_feature (1)..(143): Homolog of NCBI NO: 18398293 NR Description: NAM (no apical meristem)-like protein; protein At2g17040.1, supported by cDNA: gi_13605646, supported by cDNA: [Arabidopsis thaliana] >gi|13605647|gb|AAK32817.1|AF361804_1
  misc_feature (1)..(143): Homolog of NCBI NO: 25411775 NR Description: NAM (no apical meristem)-like protein [imported]
  misc_feature (1)..(19): Homolog of NCBI NO: 30678000 NR Description: No apical meristem (NAM) protein family thaliana] >gi|24030186|gb|AAN41274.1| putative NAM (no apical
  misc_feature (1)..(19): Homolog of NCBI NO: 30678002 NR Description: No apical meristem (NAM) protein family
  misc_feature (1)..(118): Homolog of NCBI NO: 15223376 NR Description: putative NAM protein; protein id: At1g26870.1
  misc_feature (1)..(118): Homolog of NCBI NO: 25518578 NR Description: hypothetical protein T2P11.6 - Arabidopsis
  misc_feature (1)..(19): Homolog of NCBI NO: 21450867 NR Description: putative NAM protein [Arabidopsis thaliana]
  misc_feature (1)..(63): Homolog of NCBI NO: 15218843 NR Description: jasmonic acid, putative; protein id: At1g65910.1
  misc_feature (1)..(50): Homolog of NCBI NO: 18416983 NR Description: putative protein; protein id: At4g27410.2, by cDNA: 38344., supported by cDNA: gi_15982728, supported by gi_16226942, supported by cDNA: gi_20259262 [Arabidopsis
  misc_feature (1)..(50): Homolog of NCBI NO: 23397295 NR Description: unknown protein [Arabidopsis thaliana]
MPDNCSLPKDVVLCKIYRKATSLKVLEQRAEMEAKMNQTCPNSPLSSSETISFVGKEENMMTSFRAPQVIAMEEANKIQMHQENAKTEEKQREAETKEPSSSLKLPFGSLPELQLPKPGVEWDQLLSISPWLQNLTPIVNIYW

SEQ ID NO: 89517 - DNA, 1286 bp, Arabidopsis thaliana
  misc_feature (1)..(1286): Ceres Seq. ID no. 12719356
  misc_feature: MA Experiment ID: 108469 Result: Up-regulated in Transcription
  misc_feature: MA Experiment ID: 108573 Result: Up-regulated in Transcription
  misc_feature: MA Experiment 108573 PARAMETER Experiment Name: At_Drought_cDNA_P Parameter: Timepoint (hr) Value: 6
  misc_feature: MA Experiment 108573 PARAMETER Experiment Name: At_Drought_cDNA_P Parameter: Tissue Value: Aerial
  misc_feature: MA Experiment 108573 PARAMETER Experiment Name: At_Drought_cDNA_P Parameter: Treatment Value: Drought vs. No Drought
  misc_feature: MA Experiment ID: 108585 Result: Up-regulated in Transcription
  misc_feature: MA Experiment 108585 PARAMETER Experiment Name: At_5mM_NaNP_cDNA_P Parameter: Timepoint (hr) Value: 6
  misc_feature: MA Experiment 108585 PARAMETER Experiment Name: At_5mM_NaNP_cDNA_P Parameter: Tissue Value: Aerial
  misc_feature: MA Experiment 108585 PARAMETER Experiment Name: At_5mM_NaNP_cDNA_P Parameter: Treatment Value: null
  misc_feature: MA Experiment ID: 108605 Result: Up-regulated in Transcription
  misc_feature: MA Experiment 108605 PARAMETER Experiment Name: At_100uM_ABA_cDNA_P Parameter: Timepoint (hr) Value: 6
  misc_feature: MA Experiment 108605 PARAMETER Experiment Name: At_100uM_ABA_cDNA_P Parameter: Tissue Value: Aerial
  misc_feature: MA Experiment 108605 PARAMETER Experiment Name: At_100uM_ABA_cDNA_P Parameter: Treatment Value: 100uM ABA vs. No Treatment
  misc_feature: MA Experiment ID: 108607 Result: Up-regulated in Transcription
  misc_feature: MA Experiment 108607 PARAMETER Experiment Name: At_100uM_ABA_cDNA_P Parameter: Timepoint (hr) Value: 4
  misc_feature: MA Experiment 108607 PARAMETER Experiment Name: At_100uM_ABA_cDNA_P Parameter: Tissue Value: Aerial
  misc_feature: MA Experiment 108607 PARAMETER Experiment Name: At_100uM_ABA_cDNA_P Parameter: Treatment Value: 100uM ABA vs. No Treatment
  misc_feature: MA Experiment ID: 108668 Result: Up-regulated in Transcription
  misc_feature: MA Experiment 108668 PARAMETER Experiment Name: At_2mM_SA_cDNA_P Parameter: Plant Line Value: WS
  misc_feature: MA Experiment 108668 PARAMETER Experiment Name: At_2mM_SA_cDNA_P Parameter: Timepoint (hr) Value: 6
  misc_feature: MA Experiment 108668 PARAMETER Experiment Name: At_2mM_SA_cDNA_P Parameter: Treatment Value: 2mM SA vs. No Treatment
  misc_feature: MA Experiment ID: 20000069 Result: Up-regulated in Transcription
  misc_feature: MA Experiment 20000069 PARAMETER Experiment Name: At_100uM_ABA_Mutants_cDNA_P Parameter: Plant Line Value: CS23
  misc_feature: MA Experiment 20000069 PARAMETER Experiment Name: At_100uM_ABA_Mutants_cDNA_P Parameter: Timepoint (hr) Value: 6
  misc_feature: MA Experiment 20000069 PARAMETER Experiment Name: At_100uM_ABA_Mutants_cDNA_P Parameter: Tissue Value: Aerial
  misc_feature: MA Experiment 20000069 PARAMETER Experiment Name: At_100uM_ABA_Mutants_cDNA_P Parameter: Treatment Value: 100uM ABA vs. No Treatment
  misc_feature: MA Experiment ID: 20000070 Result: Up-regulated in Transcription
  misc_feature: MA Experiment 20000070 PARAMETER Experiment Name: At_100uM_ABA_Mutants_cDNA_P Parameter: Plant Line Value: CS24
  misc_feature: MA Experiment 20000070 PARAMETER Experiment Name: At_100uM_ABA_Mutants_cDNA_P Parameter: Timepoint (hr) Value: 6
  misc_feature: MA Experiment 20000070 PARAMETER Experiment Name: At_100uM_ABA_Mutants_cDNA_P Parameter: Tissue Value: Aerial
  misc_feature: MA Experiment 20000070 PARAMETER Experiment Name: At_100uM_ABA_Mutants_cDNA_P Parameter: Treatment Value: 100uM ABA vs. No Treatment
  misc_feature: MA Experiment ID: 20000072 Result: Up-regulated in Transcription
  misc_feature: MA Experiment 20000072 PARAMETER Experiment Name: At_100uM_ABA_Mutants_cDNA_P Parameter: Plant Line Value: CS8105
  misc_feature: MA Experiment 20000072 PARAMETER Experiment Name: At_100uM_ABA_Mutants_cDNA_P Parameter: Timepoint (hr) Value: 6
  misc_feature: MA Experiment 20000072 PARAMETER Experiment Name: At_100uM_ABA_Mutants_cDNA_P Parameter: Tissue Value: Aerial
  misc_feature: MA Experiment 20000072 PARAMETER Experiment Name: At_100uM_ABA_Mutants_cDNA_P Parameter: Treatment Value: 100uM ABA vs. No Treatment
  misc_feature: MA Experiment ID: 20000086 Result: Up-regulated in Transcription
  misc_feature: MA Experiment 20000086 PARAMETER Experiment Name: At_100uM_ABA_Mutants_cDNA_P Parameter: Plant Line Value: CS22
  misc_feature: MA Experiment 20000086 PARAMETER Experiment Name: At_100uM_ABA_Mutants_cDNA_P Parameter: Timepoint (hr) Value: 6
  misc_feature: MA Experiment 20000086 PARAMETER Experiment Name: At_100uM_ABA_Mutants_cDNA_P Parameter: Tissue Value: Aerial
  misc_feature: MA Experiment 20000086 PARAMETER Experiment Name: At_100uM_ABA_Mutants_cDNA_P Parameter: Treatment Value: 100uM ABA vs. No Treatment
  misc_feature: MA Experiment ID: 20000087 Result: Up-regulated in Transcription
  misc_feature: MA Experiment 20000087 PARAMETER Experiment Name: At_100uM_ABA_Mutants_cDNA_P Parameter: Plant Line Value: WS
  misc_feature: MA Experiment 20000087 PARAMETER Experiment Name: At_100uM_ABA_Mutants_cDNA_P Parameter: Timepoint (hr) Value: 6
  misc_feature: MA Experiment 20000087 PARAMETER Experiment Name: At_100uM_ABA_Mutants_cDNA_P Parameter: Tissue Value: Aerial
  misc_feature: MA Experiment 20000087 PARAMETER Experiment Name: At_100uM_ABA_Mutants_cDNA_P Parameter: Treatment Value: 100uM ABA vs. No Treatment
  misc_feature: MA Experiment ID: 20000088 Result: Up-regulated in Transcription
  misc_feature: MA Experiment 20000088 PARAMETER Experiment Name: At_100uM_ABA_Mutants_cDNA_P Parameter: Plant Line Value: Landsberg
  misc_feature: MA Experiment 20000088 PARAMETER Experiment Name: At_100uM_ABA_Mutants_cDNA_P Parameter: Timepoint (hr) Value: 6
  misc_feature: MA Experiment 20000088 PARAMETER Experiment Name: At_100uM_ABA_Mutants_cDNA_P Parameter: Tissue Value: Aerial
  misc_feature: MA Experiment 20000088 PARAMETER Experiment Name: At_100uM_ABA_Mutants_cDNA_P Parameter: Treatment Value: 100uM ABA vs. No Treatment
  misc_feature: MA Experiment ID: 20000090 Result: Up-regulated in Transcription
  misc_feature: MA Experiment ID: 20000182 Result: Up-regulated in Transcription
  misc_feature: MA Experiment 20000182 PARAMETER Experiment Name: At_2mM_SA_P Parameter: Age (day) Value: 14
  misc_feature: MA Experiment 20000182 PARAMETER Experiment Name: At_2mM_SA_P Parameter: Organism Value: A. thaliana
  misc_feature: MA Experiment 20000182 PARAMETER Experiment Name: At_2mM_SA_P Parameter: Plant Line Value: WS
  misc_feature: MA Experiment 20000182 PARAMETER Experiment Name: At_2mM_SA_P Parameter: Timepoint (hr) Value: 6
  misc_feature: MA Experiment 20000182 PARAMETER Experiment Name: At_2mM_SA_P Parameter: Tissue Value: Aerial
  misc_feature: MA Experiment 20000182 PARAMETER Experiment Name: At_2mM_SA_P Parameter: Treatment Value: 2mM SA vs. No Treatment
  misc_feature: MA Experiment ID: 20000234 Result: Down-regulated in Transcription
  misc_feature: MA Experiment 20000234 PARAMETER Experiment Name: At_Siliques_P Parameter: Age (day) Value: 21
  misc_feature: MA Experiment 20000234 PARAMETER Experiment Name: At_Siliques_P Parameter: Organism Value: A. thaliana
  misc_feature: MA Experiment 20000234 PARAMETER Experiment Name: At_Siliques_P Parameter: Plant Line Value: WS
  misc_feature: MA Experiment 20000234 PARAMETER Experiment Name: At_Siliques_P Parameter: Tissue Value: Less Than 5mm Siliques vs. Whole Plant
  misc_feature: MA Experiment ID: 20000235 Result: Down-regulated in Transcription
  misc_feature: MA Experiment 20000235 PARAMETER Experiment Name: At_Siliques_P Parameter: Age (day) Value: 21
  misc_feature: MA Experiment 20000235 PARAMETER Experiment Name: At_Siliques_P Parameter: Organism Value: A. thaliana
  misc_feature: MA Experiment 20000235 PARAMETER Experiment Name: At_Siliques_P Parameter: Plant Line Value: WS
  misc_feature: MA Experiment 20000235 PARAMETER Experiment Name: At_Siliques_P Parameter: Tissue Value: 5-10mm Siliques vs. Whole Plant
  misc_feature: MA Experiment ID: 20000264 Result: Down-regulated in Transcription
  misc_feature: MA Experiment 20000264 PARAMETER Experiment Name: At_Open_Flower_P Parameter: Age (day) Value: 21
  misc_feature: MA Experiment 20000264 PARAMETER Experiment Name: At_Open_Flower_P Parameter: Plant Line Value: WS
  misc_feature: MA Experiment 20000264 PARAMETER Experiment Name: At_Open_Flower_P Parameter: Tissue Value: Open Flower vs. Whole Plant
  misc_feature: MA Experiment ID: 20000265 Result: Down-regulated in Transcription
  misc_feature: MA Experiment 20000265 PARAMETER Experiment Name: At_Open_Flower_P Parameter: Age (day) Value: 21
  misc_feature: MA Experiment 20000265 PARAMETER Experiment Name: At_Open_Flower_P Parameter: Plant Line Value: WS
  misc_feature: MA Experiment 20000265 PARAMETER Experiment Name: At_Open_Flower_P Parameter: Tissue Value: Closed Flower vs. Whole Plant
  misc_feature: MA Experiment ID: 20000794 Result: Down-regulated in Transcription
  misc_feature: MA Experiment 20000794 PARAMETER Experiment Name: At_Petals_P Parameter: Age (day) Value: 23-25 days
  misc_feature: MA Experiment 20000794 PARAMETER Experiment Name: At_Petals_P Parameter: Plant Line Value: WS
  misc_feature: MA Experiment 20000794 PARAMETER Experiment Name: At_Petals_P Parameter: Tissue Value: Petals vs. Whole plant
tcaaaaagtcctctctcggtcaactttcttcttggtccccatcttcacaaatcacaactctttttatttccaaagaccaaaaacctgagaacacaccggcgacctgaaaatggaaacttcctgttttacccttctcggtctccttgtctccctctccttcttcctcactctctccgcccaaatgaccggaaacttcaactgcagtggctcaacctcgacgtgtcaatctctcgttggttactcaagcaagaacgcaacaacgttgcgcaatatccaaaccctttttgccgtcaagaacctccgctcgatcctcggagctaacaatctcccactcaacacctcacgtgaccaacgcgtgaacccgaatcaagtcgtacgtgtcccaatccattgctcttgctccaatggaaccggtgtctcgaaccgggacatcgaatacaccatcaagaaagacgacatactctctttcgtcgcaactgagattttcggtggtctcgttacgtacgagaagatcagtgaggttaacaaaatccctgacccgaacaaaatcgaaatcggtcaaaagttttggatccctttgccttgtagctgtgataaattgaacggtgaggatgttgttcactacgcacatgtagtcaaactagggagctctctcggtgagatcgctgctcagtttggaacggacaacacgacgttggctcagctcaatggaatcattggtgactctcagcttcttgctgataaacctctcgacgtccctctcaaagcttgtagctcttctgtgaggaaggactcgttggatgctcctctgcttctgtctaacaactcatacgtcttcactgcaaacaattgcgtcaagtgtacttgtgacgctttgaagaattggactttaagctgtcaatcatcatctgagattaagccttcgaactggcaaacctgcccaccattttcacaatgtgatggagctttgcttaacgcctcttgcagacaacctcgtgattgcgtctatgctggttactccaaccaaaccatcttcaccacagcttccccagcttgtccagattctgctggtcctgataactatgcatcaacgctcagctcaagcttcaatttcgtgattgtgttgattcagtgtgctctgctttgtctctgccttctctagtaatgttttgttgtgtgtttatgagtgtgtatctaagtacagttcggattaaaataaagacattgtttcacctgaagcatcacgtccttgtaccatttttatattggaaacatttcagcttttg

SEQ ID NO: 89518 - protein, 350 aa, Arabidopsis thaliana; identical to SEQ ID NO: 27338
  peptide (1)..(350): Ceres Seq. ID no. 12719357
  misc_feature (110)..(156): Pfam Name: LysM domain Pfam Description: LysM domain
  misc_feature (1)..(350): Homolog of NCBI NO: 18398317 NR Description: expressed protein; protein id: At2g17120.1, by cDNA: 6280., supported by cDNA: gi_15810364, supported by
  misc_feature (1)..(350): Homolog of NCBI NO: 21593990 NR Description: unknown [Arabidopsis thaliana]
  misc_feature (11)..(346): Homolog of NCBI NO: 28207683 NR Description: Erwinia induced protein 1 [Solanum tuberosum]
  misc_feature (14)..(344): Homolog of NCBI NO: 22758281 NR Description: Unknown protein [Oryza sativa (japonica
  misc_feature (9)..(330): Homolog of NCBI NO: 18395044 NR Description: expressed protein; protein id: At1g21880.1, by cDNA: gi_15982869 [Arabidopsis thaliana]
  misc_feature (9)..(310): Homolog of NCBI NO: 30687570 NR Description: expressed protein [Arabidopsis thaliana]
  misc_feature (8)..(334): Homolog of NCBI NO: 30699276 NR Description: expressed protein [Arabidopsis thaliana]
  misc_feature (8)..(334): Homolog of NCBI NO: 25406518 NR Description: unknown protein T5M16.22 [imported] - Arabidopsis

SEQ ID NO: 89519 - protein, 326 aa, Arabidopsis thaliana; identical to SEQ ID NO: 27339
  peptide (1)..(326): Ceres Seq. ID no. 12719358
  misc_feature (86)..(132): Pfam Name: LysM domain Pfam Description: LysM domain
  misc_feature (1)..(326): Homolog of NCBI NO: 18398317 NR Description: expressed protein; protein id: At2g17120.1, by cDNA: 6280., supported by cDNA: gi_15810364, supported by
  misc_feature (1)..(326): Homolog of NCBI NO: 21593990 NR Description: unknown [Arabidopsis thaliana]
  misc_feature (1)..(322): Homolog of NCBI NO: 28207683 NR Description: Erwinia induced protein 1 [Solanum tuberosum]
  misc_feature (1)..(320): Homolog of NCBI NO: 22758281 NR Description: Unknown protein [Oryza sativa (japonica
  misc_feature (1)..(306): Homolog of NCBI NO: 18395044 NR Description: expressed protein; protein id: At1g21880.1, by cDNA: gi_15982869 [Arabidopsis thaliana]
  misc_feature (1)..(286): Homolog of NCBI NO: 30687570 NR Description: expressed protein [Arabidopsis thaliana]
  misc_feature (1)..(310): Homolog of NCBI NO: 30699276 NR Description: expressed protein [Arabidopsis thaliana]
  misc_feature (1)..(310): Homolog of NCBI NO: 25406518 NR Description: unknown protein T5M16.22 [imported] - Arabidopsis

SEQ ID NO: 89520 - DNA, 1422 bp, Arabidopsis thaliana
  misc_feature (1)..(1422): Ceres Seq. ID no. 12719382
  misc_feature: MA Experiment ID: 20000574 Result: Up-regulated in Transcription
  misc_feature: MA Experiment 20000574 PARAMETER Experiment Name: At_100uM_ABA_Mutants__P Parameter: Organism Value: A. thaliana
  misc_feature: MA Experiment 20000574 PARAMETER Experiment Name: At_100uM_ABA_Mutants__P Parameter: Plant Line Value: CS23 vs. Ler wt
  misc_feature: MA Experiment 20000574 PARAMETER Experiment Name: At_100uM_ABA_Mutants__P Parameter: Timepoint (hr) Value: N/A
  misc_feature: MA Experiment 20000574 PARAMETER Experiment Name: At_100uM_ABA_Mutants__P Parameter: Tissue Value: Whole Plant
  misc_feature: MA Experiment 20000574 PARAMETER Experiment Name: At_100uM_ABA_Mutants__P Parameter: Treatment Value: None
atggactgggattactatacgctgttgaagacgagtgtggctattattatagtgtttgttgtggccaaactcataacctcctccaaatccaagaagaaaacaagtgtcgtcccactccctccagttcttcaagcgtggcctccatttatcggatccctaatccgcttcatgaaaggtccaatagtgctacttagagaggaatatcctaagcttggaagtgttttcacagtgaagcttcttcacaaaaacatcacttttctcatcggtcccgaagtctcgtcccactttttcaacgcttatgaatctgaactcagccagaaagaaatttacaaatttaatgtgcctacttttggccccggagttgtgtttgatgttgactatcccgttcggatggagcagttccgattcttctccagcgctctcaaggattacttctcaaaatggggagaaagtggggaagtggatctaaaggccgagttagagcgtctaatcaccttgactgctagtagatgtctattgggtcgagaagtccgtgaccaactttttgatgatgttgctccattgttccatgaccttgataaaggcatgcaacccataagtgtcatcttcccaaagctccccattccagctcacaattgtcgtgaccgtgctcgcggaaagattgcaaaaatcttttcaaacatcatagcaacaagaaaacgctctggtgacaaatcagagaacgacatgctacaatgtttcatcgactcaaagtacaaagacggtagagagacaactgaatctgaagtaactggtttgctcattgctggtttgtttgcaggacaacatacaagctctatcactgccacatggaccggtgcttatctaattcaaaacaaacactggtggtccgcggctttggacgagcagaagaaactgattggaaaacatggggacaagatcgactacgatgttttgtctgagatggattttctgtttcgcagtgcaaaagaagctttaaggcttcaccctccaaagatcttactgctgagaacagtacacagtgatttcaccgtgacaactcgagaaggaaagcaatatgagataccaaagggtcatatcgttgcaacttctcctgcattcgccaaccgcttacctcatgtctacaaagatccggaaaattttgatccggatagattttcaaaggaaagagaagaggataaagcagctggttcgtgttcatacatctctttgggagctggtaggcacgagtgtcctggtggatcatttgcgttcttgcagatcaaagccgtatggtgtcacttattgagaaactttgagcttgagttagtgtcacctttccctgaaatcaactggaatgctttggtcgttggtgctaaaggaaatgtcatggttcgttacaagcgtcgtcccttttcttaa

SEQ ID NO: 89521 - protein, 473 aa, Arabidopsis thaliana
  peptide (1)..(473): Ceres Seq. ID no. 12719383
  misc_feature (1)..(473): Homolog of NCBI NO: 15227817 NR Description: putative obtusifoliol 14-alpha demethylase; id: At2g17330.1 [Arabidopsis thaliana] >gi|25282617|pir||H84550
  misc_feature (8)..(473): Homolog of NCBI NO: 15221075 NR Description: putative obtusifoliol 14-alpha demethylase; id: At1g11680.1, supported by cDNA: 110306., supported by cDNA: supported by cDNA: gi_15292852, supported by cDNA:
  misc_feature (1)..(473): Homolog of NCBI NO: 27461067 NR Description: obtusifoliol-14-demethylase [Nicotiana tabacum]
  misc_feature (8)..(473): Homolog of NCBI NO: 18000074 NR Description: obtusifoliol-14-demethylase [Nicotiana tabacum]
  misc_feature (9)..(470): Homolog of NCBI NO: 27542762 NR Description: cytochrome P450-like protein [Sorghum bicolor]
  misc_feature (9)..(470): Homolog of NCBI NO: 5921924 NR Description: Cytochrome P450 51 (CYPL1) (P450-L1A1)
  misc_feature (40)..(470): Homolog of NCBI NO: 6166036 NR Description: Cytochrome P450 51 (CYPL1) (P450-L1A1)
  misc_feature (65)..(470): Homolog of NCBI NO: 4586676 NR Description: sterol 14-demethylase [Oryza sativa (japonica
  misc_feature (163)..(470): Homolog of NCBI NO: 7489685 NR Description: probable obtusifoliol 14-alpha-demethylase CYP51
  misc_feature (111)..(470): Homolog of NCBI NO: 21619563 NR Description: cytochrome P450, 51 (lanosterol
MDWDYYTLLKTSVAIIIVFVVAKLITSSKSKKKTSVVPLPPVLQAWPPFIGSLIRFMKGPIVLLREEYPKLGSVFTVKLLHKNITFLIGPEVSSHFFNAYESELSQKEIYKFNVPTFGPGVVFDVDYPVRMEQFRFFSSALKDYFSKWGESGEVDLKAELERLITLTASRCLLGREVRDQLFDDVAPLFHDLDKGMQPISVIFPKLPIPAHNCRDRARGKIAKIFSNIIATRKRSGDKSENDMLQCFIDSKYKDGRETTESEVTGLLIAGLFAGQHTSSITATWTGAYLIQNKHWWSAALDEQKKLIGKHGDKIDYDVLSEMDFLFRSAKEALRLHPPKILLLRTVHSDFTVTTREGKQYEIPKGHIVATSPAFANRLPHVYKDPENFDPDRFSKEREEDKAAGSCSYISLGAGRHECPGGSFAFLQIKAVWCHLLRNFELELVSPFPEINWNALVVGAKGNVMVRYKRRPFS

SEQ ID NO: 89522 - protein, 417 aa, Arabidopsis thaliana
  peptide (1)..(417): Ceres Seq. ID no. 12719384
  misc_feature (1)..(417): Homolog of NCBI NO: 15227817 NR Description: putative obtusifoliol 14-alpha demethylase; id: At2g17330.1 [Arabidopsis thaliana] >gi|25282617|pir||H84550
  misc_feature (1)..(417): Homolog of NCBI NO: 15221075 NR Description: putative obtusifoliol 14-alpha demethylase; id: At1g11680.1, supported by cDNA: 110306., supported by cDNA: supported by cDNA: gi_15292852, supported by cDNA:
  misc_feature (1)..(417): Homolog of NCBI NO: 27461067 NR Description: obtusifoliol-14-demethylase [Nicotiana tabacum]
  misc_feature (1)..(417): Homolog of NCBI NO: 18000074 NR Description: obtusifoliol-14-demethylase [Nicotiana tabacum]
  misc_feature (1)..(414): Homolog of NCBI NO: 27542762 NR Description: cytochrome P450-like protein [Sorghum bicolor]
  misc_feature (1)..(414): Homolog of NCBI NO: 5921924 NR Description: Cytochrome P450 51 (CYPL1) (P450-L1A1)
  misc_feature (1)..(414): Homolog of NCBI NO: 6166036 NR Description: Cytochrome P450 51 (CYPL1) (P450-L1A1)
  misc_feature (9)..(414): Homolog of NCBI NO: 4586676 NR Description: sterol 14-demethylase [Oryza sativa (japonica
  misc_feature (107)..(414): Homolog of NCBI NO: 7489685 NR Description: probable obtusifoliol 14-alpha-demethylase CYP51
  misc_feature (55)..(414): Homolog of NCBI NO: 21619563 NR Description: cytochrome P450, 51 (lanosterol
MKGPIVLLREEYPKLGSVFTVKLLHKNITFLIGPEVSSHFFNAYESELSQKEIYKFNVPTFGPGVVFDVDYPVRMEQFRFFSSALKDYFSKWGESGEVDLKAELERLITLTASRCLLGREVRDQLFDDVAPLFHDLDKGMQPISVIFPKLPIPAHNCRDRARGKIAKIFSNIIATRKRSGDKSENDMLQCFIDSKYKDGRETTESEVTGLLIAGLFAGQHTSSITATWTGAYLIQNKHWWSAALDEQKKLIGKHGDKIDYDVLSEMDFLFRSAKEALRLHPPKILLLRTVHSDFTVTTREGKQYEIPKGHIVATSPAFANRLPHVYKDPENFDPDRFSKEREEDKAAGSCSYISLGAGRHECPGGSFAFLQIKAVWCHLLRNFELELVSPFPEINWNALVVGAKGNVMVRYKRRPFS

SEQ ID NO: 89523 - protein, 343 aa, Arabidopsis thaliana
  peptide (1)..(343): Ceres Seq. ID no. 12719385
  misc_feature (1)..(343): Homolog of NCBI NO: 15227817 NR Description: putative obtusifoliol 14-alpha demethylase; id: At2g17330.1 [Arabidopsis thaliana] >gi|25282617|pir||H84550
  misc_feature (1)..(343): Homolog of NCBI NO: 15221075 NR Description: putative obtusifoliol 14-alpha demethylase; id: At1g11680.1, supported by cDNA: 110306., supported by cDNA: supported by cDNA: gi_15292852, supported by cDNA:
  misc_feature (1)..(343): Homolog of NCBI NO: 27461067 NR Description: obtusifoliol-14-demethylase [Nicotiana tabacum]
  misc_feature (1)..(343): Homolog of NCBI NO: 18000074 NR Description: obtusifoliol-14-demethylase [Nicotiana tabacum]
  misc_feature (1)..(340): Homolog of NCBI NO: 27542762 NR Description: cytochrome P450-like protein [Sorghum bicolor]
  misc_feature (1)..(340): Homolog of NCBI NO: 5921924 NR Description: Cytochrome P450 51 (CYPL1) (P450-L1A1)
  misc_feature (1)..(340): Homolog of NCBI NO: 6166036 NR Description: Cytochrome P450 51 (CYPL1) (P450-L1A1)
  misc_feature (1)..(340): Homolog of NCBI NO: 4586676 NR Description: sterol 14-demethylase [Oryza sativa (japonica
  misc_feature (33)..(340): Homolog of NCBI NO: 7489685 NR Description: probable obtusifoliol 14-alpha-demethylase CYP51
  misc_feature (1)..(340): Homolog of NCBI NO: 21619563 NR Description: cytochrome P450, 51 (lanosterol
MEQFRFFSSALKDYFSKWGESGEVDLKAELERLITLTASRCLLGREVRDQLFDDVAPLFHDLDKGMQPISVIFPKLPIPAHNCRDRARGKIAKIFSNIIATRKRSGDKSENDMLQCFIDSKYKDGRETTESEVTGLLIAGLFAGQHTSSITATWTGAYLIQNKHWWSAALDEQKKLIGKHGDKIDYDVLSEMDFLFRSAKEALRLHPPKILLLRTVHSDFTVTTREGKQYEIPKGHIVATSPAFANRLPHVYKDPENFDPDRFSKEREEDKAAGSCSYISLGAGRHECPGGSFAFLQIKAVWCHLLRNFELELVSPFPEINWNALVVGAKGNVMVRYKRRPFS

SEQ ID NO: 89524 - DNA, 1410 bp, Arabidopsis thaliana
  misc_feature (1)..(1410): Ceres Seq. ID no. 12719426
  misc_feature: MA Experiment ID: 20000185 Result: Down-regulated in Transcription
  misc_feature: MA Experiment 20000185 PARAMETER Experiment Name: At_Roots__P Parameter: Age (day) Value: 7 vs. 21
  misc_feature: MA Experiment 20000185 PARAMETER Experiment Name: At_Roots__P Parameter: Organism Value: A. thaliana
  misc_feature: MA Experiment 20000185 PARAMETER Experiment Name: At_Roots__P Parameter: Tissue Value: Roots vs. Whole Plant
  misc_feature: MA Experiment ID: 20000264 Result: Down-regulated in Transcription
  misc_feature: MA Experiment 20000264 PARAMETER Experiment Name: At_Open_Flower_P Parameter: Age (day) Value: 21
  misc_feature: MA Experiment 20000264 PARAMETER Experiment Name: At_Open_Flower_P Parameter: Plant Line Value: WS
  misc_feature: MA Experiment 20000264 PARAMETER Experiment Name: At_Open_Flower_P Parameter: Tissue Value: Open Flower vs. Whole Plant
  misc_feature: MA Experiment ID: 20000265 Result: Down-regulated in Transcription
  misc_feature: MA Experiment 20000265 PARAMETER Experiment Name: At_Open_Flower_P Parameter: Age (day) Value: 21
  misc_feature: MA Experiment 20000265 PARAMETER Experiment Name: At_Open_Flower_P Parameter: Plant Line Value: WS
  misc_feature: MA Experiment 20000265 PARAMETER Experiment Name: At_Open_Flower_P Parameter: Tissue Value: Closed Flower vs. Whole Plant
  misc_feature: MA Experiment ID: 20000286 Result: Down-regulated in Transcription
  misc_feature: MA Experiment 20000286 PARAMETER Experiment Name: At_Open_Flower_P Parameter: Age (day) Value: 21
  misc_feature: MA Experiment 20000286 PARAMETER Experiment Name: At_Open_Flower_P Parameter: Plant Line Value: WS
  misc_feature: MA Experiment 20000286 PARAMETER Experiment Name: At_Open_Flower_P Parameter: Tissue Value: Half Open vs. Whole Plant
  misc_feature: MA Experiment ID: 20000438 Result: Down-regulated in Transcription
  misc_feature: MA Experiment 20000438 PARAMETER Experiment Name: At_Shoots__P Parameter: Age (day) Value: 14
  misc_feature: MA Experiment 20000438 PARAMETER Experiment Name: At_Shoots__P Parameter: Tissue Value: Shoots vs. Whole Plant
  misc_feature: MA Experiment ID: 20000439 Result: Down-regulated in Transcription
  misc_feature: MA Experiment 20000439 PARAMETER Experiment Name: At_Roots__P Parameter: Age (day) Value: 14 vs. 21
  misc_feature: MA Experiment 20000439 PARAMETER Experiment Name: At_Roots__P Parameter: Organism Value: A. thaliana
  misc_feature: MA Experiment 20000439 PARAMETER Experiment Name: At_Roots__P Parameter: Tissue Value: Roots vs. Whole Plant
  misc_feature: MA Experiment ID: 20000451 Result: Up-regulated in Transcription
  misc_feature: MA Experiment 20000451 PARAMETER Experiment Name: At_CS6879_Shoots-Roots_P Parameter: Age (day) Value: 14
  misc_feature: MA Experiment 20000451 PARAMETER Experiment Name: At_CS6879_Shoots-Roots_P Parameter: Organism Value: A. thaliana
  misc_feature: MA Experiment 20000451 PARAMETER Experiment Name: At_CS6879_Shoots-Roots_P Parameter: Plant Line Value: CS6879 vs. WS
  misc_feature: MA Experiment 20000451 PARAMETER Experiment Name: At_CS6879_Shoots-Roots_P Parameter: Tissue Value: Roots
  misc_feature: MA Experiment ID: 20000453 Result: Down-regulated in Transcription
  misc_feature: MA Experiment 20000453 PARAMETER Experiment Name: At_100uM_ABA_P Parameter: Age (day) Value: 15
  misc_feature: MA Experiment 20000453 PARAMETER Experiment Name: At_100uM_ABA_P Parameter: Organism Value: A. thaliana
  misc_feature: MA Experiment 20000453 PARAMETER Experiment Name: At_100uM_ABA_P Parameter: Plant Line Value: WS
  misc_feature: MA Experiment 20000453 PARAMETER Experiment Name: At_100uM_ABA_P Parameter: Timepoint (hr) Value: 24
  misc_feature: MA Experiment 20000453 PARAMETER Experiment Name: At_100uM_ABA_P Parameter: Tissue Value: Aerial
  misc_feature: MA Experiment 20000453 PARAMETER Experiment Name: At_100uM_ABA_P Parameter: Treatment Value: 100uM ABA vs. No Treatment
  misc_feature: MA Experiment ID: 20000455 Result: Down-regulated in Transcription
  misc_feature: MA Experiment 20000455 PARAMETER Experiment Name: At_100uM_ABA_P Parameter: Age (day) Value: 16
  misc_feature: MA Experiment 20000455 PARAMETER Experiment Name: At_100uM_ABA_P Parameter: Organism Value: A. thaliana
  misc_feature: MA Experiment 20000455 PARAMETER Experiment Name: At_100uM_ABA_P Parameter: Plant Line Value: WS
  misc_feature: MA Experiment 20000455 PARAMETER Experiment Name: At_100uM_ABA_P Parameter: Timepoint (hr) Value: 48
  misc_feature: MA Experiment 20000455 PARAMETER Experiment Name: At_100uM_ABA_P Parameter: Tissue Value: Aerial
  misc_feature: MA Experiment 20000455 PARAMETER Experiment Name: At_100uM_ABA_P Parameter: Treatment Value: 100uM ABA vs. No Treatment
  misc_feature: MA Experiment ID: 20000794 Result: Down-regulated in Transcription
  misc_feature: MA Experiment 20000794 PARAMETER Experiment Name: At_Petals_P Parameter: Age (day) Value: 23-25 days
  misc_feature: MA Experiment 20000794 PARAMETER Experiment Name: At_Petals_P Parameter: Plant Line Value: WS
  misc_feature: MA Experiment 20000794 PARAMETER Experiment Name: At_Petals_P Parameter: Tissue Value: Petals vs. Whole plant
  misc_feature: MA Experiment ID: 20001555 Result: Down-regulated in Transcription
  misc_feature: MA Experiment 20001555 PARAMETER Experiment Name: At_Drought_Soil_Dry_P Parameter: Age (day) Value: 24
  misc_feature: MA Experiment 20001555 PARAMETER Experiment Name: At_Drought_Soil_Dry_P Parameter: Organism Value: A. thaliana
  misc_feature: MA Experiment 20001555 PARAMETER Experiment Name: At_Drought_Soil_Dry_P Parameter: Plant Line Value: WS
  misc_feature: MA Experiment 20001555 PARAMETER Experiment Name: At_Drought_Soil_Dry_P Parameter: Post Timepoint (hr) Value: None
  misc_feature: MA Experiment 20001555 PARAMETER Experiment Name: At_Drought_Soil_Dry_P Parameter: Post-Treatment Value: None
  misc_feature: MA Experiment 20001555 PARAMETER Experiment Name: At_Drought_Soil_Dry_P Parameter: Timepoint (day) Value: 10
  misc_feature: MA Experiment 20001555 PARAMETER Experiment Name: At_Drought_Soil_Dry_P Parameter: Treatment Value: Drought vs. No Drought
  misc_feature: MA Experiment ID: 20001556 Result: Down-regulated in Transcription
  misc_feature: MA Experiment 20001556 PARAMETER Experiment Name: At_Drought_Soil_Dry_P Parameter: Age (day) Value: 26
  misc_feature: MA Experiment 20001556 PARAMETER Experiment Name: At_Drought_Soil_Dry_P Parameter: Organism Value: A. thaliana
  misc_feature: MA Experiment 20001556 PARAMETER Experiment Name: At_Drought_Soil_Dry_P Parameter: Plant Line Value: WS
  misc_feature: MA Experiment 20001556 PARAMETER Experiment Name: At_Drought_Soil_Dry_P Parameter: Post Timepoint (hr) Value: None
  misc_feature: MA Experiment 20001556 PARAMETER Experiment Name: At_Drought_Soil_Dry_P Parameter: Post-Treatment Value: None
  misc_feature: MA Experiment 20001556 PARAMETER Experiment Name: At_Drought_Soil_Dry_P Parameter: Timepoint (day) Value: 12
  misc_feature: MA Experiment 20001556 PARAMETER Experiment Name: At_Drought_Soil_Dry_P Parameter: Treatment Value: Drought vs. No Drought
  misc_feature: MA Experiment ID: 20001557 Result: Down-regulated in Transcription
  misc_feature: MA Experiment 20001557 PARAMETER Experiment Name: At_Drought_Soil_Dry_P Parameter: Age (day) Value: 27
  misc_feature: MA Experiment 20001557 PARAMETER Experiment Name: At_Drought_Soil_Dry_P Parameter: Organism Value: A. thaliana
  misc_feature: MA Experiment 20001557 PARAMETER Experiment Name: At_Drought_Soil_Dry_P Parameter: Plant Line Value: WS
  misc_feature: MA Experiment 20001557 PARAMETER Experiment Name: At_Drought_Soil_Dry_P Parameter: Post Timepoint (hr) Value: 3
  misc_feature: MA Experiment 20001557 PARAMETER Experiment Name: At_Drought_Soil_Dry_P Parameter: Post-Treatment Value: Re-Water vs. No Drought
  misc_feature: MA Experiment 20001557 PARAMETER Experiment Name: At_Drought_Soil_Dry_P Parameter: Timepoint (day) Value: 13
  misc_feature: MA Experiment 20001557 PARAMETER Experiment Name: At_Drought_Soil_Dry_P Parameter: Treatment Value: Drought vs. No Drought
  misc_feature: MA Experiment ID: 20001558 Result: Down-regulated in Transcription
  misc_feature: MA Experiment 20001558 PARAMETER Experiment Name: At_Drought_Soil_Dry_P Parameter: Age (day) Value: 27
  misc_feature: MA Experiment 20001558 PARAMETER Experiment Name: At_Drought_Soil_Dry_P Parameter: Organism Value: A. thaliana
  misc_feature: MA Experiment 20001558 PARAMETER Experiment Name: At_Drought_Soil_Dry_P Parameter: Plant Line Value: WS
  misc_feature: MA Experiment 20001558 PARAMETER Experiment Name: At_Drought_Soil_Dry_P Parameter: Post Timepoint (hr) Value: 6
  misc_feature: MA Experiment 20001558 PARAMETER Experiment Name: At_Drought_Soil_Dry_P Parameter: Post-Treatment Value: Re-Water vs. No Drought
  misc_feature: MA Experiment 20001558 PARAMETER Experiment Name: At_Drought_Soil_Dry_P Parameter: Timepoint (day) Value: 13
  misc_feature: MA Experiment 20001558 PARAMETER Experiment Name: At_Drought_Soil_Dry_P Parameter: Treatment Value: Drought vs. No Drought
  misc_feature: MA Experiment ID: 20001560 Result: Down-regulated in Transcription
  misc_feature: MA Experiment 20001560 PARAMETER Experiment Name: At_Drought_Soil_Dry_P Parameter: Age (day) Value: 28
  misc_feature: MA Experiment 20001560 PARAMETER Experiment Name: At_Drought_Soil_Dry_P Parameter: Organism Value: A. thaliana
  misc_feature: MA Experiment 20001560 PARAMETER Experiment Name: At_Drought_Soil_Dry_P Parameter: Plant Line Value: WS
  misc_feature: MA Experiment 20001560 PARAMETER Experiment Name: At_Drought_Soil_Dry_P Parameter: Post Timepoint (hr) Value: None
  misc_feature: MA Experiment 20001560 PARAMETER Experiment Name: At_Drought_Soil_Dry_P Parameter: Post-Treatment Value: None
  misc_feature: MA Experiment 20001560 PARAMETER Experiment Name: At_Drought_Soil_Dry_P Parameter: Timepoint (day) Value: 14
  misc_feature: MA Experiment 20001560 PARAMETER Experiment Name: At_Drought_Soil_Dry_P Parameter: Treatment Value: Drought vs. No Drought
  misc_feature: MA Experiment ID: 20001760 Result: Up-regulated in Transcription
  misc_feature: MA Experiment 20001760 PARAMETER Experiment Name: At_50mM_NH4NO3_L-to-H_P Parameter: Timepoint (hr) Value: 2
  misc_feature: MA Experiment 20001760 PARAMETER Experiment Name: At_50mM_NH4NO3_L-to-H_P Parameter: Tissue Value: Siliques
  misc_feature: MA Experiment 20001760 PARAMETER Experiment Name: At_50mM_NH4NO3_L-to-H_P Parameter: Treatment Value: 50mM NH4NO3 vs 100mM Mannitol
  misc_feature: MA Experiment ID: 20001773 Result: Down-regulated in Transcription
  misc_feature: MA Experiment 20001773 PARAMETER Experiment Name: At_Far-red-enriched-adult_P Parameter: Age (day) Value: 30
  misc_feature: MA Experiment 20001773 PARAMETER Experiment Name: At_Far-red-enriched-adult_P Parameter: Light Value: Far-red enriched vs. White
  misc_feature: MA Experiment 20001773 PARAMETER Experiment Name: At_Far-red-enriched-adult_P Parameter: Organism Value: A. thaliana
  misc_feature: MA Experiment 20001773 PARAMETER Experiment Name: At_Far-red-enriched-adult_P Parameter: Plant Line Value: Columbia
  misc_feature: MA Experiment 20001773 PARAMETER Experiment Name: At_Far-red-enriched-adult_P Parameter: Timepoint (hr) Value: 48
  misc_feature: MA Experiment 20001773 PARAMETER Experiment Name: At_Far-red-enriched-adult_P Parameter: Tissue Value: Aerial
  misc_feature: MA Experiment ID: 20001904 Result: Down-regulated in Transcription
  misc_feature: MA Experiment 20001904 PARAMETER Experiment Name: At_Drought_Reproduction_P Parameter: Age (day) Value: 37
  misc_feature: MA Experiment 20001904 PARAMETER Experiment Name: At_Drought_Reproduction_P Parameter: Organism Value: A. thaliana
  misc_feature: MA Experiment 20001904 PARAMETER Experiment Name: At_Drought_Reproduction_P Parameter: Plant Line Value: WS
  misc_feature: MA Experiment 20001904 PARAMETER Experiment Name: At_Drought_Reproduction_P Parameter: Timepoint (day) Value: 7
  misc_feature: MA Experiment 20001904 PARAMETER Experiment Name: At_Drought_Reproduction_P Parameter: Tissue Value: Rosettes
  misc_feature: MA Experiment 20001904 PARAMETER Experiment Name: At_Drought_Reproduction_P Parameter: Treatment Value: Drought vs. No Drought
  misc_feature: MA Experiment ID: 20001905 Result: Down-regulated in Transcription
  misc_feature: MA Experiment 20001905 PARAMETER Experiment Name: At_Drought_Reproduction_P Parameter: Age (day) Value: 40
  misc_feature: MA Experiment 20001905 PARAMETER Experiment Name: At_Drought_Reproduction_P Parameter: Organism Value: A. thaliana
  misc_feature: MA Experiment 20001905 PARAMETER Experiment Name: At_Drought_Reproduction_P Parameter: Plant Line Value: WS
  misc_feature: MA Experiment 20001905 PARAMETER Experiment Name: At_Drought_Reproduction_P Parameter: Timepoint (day) Value: 10
  misc_feature: MA Experiment 20001905 PARAMETER Experiment Name: At_Drought_Reproduction_P Parameter: Tissue Value: Rosettes
  misc_feature: MA Experiment 20001905 PARAMETER Experiment Name: At_Drought_Reproduction_P Parameter: Treatment Value: Drought vs. No Drought
atagaattccaaagagtgctgtctaaaagagttcttaatctacattgttaaataatttacatgatgggagtggccggttttgcggtagctctgatggtaacttcactgttaatcgctacttgcgctgatggaaaagagttttttcatcaccgggaaattaaagtacaaagatttttgaagcagcttaacaagccagctcttaaatccattaagagtgaagacggagatataattgattgtgttctaataactagccaaccagcttttgatcatcctttgcttaaaaatcacaccattcaggtaaaaccaagttttatcccggaaggggaaggtgactctacgtacaccaagaaggagacaaaagctactcaagtgtggcagaaatatggagagtgcccagaaaacactatcccgataagaagaacaaaaaaagaagaaatcttacgagcaaaatcccttgaaagtttcgggaaaaagaatcatcaatacattcctgaagatacatctagtccaaattatcaccatgagtacgcgttcatgggtgtgagaaacggaaagttttacgggacaaaagcctcgataaatgtctggaaaccagatgtagcaactcccagcgagttcagcttgtcacagacttggatcgtatctggagatggcactagtcgtaatactattgaagctggttggcaggtttatccaggaatgtacggtaataatgatcctagattatttgtttattggaccagcgatggataccaaaagacaggatgctataatctcgtctgcggtggttttgttcagacgaccaaccaatacactgtaggtggatcctacgttaccgcgtcacaatacgacggagctcaactagttctcaacctacttatatggaaggacccaaaaacaggaaactggtggctaaagattaatgacaacgatgttatagggtactggcctggctcgttgttcaattctctaggagatggagctataaaagttgaatggggtggcgaaatcttcgcgccaaccagtgatagacacacaaccaccgatatgggaagtggacattttgcagaggaagggattaagaaagcgagctatgtaaaaaatattatgatagttgatgggacaaatgctctgagagaaccacaaggactttactcctatgctgataatcgtaattgttacagcgttgtaccaggaaatgctggaacttcctttggtactcatttcttctatggtggtcctggtcagaacgttaaatgcccgtgatctgatctgtgtgttcaagcttttgatattacgcatctatgtttcaatgtttgatcctatctatctttaattatagttaagtgctctttgtctatgtgtaaggcttcatagtttataataaagaacttttacgtttgttcc

SEQ ID NO: 89525 - protein, 402 aa, Arabidopsis thaliana
  peptide (1)..(402): Ceres Seq. ID no. 12719427
  misc_feature (167)..(359): Pfam Name: Arabidopsis proteins of unknown function Pfam Description: Arabidopsis proteins of unknown function
  misc_feature (1)..(402): Homolog of NCBI NO: 18406490 NR Description: expressed protein; protein id: At2g44240.1, by cDNA: gi_16226494 [Arabidopsis thaliana] At2g44240/F4I1.5 [Arabidopsis thaliana]
  misc_feature (2)..(402): Homolog of NCBI NO: 7486438 NR Description: hypothetical protein At2g44240 [imported] -
  misc_feature (2)..(402): Homolog of NCBI NO: 7486433 NR Description: hypothetical protein At2g44220 [imported] - thaliana >gi|3128169|gb|AAC16073.1| hypothetical protein
  misc_feature (11)..(402): Homolog of NCBI NO: 30689660 NR Description: expressed protein [Arabidopsis thaliana]
  misc_feature (11)..(402): Homolog of NCBI NO: 21805747 NR Description: hypothetical protein [Arabidopsis thaliana]
  misc_feature (7)..(402): Homolog of NCBI NO: 18406483 NR Description: expressed protein; protein id: At2g44210.1, by cDNA: 39057., supported by cDNA: gi_15081718 [Arabidopsis
  misc_feature (31)..(402): Homolog of NCBI NO: 34393554 NR Description: putative carboxyl-terminal proteinase [Oryza
  misc_feature (3)..(402): Homolog of NCBI NO: 30103019 NR Description: unknown protein [Oryza sativa (japonica
  misc_feature (5)..(402): Homolog of NCBI NO: 34393299 NR Description: putative DD1A protein [Oryza sativa (japonica
  misc_feature (6)..(401): Homolog of NCBI NO: 15241244 NR Description: putative protein; protein id: At5g56530.1, by cDNA: gi_17381169 [Arabidopsis thaliana]
MMGVAGFAVALMVTSLLIATCADGKEFFHHREIKVQRFLKQLNKPALKSIKSEDGDIIDCVLITSQPAFDHPLLKNHTIQVKPSFIPEGEGDSTYTKKETKATQVWQKYGECPENTIPIRRTKKEEILRAKSLESFGKKNHQYIPEDTSSPNYHHEYAFMGVRNGKFYGTKASINVWKPDVATPSEFSLSQTWIVSGDGTSRNTIEAGWQVYPGMYGNNDPRLFVYWTSDGYQKTGCYNLVCGGFVQTTNQYTVGGSYVTASQYDGAQLVLNLLIWKDPKTGNWWLKINDNDVIGYWPGSLFNSLGDGAIKVEWGGEIFAPTSDRHTTTDMGSGHFAEEGIKKASYVKNIMIVDGTNALREPQGLYSYADNRNCYSVVPGNAGTSFGTHFFYGGPGQNVKCP

SEQ ID NO: 89526 - protein, 401 aa, Arabidopsis thaliana
  peptide (1)..(401): Ceres Seq. ID no. 12719428
  misc_feature (166)..(358): Pfam Name: Arabidopsis proteins of unknown function Pfam Description: Arabidopsis proteins of unknown function
  misc_feature (1)..(401): Homolog of NCBI NO: 18406490 NR Description: expressed protein; protein id: At2g44240.1, by cDNA: gi_16226494 [Arabidopsis thaliana] At2g44240/F4I1.5 [Arabidopsis thaliana]
  misc_feature (1)..(401): Homolog of NCBI NO: 7486438 NR Description: hypothetical protein At2g44240 [imported] -
  misc_feature (1)..(401): Homolog of NCBI NO: 7486433 NR Description: hypothetical protein At2g44220 [imported] - thaliana >gi|3128169|gb|AAC16073.1| hypothetical protein
  misc_feature (10)..(401): Homolog of NCBI NO: 30689660 NR Description: expressed protein [Arabidopsis thaliana]
  misc_feature (10)..(401): Homolog of NCBI NO: 21805747 NR Description: hypothetical protein [Arabidopsis thaliana]
  misc_feature (6)..(401): Homolog of NCBI NO: 18406483 NR Description: expressed protein; protein id: At2g44210.1, by cDNA: 39057., supported by cDNA: gi_15081718 [Arabidopsis
  misc_feature (30)..(401): Homolog of NCBI NO: 34393554 NR Description: putative carboxyl-terminal proteinase [Oryza
  misc_feature (2)..(401): Homolog of NCBI NO: 30103019 NR Description: unknown protein [Oryza sativa (japonica
  misc_feature (4)..(401): Homolog of NCBI NO: 34393299 NR Description: putative DD1A protein [Oryza sativa (japonica
  misc_feature (5)..(400): Homolog of NCBI NO: 15241244 NR Description: putative protein; protein id: At5g56530.1, by cDNA: gi_17381169 [Arabidopsis thaliana]
MGVAGFAVALMVTSLLIATCADGKEFFHHREIKVQRFLKQLNKPALKSIKSEDGDIIDCVLITSQPAFDHPLLKNHTIQVKPSFIPEGEGDSTYTKKETKATQVWQKYGECPENTIPIRRTKKEEILRAKSLESFGKKNHQYIPEDTSSPNYHHEYAFMGVRNGKFYGTKASINVWKPDVATPSEFSLSQTWIVSGDGTSRNTIEAGWQVYPGMYGNNDPRLFVYWTSDGYQKTGCYNLVCGGFVQTTNQYTVGGSYVTASQYDGAQLVLNLLIWKDPKTGNWWLKINDNDVIGYWPGSLFNSLGDGAIKVEWGGEIFAPTSDRHTTTDMGSGHFAEEGIKKASYVKNIMIVDGTNALREPQGLYSYADNRNCYSVVPGNAGTSFGTHFFYGGPGQNVKCP

SEQ ID NO: 89527 - protein, 391 aa, Arabidopsis thaliana
  peptide (1)..(391): Ceres Seq. ID no. 12719429
  misc_feature (156)..(348): Pfam Name: Arabidopsis proteins of unknown function Pfam Description: Arabidopsis proteins of unknown function
  misc_feature (1)..(391): Homolog of NCBI NO: 18406490 NR Description: expressed protein; protein id: At2g44240.1, by cDNA: gi_16226494 [Arabidopsis thaliana] At2g44240/F4I1.5 [Arabidopsis thaliana]
  misc_feature (1)..(391): Homolog of NCBI NO: 7486438 NR Description: hypothetical protein At2g44240 [imported] -
  misc_feature (1)..(391): Homolog of NCBI NO: 7486433 NR Description: hypothetical protein At2g44220 [imported] - thaliana >gi|3128169|gb|AAC16073.1| hypothetical protein
  misc_feature (1)..(391): Homolog of NCBI NO: 30689660 NR Description: expressed protein [Arabidopsis thaliana]
  misc_feature (1)..(391): Homolog of NCBI NO: 21805747 NR Description: hypothetical protein [Arabidopsis thaliana]
  misc_feature (1)..(391): Homolog of NCBI NO: 18406483 NR Description: expressed protein; protein id: At2g44210.1, by cDNA: 39057., supported by cDNA: gi_15081718 [Arabidopsis
  misc_feature (20)..(391): Homolog of NCBI NO: 34393554 NR Description: putative carboxyl-terminal proteinase [Oryza
  misc_feature (1)..(391): Homolog of NCBI NO: 30103019 NR Description: unknown protein [Oryza sativa (japonica
  misc_feature (1)..(391): Homolog of NCBI NO: 34393299 NR Description: putative DD1A protein [Oryza sativa (japonica
  misc_feature (1)..(390): Homolog of NCBI NO: 15241244 NR Description: putative protein; protein id: At5g56530.1, by cDNA: gi_17381169 [Arabidopsis thaliana]
MVTSLLIATCADGKEFFHHREIKVQRFLKQLNKPALKSIKSEDGDIIDCVLITSQPAFDHPLLKNHTIQVKPSFIPEGEGDSTYTKKETKATQVWQKYGECPENTIPIRRTKKEEILRAKSLESFGKKNHQYIPEDTSSPNYHHEYAFMGVRNGKFYGTKASINVWKPDVATPSEFSLSQTWIVSGDGTSRNTIEAGWQVYPGMYGNNDPRLFVYWTSDGYQKTGCYNLVCGGFVQTTNQYTVGGSYVTASQYDGAQLVLNLLIWKDPKTGNWWLKINDNDVIGYWPGSLFNSLGDGAIKVEWGGEIFAPTSDRHTTTDMGSGHFAEEGIKKASYVKNIMIVDGTNALREPQGLYSYADNRNCYSVVPGNAGTSFGTHFFYGGPGQNVKCP

SEQ ID NO: 89528 - DNA, 615 bp, Arabidopsis thaliana
  misc_feature (1)..(615): Ceres Seq. ID no. 12719434
  misc_feature: MA Experiment ID: 20000173 Result: Down-regulated in Transcription
  misc_feature: MA Experiment 20000173 PARAMETER Experiment Name: At_42deg_Heat_P Parameter: Age (day) Value: 14
  misc_feature: MA Experiment 20000173 PARAMETER Experiment Name: At_42deg_Heat_P Parameter: Organism Value: A. thaliana
  misc_feature: MA Experiment 20000173 PARAMETER Experiment Name: At_42deg_Heat_P Parameter: Plant Line Value: WS
  misc_feature: MA Experiment 20000173 PARAMETER Experiment Name: At_42deg_Heat_P Parameter: Temperature (deg C) Value: 42 vs. 22
  misc_feature: MA Experiment 20000173 PARAMETER Experiment Name: At_42deg_Heat_P Parameter: Timepoint (hr) Value: 6
  misc_feature: MA Experiment 20000173 PARAMETER Experiment Name: At_42deg_Heat_P Parameter: Tissue Value: Aerial
  misc_feature: MA Experiment ID: 20000264 Result: Down-regulated in Transcription
  misc_feature: MA Experiment 20000264 PARAMETER Experiment Name: At_Open_Flower_P Parameter: Age (day) Value: 21
  misc_feature: MA Experiment 20000264 PARAMETER Experiment Name: At_Open_Flower_P Parameter: Plant Line Value: WS
  misc_feature: MA Experiment 20000264 PARAMETER Experiment Name: At_Open_Flower_P Parameter: Tissue Value: Open Flower vs. Whole Plant
  misc_feature: MA Experiment ID: 20000265 Result: Down-regulated in Transcription
  misc_feature: MA Experiment 20000265 PARAMETER Experiment Name: At_Open_Flower_P Parameter: Age (day) Value: 21
  misc_feature: MA Experiment 20000265 PARAMETER Experiment Name: At_Open_Flower_P Parameter: Plant Line Value: WS
  misc_feature: MA Experiment 20000265 PARAMETER Experiment Name: At_Open_Flower_P Parameter: Tissue Value: Closed Flower vs. Whole Plant
  misc_feature: MA Experiment ID: 20000286 Result: Down-regulated in Transcription
  misc_feature: MA Experiment 20000286 PARAMETER Experiment Name: At_Open_Flower_P Parameter: Age (day) Value: 21
  misc_feature: MA Experiment 20000286 PARAMETER Experiment Name: At_Open_Flower_P Parameter: Plant Line Value: WS
  misc_feature: MA Experiment 20000286 PARAMETER Experiment Name: At_Open_Flower_P Parameter: Tissue Value: Half Open vs. Whole Plant
  misc_feature: MA Experiment ID: 20000452 Result: Up-regulated in Transcription
  misc_feature: MA Experiment 20000452 PARAMETER Experiment Name: At_CS6879_Shoots-Roots_P Parameter: Age (day) Value: 14
  misc_feature: MA Experiment 20000452 PARAMETER Experiment Name: At_CS6879_Shoots-Roots_P Parameter: Organism Value: A. thaliana
  misc_feature: MA Experiment 20000452 PARAMETER Experiment Name: At_CS6879_Shoots-Roots_P Parameter: Plant Line Value: CS6879 vs. WS
  misc_feature: MA Experiment 20000452 PARAMETER Experiment Name: At_CS6879_Shoots-Roots_P Parameter: Tissue Value: Shoots
  misc_feature: MA Experiment ID: 20000573 Result: Down-regulated in Transcription
  misc_feature: MA Experiment 20000573 PARAMETER Experiment Name: At_100uM_ABA_Mutants__P Parameter: Organism Value: A. thaliana
  misc_feature: MA Experiment 20000573 PARAMETER Experiment Name: At_100uM_ABA_Mutants__P Parameter: Plant Line Value: CS22 vs. Ler wt
  misc_feature: MA Experiment 20000573 PARAMETER Experiment Name: At_100uM_ABA_Mutants__P Parameter: Timepoint (hr) Value: N/A
  misc_feature: MA Experiment 20000573 PARAMETER Experiment Name: At_100uM_ABA_Mutants__P Parameter: Tissue Value: Whole Plant
  misc_feature: MA Experiment 20000573 PARAMETER Experiment Name: At_100uM_ABA_Mutants__P Parameter: Treatment Value: None
  misc_feature: MA Experiment ID: 20000794 Result: Down-regulated in Transcription
  misc_feature: MA Experiment 20000794 PARAMETER Experiment Name: At_Petals_P Parameter: Age (day) Value: 23-25 days
  misc_feature: MA Experiment 20000794 PARAMETER Experiment Name: At_Petals_P Parameter: Plant Line Value: WS
  misc_feature: MA Experiment 20000794 PARAMETER Experiment Name: At_Petals_P Parameter: Tissue Value: Petals vs. Whole plant
  misc_feature: MA Experiment ID: 20001248 Result: Down-regulated in Transcription
  misc_feature: MA Experiment 20001248 PARAMETER Experiment Name: At_Far-red-induction_P Parameter: Age (day) Value: 7
  misc_feature: MA Experiment 20001248 PARAMETER Experiment Name: At_Far-red-induction_P Parameter: Light Value: Far-red vs. White
  misc_feature: MA Experiment 20001248 PARAMETER Experiment Name: At_Far-red-induction_P Parameter: Organism Value: A. thaliana
  misc_feature: MA Experiment 20001248 PARAMETER Experiment Name: At_Far-red-induction_P Parameter: Plant Line Value: Columbia
  misc_feature: MA Experiment 20001248 PARAMETER Experiment Name: At_Far-red-induction_P Parameter: Timepoint (hr) Value: 4
  misc_feature: MA Experiment 20001248 PARAMETER Experiment Name: At_Far-red-induction_P Parameter: Tissue Value: Whole Plant
  misc_feature: MA Experiment ID: 20001450 Result: Down-regulated in Transcription
  misc_feature: MA Experiment 20001450 PARAMETER Experiment Name: At_Far-red-induction_P Parameter: Age (day) Value: 7
  misc_feature: MA Experiment 20001450 PARAMETER Experiment Name: At_Far-red-induction_P Parameter: Light Value: Far-red vs. White
  misc_feature: MA Experiment 20001450 PARAMETER Experiment Name: At_Far-red-induction_P Parameter: Organism Value: A. thaliana
  misc_feature: MA Experiment 20001450 PARAMETER Experiment Name: At_Far-red-induction_P Parameter: Plant Line Value: Columbia
  misc_feature: MA Experiment 20001450 PARAMETER Experiment Name: At_Far-red-induction_P Parameter: Timepoint (hr) Value: 8
  misc_feature: MA Experiment 20001450 PARAMETER Experiment Name: At_Far-red-induction_P Parameter: Tissue Value: Whole Plant
atggagtcacggaagattaacctaatggcgacagcaatagctttaatagtggtggctatggtggtggcagctgctgatgataagacgaaagacaaggaggagtgtacggagcagctggtcggtatggccacgtgtcttccttacgtgcaaggacaagcaaaatctccgacgccagactgttgctccggtctcaaacaagttcttaattcaaacaagaagtgtctttgtgtgatcattcaagacaggaatgatcctgatttgggtctccagatcaacgtctctctagctctcgcacttccttctgtttgtcacgccgctgctgacgtcactaaatgccctgctttgcttcacttggatccgaattctccagatgcccaagtcttctaccagctagctaaaggtttaaacaaaaccggcccagcctctgctcccactggctcgtcccctggacctataagcatttctccgacttcaggatccgatgatggtaacaacagtggtcgaacgacctctgtgccaggcaggaaccacgctcaaagcttctataaacaatggctggggctcgaagttgtgttccatttcttcgtaattttttatattttcatcctcgtatag

SEQ ID NO: 89529 - protein, 204 aa, Arabidopsis thaliana
  peptide (1)..(204): Ceres Seq. ID no. 12719435
  misc_feature (35)..(112): Pfam Name: Protease inhibitor/seed storage/LTP family Pfam Description: Protease inhibitor/seed storage/LTP family
  misc_feature (1)..(204): Homolog of NCBI NO: 15224863 NR Description: unknown protein; protein id: At2g44300.1
  misc_feature (1)..(204): Homolog of NCBI NO: 15224862 NR Description: unknown protein; protein id: At2g44290.1
  misc_feature (111)..(204): Homolog of NCBI NO: 13122284 NR Description: non-specific lipid transfer protein (nLTP) like
  misc_feature (13)..(160): Homolog of NCBI NO: 34394084 NR Description: lipid transfer protein-like [Oryza sativa
  misc_feature (13)..(201): Homolog of NCBI NO: 18405294 NR Description: expressed protein; protein id: At1g55260.1, by cDNA: 13599., supported by cDNA: gi_15724271, supported by gi_19699113 [Arabidopsis thaliana] >gi|25354706|pir||E96594
  misc_feature (27)..(201): Homolog of NCBI NO: 21537387 NR Description: unknown [Arabidopsis thaliana]
  misc_feature (7)..(148): Homolog of NCBI NO: 15231070 NR Description: putative protein; protein id: At3g58550.1, by cDNA: 27380. [Arabidopsis thaliana] >gi|11357439|pir||T45675
  misc_feature (12)..(148): Homolog of NCBI NO: 21555220 NR Description: unknown [Arabidopsis thaliana]
  misc_feature (6)..(166): Homolog of NCBI NO: 21553541 NR Description: lipid transfer protein, putative [Arabidopsis
  misc_feature (6)..(166): Homolog of NCBI NO: 15217777 NR Description: lipid transfer protein, putative; protein id: supported by cDNA: 15027., supported by cDNA: gi_20260113
MESRKINLMATAIALIVVAMVVAAADDKTKDKEECTEQLVGMATCLPYVQGQAKSPTPDCCSGLKQVLNSNKKCLCVIIQDRNDPDLGLQINVSLALALPSVCHAAADVTKCPALLHLDPNSPDAQVFYQLAKGLNKTGPASAPTGSSPGPISISPTSGSDDGNNSGRTTSVPGRNHAQSFYKQWLGLEVVFHFFVIFYIFILV

SEQ ID NO: 89530 - protein, 196 aa, Arabidopsis thaliana
  peptide (1)..(196): Ceres Seq. ID no. 12719436
  misc_feature (27)..(104): Pfam Name: Protease inhibitor/seed storage/LTP family Pfam Description: Protease inhibitor/seed storage/LTP family
  misc_feature (1)..(196): Homolog of NCBI NO: 15224863 NR Description: unknown protein; protein id: At2g44300.1
  misc_feature (1)..(196): Homolog of NCBI NO: 15224862 NR Description: unknown protein; protein id: At2g44290.1
  misc_feature (103)..(196): Homolog of NCBI NO: 13122284 NR Description: non-specific lipid transfer protein (nLTP) like
  misc_feature (5)..(152): Homolog of NCBI NO: 34394084 NR Description: lipid transfer protein-like [Oryza sativa
  misc_feature (5)..(193): Homolog of NCBI NO: 18405294 NR Description: expressed protein; protein id: At1g55260.1, by cDNA: 13599., supported by cDNA: gi_15724271, supported by gi_19699113 [Arabidopsis thaliana] >gi|25354706|pir||E96594
  misc_feature (19)..(193): Homolog of NCBI NO: 21537387 NR Description: unknown [Arabidopsis thaliana]
  misc_feature (1)..(140): Homolog of NCBI NO: 15231070 NR Description: putative protein; protein id: At3g58550.1, by cDNA: 27380. [Arabidopsis thaliana] >gi|11357439|pir||T45675
  misc_feature (4)..(140): Homolog of NCBI NO: 21555220 NR Description: unknown [Arabidopsis thaliana]
  misc_feature (1)..(158): Homolog of NCBI NO: 21553541 NR Description: lipid transfer protein, putative [Arabidopsis
  misc_feature (1)..(158): Homolog of NCBI NO: 15217777 NR Description: lipid transfer protein, putative; protein id: supported by cDNA: 15027., supported by cDNA: gi_20260113
MATAIALIVVAMVVAAADDKTKDKEECTEQLVGMATCLPYVQGQAKSPTPDCCSGLKQVLNSNKKCLCVIIQDRNDPDLGLQINVSLALALPSVCHAAADVTKCPALLHLDPNSPDAQVFYQLAKGLNKTGPASAPTGSSPGPISISPTSGSDDGNNSGRTTSVPGRNHAQSFYKQWLGLEVVFHFFVIFYIFILV

SEQ ID NO: 89531 - protein, 185 aa, Arabidopsis thaliana
  peptide (1)..(185): Ceres Seq. ID no. 12719437
  misc_feature (16)..(93): Pfam Name: Protease inhibitor/seed storage/LTP family Pfam Description: Protease inhibitor/seed storage/LTP family
  misc_feature (1)..(185): Homolog of NCBI NO: 15224863 NR Description: unknown protein; protein id: At2g44300.1
  misc_feature (1)..(185): Homolog of NCBI NO: 15224862 NR Description: unknown protein; protein id: At2g44290.1
  misc_feature (92)..(185): Homolog of NCBI NO: 13122284 NR Description: non-specific lipid transfer protein (nLTP) like
  misc_feature (1)..(141): Homolog of NCBI NO: 34394084 NR Description: lipid transfer protein-like [Oryza sativa
  misc_feature (1)..(182): Homolog of NCBI NO: 18405294 NR Description: expressed protein; protein id: At1g55260.1, by cDNA: 13599., supported by cDNA: gi_15724271, supported by gi_19699113 [Arabidopsis thaliana] >gi|25354706|pir||E96594
  misc_feature (8)..(182): Homolog of NCBI NO: 21537387 NR Description: unknown [Arabidopsis thaliana]
  misc_feature (1)..(129): Homolog of NCBI NO: 15231070 NR Description: putative protein; protein id: At3g58550.1, by cDNA: 27380. [Arabidopsis thaliana] >gi|11357439|pir||T45675
  misc_feature (1)..(129): Homolog of NCBI NO: 21555220 NR Description: unknown [Arabidopsis thaliana]
  misc_feature (1)..(147): Homolog of NCBI NO: 21553541 NR Description: lipid transfer protein, putative [Arabidopsis
  misc_feature (1)..(147): Homolog of NCBI NO: 15217777 NR Description: lipid transfer protein, putative; protein id: supported by cDNA: 15027., supported by cDNA: gi_20260113
MVVAAADDKTKDKEECTEQLVGMATCLPYVQGQAKSPTPDCCSGLKQVLNSNKKCLCVIIQDRNDPDLGLQINVSLALALPSVCHAAADVTKCPALLHLDPNSPDAQVFYQLAKGLNKTGPASAPTGSSPGPISISPTSGSDDGNNSGRTTSVPGRNHAQSFYKQWLGLEVVFHFFVIFYIFILV

SEQ ID NO: 89532 - DNA, 1749 bp, Arabidopsis thaliana
  misc_feature (1)..(1749): Ceres Seq. ID no. 12719449
  misc_feature: MA Experiment ID: 20000180 Result: Down-regulated in Transcription
  misc_feature: MA Experiment 20000180 PARAMETER Experiment Name: At_Germinating_Seeds_P Parameter: Age (hr) Value: 24 vs. 0
  misc_feature: MA Experiment 20000180 PARAMETER Experiment Name: At_Germinating_Seeds_P Parameter: Tissue Value: Germinating Seeds
  misc_feature: MA Experiment ID: 20000234 Result: Up-regulated in Transcription
  misc_feature: MA Experiment 20000234 PARAMETER Experiment Name: At_Siliques_P Parameter: Age (day) Value: 21
  misc_feature: MA Experiment 20000234 PARAMETER Experiment Name: At_Siliques_P Parameter: Organism Value: A. thaliana
  misc_feature: MA Experiment 20000234 PARAMETER Experiment Name: At_Siliques_P Parameter: Plant Line Value: WS
  misc_feature: MA Experiment 20000234 PARAMETER Experiment Name: At_Siliques_P Parameter: Tissue Value: Less Than 5mm Siliques vs. Whole Plant
  misc_feature: MA Experiment ID: 20000235 Result: Up-regulated in Transcription
  misc_feature: MA Experiment 20000235 PARAMETER Experiment Name: At_Siliques_P Parameter: Age (day) Value: 21
  misc_feature: MA Experiment 20000235 PARAMETER Experiment Name: At_Siliques_P Parameter: Organism Value: A. thaliana
  misc_feature: MA Experiment 20000235 PARAMETER Experiment Name: At_Siliques_P Parameter: Plant Line Value: WS
  misc_feature: MA Experiment 20000235 PARAMETER Experiment Name: At_Siliques_P Parameter: Tissue Value: 5-10mm Siliques vs. Whole Plant
  misc_feature: MA Experiment ID: 20000264 Result: Up-regulated in Transcription
  misc_feature: MA Experiment 20000264 PARAMETER Experiment Name: At_Open_Flower_P Parameter: Age (day) Value: 21
  misc_feature: MA Experiment 20000264 PARAMETER Experiment Name: At_Open_Flower_P Parameter: Plant Line Value: WS
  misc_feature: MA Experiment 20000264 PARAMETER Experiment Name: At_Open_Flower_P Parameter: Tissue Value: Open Flower vs. Whole Plant
  misc_feature: MA Experiment ID: 20000286 Result: Up-regulated in Transcription
  misc_feature: MA Experiment 20000286 PARAMETER Experiment Name: At_Open_Flower_P Parameter: Age (day) Value: 21
  misc_feature: MA Experiment 20000286 PARAMETER Experiment Name: At_Open_Flower_P Parameter: Plant Line Value: WS
  misc_feature: MA Experiment 20000286 PARAMETER Experiment Name: At_Open_Flower_P Parameter: Tissue Value: Half Open vs. Whole Plant
  misc_feature: MA Experiment ID: 20000308 Result: Up-regulated in Transcription
  misc_feature: MA Experiment 20000308 PARAMETER Experiment Name: At_100mM_NaCl__P Parameter: Age (day) Value: 17
  misc_feature: MA Experiment 20000308 PARAMETER Experiment Name: At_100mM_NaCl__P Parameter: Organism Value: A. thaliana
  misc_feature: MA Experiment 20000308 PARAMETER Experiment Name: At_100mM_NaCl__P Parameter: Plant Line Value: WS
  misc_feature: MA Experiment 20000308 PARAMETER Experiment Name: At_100mM_NaCl__P Parameter: Timepoint (hr) Value: 72
  misc_feature: MA Experiment 20000308 PARAMETER Experiment Name: At_100mM_NaCl__P Parameter: Tissue Value: Whole Plant
  misc_feature: MA Experiment 20000308 PARAMETER Experiment Name: At_100mM_NaCl__P Parameter: Treatment Value: 100mM NaCl vs. No Treatment
  misc_feature: MA Experiment ID: 20000437 Result: Up-regulated in Transcription
  misc_feature: MA Experiment 20000437 PARAMETER Experiment Name: At_Drought_P Parameter: Age (day) Value: 8
  misc_feature: MA Experiment 20000437 PARAMETER Experiment Name: At_Drought_P Parameter: Organism Value: A. thaliana
  misc_feature: MA Experiment 20000437 PARAMETER Experiment Name: At_Drought_P Parameter: Plant Line Value: WS
  misc_feature: MA Experiment 20000437 PARAMETER Experiment Name: At_Drought_P Parameter: Timepoint (hr) Value: 24
  misc_feature: MA Experiment 20000437 PARAMETER Experiment Name: At_Drought_P Parameter: Tissue Value: Whole Plant
  misc_feature: MA Experiment 20000437 PARAMETER Experiment Name: At_Drought_P Parameter: Treatment Value: Drought vs. No Drought
  misc_feature: MA Experiment ID: 20000495 Result: Up-regulated in Transcription
  misc_feature: MA Experiment 20000495 PARAMETER Experiment Name: At_Guard_Cells_P Parameter: Harvest Date Value: 8/2/2002
  misc_feature: MA Experiment 20000495 PARAMETER Experiment Name: At_Guard_Cells_P Parameter: Organism Value: A. thaliana
  misc_feature: MA Experiment 20000495 PARAMETER Experiment Name: At_Guard_Cells_P Parameter: Tissue Value: Guard Cells vs. Leaves
  misc_feature: MA Experiment ID: 20000527 Result: Down-regulated in Transcription
  misc_feature: MA Experiment 20000527 PARAMETER Experiment Name: At_10percent_PEG_P Parameter: Age (day) Value: 20
  misc_feature: MA Experiment 20000527 PARAMETER Experiment Name: At_10percent_PEG_P Parameter: Organism Value: A. thaliana
  misc_feature: MA Experiment 20000527 PARAMETER Experiment Name: At_10percent_PEG_P Parameter: Plant Line Value: WS
  misc_feature: MA Experiment 20000527 PARAMETER Experiment Name: At_10percent_PEG_P Parameter: Timepoint (day) Value: 20
  misc_feature: MA Experiment 20000527 PARAMETER Experiment Name: At_10percent_PEG_P Parameter: Tissue Value: Whole Plant
  misc_feature: MA Experiment 20000527 PARAMETER Experiment Name: At_10percent_PEG_P Parameter: Treatment Value: 10percent PEG vs. No Treatment
  misc_feature: MA Experiment ID: 20000573 Result: Down-regulated in Transcription
  misc_feature: MA Experiment 20000573 PARAMETER Experiment Name: At_100uM_ABA_Mutants__P Parameter: Organism Value: A. thaliana
  misc_feature: MA Experiment 20000573 PARAMETER Experiment Name: At_100uM_ABA_Mutants__P Parameter: Plant Line Value: CS22 vs. Ler wt
  misc_feature: MA Experiment 20000573 PARAMETER Experiment Name: At_100uM_ABA_Mutants__P Parameter: Timepoint (hr) Value: N/A
  misc_feature: MA Experiment 20000573 PARAMETER Experiment Name: At_100uM_ABA_Mutants__P Parameter: Tissue Value: Whole Plant
  misc_feature: MA Experiment 20000573 PARAMETER Experiment Name: At_100uM_ABA_Mutants__P Parameter: Treatment Value: None
  misc_feature: MA Experiment ID: 20000574 Result: Down-regulated in Transcription
  misc_feature: MA Experiment 20000574 PARAMETER Experiment Name: At_100uM_ABA_Mutants__P Parameter: Organism Value: A. thaliana
  misc_feature: MA Experiment 20000574 PARAMETER Experiment Name: At_100uM_ABA_Mutants__P Parameter: Plant Line Value: CS23 vs. Ler wt
  misc_feature: MA Experiment 20000574 PARAMETER Experiment Name: At_100uM_ABA_Mutants__P Parameter: Timepoint (hr) Value: N/A
  misc_feature: MA Experiment 20000574 PARAMETER Experiment Name: At_100uM_ABA_Mutants__P Parameter: Tissue Value: Whole Plant
  misc_feature: MA Experiment 20000574 PARAMETER Experiment Name: At_100uM_ABA_Mutants__P Parameter: Treatment Value: None
  misc_feature: MA Experiment ID: 20000709 Result: Up-regulated in Transcription
  misc_feature: MA Experiment 20000709 PARAMETER Experiment Name: At_15mM_NH4NO3_L-to-H_P Parameter: Age (hr) Value: 14
  misc_feature: MA Experiment 20000709 PARAMETER Experiment Name: At_15mM_NH4NO3_L-to-H_P Parameter: Organism Value: A. thaliana
  misc_feature: MA Experiment 20000709 PARAMETER Experiment Name: At_15mM_NH4NO3_L-to-H_P Parameter: Plant Line Value: WS
  misc_feature: MA Experiment 20000709 PARAMETER Experiment Name: At_15mM_NH4NO3_L-to-H_P Parameter: Timepoint (hr) Value: 4
  misc_feature: MA Experiment 20000709 PARAMETER Experiment Name: At_15mM_NH4NO3_L-to-H_P Parameter: Tissue Value: Aerial
  misc_feature: MA Experiment 20000709 PARAMETER Experiment Name: At_15mM_NH4NO3_L-to-H_P Parameter: Treatment Value: 15mM NH4NO3 vs. 30mM Mannitol
  misc_feature: MA Experiment ID: 20001450 Result: Down-regulated in Transcription
  misc_feature: MA Experiment 20001450 PARAMETER Experiment Name: At_Far-red-induction_P Parameter: Age (day) Value: 7
  misc_feature: MA Experiment 20001450 PARAMETER Experiment Name: At_Far-red-induction_P Parameter: Light Value: Far-red vs. White
  misc_feature: MA Experiment 20001450 PARAMETER Experiment Name: At_Far-red-induction_P Parameter: Organism Value: A. thaliana
  misc_feature: MA Experiment 20001450 PARAMETER Experiment Name: At_Far-red-induction_P Parameter: Plant Line Value: Columbia
  misc_feature: MA Experiment 20001450 PARAMETER Experiment Name: At_Far-red-induction_P Parameter: Timepoint (hr) Value: 8
  misc_feature: MA Experiment 20001450 PARAMETER Experiment Name: At_Far-red-induction_P Parameter: Tissue Value: Whole Plant
  misc_feature: MA Experiment ID: 20001451 Result: Down-regulated in Transcription
  misc_feature: MA Experiment 20001451 PARAMETER Experiment Name: At_Far-red-induction_P Parameter: Age (day) Value: 7
  misc_feature: MA Experiment 20001451 PARAMETER Experiment Name: At_Far-red-induction_P Parameter: Light Value: Far-red vs. White
  misc_feature: MA Experiment 20001451 PARAMETER Experiment Name: At_Far-red-induction_P Parameter: Organism Value: A. thaliana
  misc_feature: MA Experiment 20001451 PARAMETER Experiment Name: At_Far-red-induction_P Parameter: Plant Line Value: Columbia
  misc_feature: MA Experiment 20001451 PARAMETER Experiment Name: At_Far-red-induction_P Parameter: Timepoint (hr) Value: 24
  misc_feature: MA Experiment 20001451 PARAMETER Experiment Name: At_Far-red-induction_P Parameter: Tissue Value: Whole Plant
  misc_feature: MA Experiment ID: 20001910 Result: Up-regulated in Transcription
  misc_feature: MA Experiment 20001910 PARAMETER Experiment Name: At_Drought_Reproduction_P Parameter: Age (day) Value: 37
  misc_feature: MA Experiment 20001910 PARAMETER Experiment Name: At_Drought_Reproduction_P Parameter: Organism Value: A. thaliana
  misc_feature: MA Experiment 20001910 PARAMETER Experiment Name: At_Drought_Reproduction_P Parameter: Plant Line Value: WS
  misc_feature: MA Experiment 20001910 PARAMETER Experiment Name: At_Drought_Reproduction_P Parameter: Timepoint (day) Value: 7
  misc_feature: MA Experiment 20001910 PARAMETER Experiment Name: At_Drought_Reproduction_P Parameter: Tissue Value: Flowers
  misc_feature: MA Experiment 20001910 PARAMETER Experiment Name: At_Drought_Reproduction_P Parameter: Treatment Value: Drought vs. No Drought
  misc_feature: MA Experiment ID: 20001911 Result: Up-regulated in Transcription
  misc_feature: MA Experiment 20001911 PARAMETER Experiment Name: At_Drought_Reproduction_P Parameter: Age (day) Value: 40
  misc_feature: MA Experiment 20001911 PARAMETER Experiment Name: At_Drought_Reproduction_P Parameter: Organism Value: A. thaliana
  misc_feature: MA Experiment 20001911 PARAMETER Experiment Name: At_Drought_Reproduction_P Parameter: Plant Line Value: WS
  misc_feature: MA Experiment 20001911 PARAMETER Experiment Name: At_Drought_Reproduction_P Parameter: Timepoint (day) Value: 10
  misc_feature: MA Experiment 20001911 PARAMETER Experiment Name: At_Drought_Reproduction_P Parameter: Tissue Value: Flowers
  misc_feature: MA Experiment 20001911 PARAMETER Experiment Name: At_Drought_Reproduction_P Parameter: Treatment Value: Drought vs. No Drought
atgaagatgcattttttcatcctccttgtaataacctcatggttgtcggagaaaattacttcacttcctcctgattctcgagtattcgatcgtcatggttttcccgataattttgtttttggaacagctgcatcagcttttcagtacgaaggtgcaacaagcgaaggtgggaaatctccatctatatgggattacttcagccacacttttccagaaagaaccagaatgcagaatgcagatgtagcggtcgatttttaccatcgttataaggatgacatcaagttgatgaaagagctaaatatggacgctttcagattttcgatttcgtgggctagattaatacccagtggaaaagtaaaagatggagtaaacaaagaaggtgtagaattctataaggctcttatcgacgagcttgttgctaatggcattgaaccatcgatgaccctctaccattgggaccatcctcaatcactggaagacgagtatggtggtttcttaagccctcaaatagtagaagattttcgagatttttcaagagtgtgttttgaagaattcggagacaaagttaagatgtggactactataaacgagccttatgtcataactgttgcgggctacgacactggcaacaaagcggttggacgatgctcgaaatgggtgaatagtaagtgtcaaggtggcgattcaggtactgagccttacattgcatcacatcaccttcttctcgctcatgccgcagctgtacaagagttccgaaaatgtaacaagactcaagacggtcagattgggatagtgttatctcctttgtggtttgagccttacgactctgcttctcctgccgacaacgaagctgttaaacgagctcttgccactgaactagattggcatttagatccagttattcacggagattatccagaaatgatgaagaaacttgccggaaatagattaccttcgttcactccagaacaatccaaaatgttgaaaaattcatcggatttcattggaataaactactatacagcgcgttacgttgctcatattccacaagccgatcctgctcgtccgcgattcgtaaccgatcatcagctccaatggcgagtaacaaatcacagtaatcaccaattcggaccaggggaagatcgaggcatacttcaatcacatcctgaaggtttacgaaaagttcttaactacatcaaagataaatacaacaaccctatagtttatatcaaagagaacggaattaatgactacgacgacggtacaaaatcacgagaggagattctcaatgatacatttaggataagctaccatgaggaccatctccaacaactccaaaaagctataatagaggatgggtgtgacgtccgaggatattacgtgtggtctttactagacaatttcgagtgggaacatggatattctactagatttggcgtgtactatgttgactacgacaacgatctcactcgtattcccaaagattccgttaactggttcaagcagttcctcgatgtaaagaataaagaaatatgggatgtgtcacataaagaaaggtataataagacttttgatgatgtagaaagtttcgaggcatctgttggttcgattctctatctcatgacgaacaacatatcgaggagagaagaggaagaaagagatcaatgcgcttttgggaatcttaatgatcagtccggtctgttgttggaatcatataattctttcggatttttagaaaacgtttggtga

SEQ ID NO: 89533 - protein, 582 aa, Arabidopsis thaliana
  peptide (1)..(582): Ceres Seq. ID no. 12719450
  misc_feature (1)..(577): Homolog of NCBI NO: 7435454 NR Description: beta-glucosidase homolog At2g44470 [imported] -
  misc_feature (5)..(575): Homolog of NCBI NO: 15232262 NR Description: glycosyl hydrolase family 1, beta-glucosidase; id: At3g60140.1, supported by cDNA: gi_10834547 [Arabidopsis
  misc_feature (5)..(575): Homolog of NCBI NO: 10834548 NR Description: beta-glucosidase [Arabidopsis thaliana]
  misc_feature (1)..(450): Homolog of NCBI NO: 30689724 NR Description: glycosyl hydrolase family 1 [Arabidopsis thaliana]
  misc_feature (7)..(509): Homolog of NCBI NO: 22327030 NR Description: glycosyl hydrolase family 1; protein id:
  misc_feature (7)..(509): Homolog of NCBI NO: 15238569 NR Description: glycosyl hydrolase family 1; protein id:
  misc_feature (7)..(509): Homolog of NCBI NO: 10177855 NR Description: beta-glucosidase [Arabidopsis thaliana]
  misc_feature (6)..(504): Homolog of NCBI NO: 38344468 NR Description: OSJNBa0022H21.3 [Oryza sativa (japonica
  misc_feature (29)..(522): Homolog of NCBI NO: 25404995 NR Description: protein T4O12.15 [imported] - Arabidopsis >gi|8778810|gb|AAF26759.2|AC007396_8 T4O12.15 [Arabidopsis
  misc_feature (20)..(539): Homolog of NCBI NO: 30685472 NR Description: glycosyl hydrolase family 1 [Arabidopsis thaliana]
MKMHFFILLVITSWLSEKITSLPPDSRVFDRHGFPDNFVFGTAASAFQYEGATSEGGKSPSIWDYFSHTFPERTRMQNADVAVDFYHRYKDDIKLMKELNMDAFRFSISWARLIPSGKVKDGVNKEGVEFYKALIDELVANGIEPSMTLYHWDHPQSLEDEYGGFLSPQIVEDFRDFSRVCFEEFGDKVKMWTTINEPYVITVAGYDTGNKAVGRCSKWVNSKCQGGDSGTEPYIASHHLLLAHAAAVQEFRKCNKTQDGQIGIVLSPLWFEPYDSASPADNEAVKRALATELDWHLDPVIHGDYPEMMKKLAGNRLPSFTPEQSKMLKNSSDFIGINYYTARYVAHIPQADPARPRFVTDHQLQWRVTNHSNHQFGPGEDRGILQSHPEGLRKVLNYIKDKYNNPIVYIKENGINDYDDGTKSREEILNDTFRISYHEDHLQQLQKAIIEDGCDVRGYYVWSLLDNFEWEHGYSTRFGVYYVDYDNDLTRIPKDSVNWFKQFLDVKNKEIWDVSHKERYNKTFDDVESFEASVGSILYLMTNNISRREEEERDQCAFGNLNDQSGLLLESYNSFGFLENVW

SEQ ID NO: 89534 - protein, 580 aa, Arabidopsis thaliana
  peptide (1)..(580): Ceres Seq. ID no. 12719451
  misc_feature (1)..(575): Homolog of NCBI NO: 7435454 NR Description: beta-glucosidase homolog At2g44470 [imported] -
  misc_feature (3)..(573): Homolog of NCBI NO: 15232262 NR Description: glycosyl hydrolase family 1, beta-glucosidase; id: At3g60140.1, supported by cDNA: gi_10834547 [Arabidopsis
  misc_feature (3)..(573): Homolog of NCBI NO: 10834548 NR Description: beta-glucosidase [Arabidopsis thaliana]
  misc_feature (1)..(448): Homolog of NCBI NO: 30689724 NR Description: glycosyl hydrolase family 1 [Arabidopsis thaliana]
  misc_feature (5)..(507): Homolog of NCBI NO: 22327030 NR Description: glycosyl hydrolase family 1; protein id:
  misc_feature (5)..(507): Homolog of NCBI NO: 15238569 NR Description: glycosyl hydrolase family 1; protein id:
  misc_feature (5)..(507): Homolog of NCBI NO: 10177855 NR Description: beta-glucosidase [Arabidopsis thaliana]
  misc_feature (4)..(502): Homolog of NCBI NO: 38344468 NR Description: OSJNBa0022H21.3 [Oryza sativa (japonica
  misc_feature (27)..(520): Homolog of NCBI NO: 25404995 NR Description: protein T4O12.15 [imported] - Arabidopsis >gi|8778810|gb|AAF26759.2|AC007396_8 T4O12.15 [Arabidopsis
  misc_feature (18)..(537): Homolog of NCBI NO: 30685472 NR Description: glycosyl hydrolase family 1 [Arabidopsis thaliana]
MHFFILLVITSWLSEKITSLPPDSRVFDRHGFPDNFVFGTAASAFQYEGATSEGGKSPSIWDYFSHTFPERTRMQNADVAVDFYHRYKDDIKLMKELNMDAFRFSISWARLIPSGKVKDGVNKEGVEFYKALIDELVANGIEPSMTLYHWDHPQSLEDEYGGFLSPQIVEDFRDFSRVCFEEFGDKVKMWTTINEPYVITVAGYDTGNKAVGRCSKWVNSKCQGGDSGTEPYIASHHLLLAHAAAVQEFRKCNKTQDGQIGIVLSPLWFEPYDSASPADNEAVKRALATELDWHLDPVIHGDYPEMMKKLAGNRLPSFTPEQSKMLKNSSDFIGINYYTARYVAHIPQADPARPRFVTDHQLQWRVTNHSNHQFGPGEDRGILQSHPEGLRKVLNYIKDKYNNPIVYIKENGINDYDDGTKSREEILNDTFRISYHEDHLQQLQKAIIEDGCDVRGYYVWSLLDNFEWEHGYSTRFGVYYVDYDNDLTRIPKDSVNWFKQFLDVKNKEIWDVSHKERYNKTFDDVESFEASVGSILYLMTNNISRREEEERDQCAFGNLNDQSGLLLESYNSFGFLENVW

SEQ ID NO: 89535 - protein, 507 aa, Arabidopsis thaliana
  peptide (1)..(507): Ceres Seq. ID no. 12719452
  misc_feature (1)..(502): Homolog of NCBI NO: 7435454 NR Description: beta-glucosidase homolog At2g44470 [imported] -
  misc_feature (1)..(500): Homolog of NCBI NO: 15232262 NR Description: glycosyl hydrolase family 1, beta-glucosidase; id: At3g60140.1, supported by cDNA: gi_10834547 [Arabidopsis
  misc_feature (1)..(500): Homolog of NCBI NO: 10834548 NR Description: beta-glucosidase [Arabidopsis thaliana]
  misc_feature (1)..(375): Homolog of NCBI NO: 30689724 NR Description: glycosyl hydrolase family 1 [Arabidopsis thaliana]
  misc_feature (1)..(434): Homolog of NCBI NO: 22327030 NR Description: glycosyl hydrolase family 1; protein id:
  misc_feature (1)..(434): Homolog of NCBI NO: 15238569 NR Description: glycosyl hydrolase family 1; protein id:
  misc_feature (1)..(434): Homolog of NCBI NO: 10177855 NR Description: beta-glucosidase [Arabidopsis thaliana]
  misc_feature (1)..(429): Homolog of NCBI NO: 38344468 NR Description: OSJNBa0022H21.3 [Oryza sativa (japonica
  misc_feature (1)..(447): Homolog of NCBI NO: 25404995 NR Description: protein T4O12.15 [imported] - Arabidopsis >gi|8778810|gb|AAF26759.2|AC007396_8 T4O12.15 [Arabidopsis
  misc_feature (1)..(464): Homolog of NCBI NO: 30685472 NR Description: glycosyl hydrolase family 1 [Arabidopsis thaliana]
MQNADVAVDFYHRYKDDIKLMKELNMDAFRFSISWARLIPSGKVKDGVNKEGVEFYKALIDELVANGIEPSMTLYHWDHPQSLEDEYGGFLSPQIVEDFRDFSRVCFEEFGDKVKMWTTINEPYVITVAGYDTGNKAVGRCSKWVNSKCQGGDSGTEPYIASHHLLLAHAAAVQEFRKCNKTQDGQIGIVLSPLWFEPYDSASPADNEAVKRALATELDWHLDPVIHGDYPEMMKKLAGNRLPSFTPEQSKMLKNSSDFIGINYYTARYVAHIPQADPARPRFVTDHQLQWRVTNHSNHQFGPGEDRGILQSHPEGLRKVLNYIKDKYNNPIVYIKENGINDYDDGTKSREEILNDTFRISYHEDHLQQLQKAIIEDGCDVRGYYVWSLLDNFEWEHGYSTRFGVYYVDYDNDLTRIPKDSVNWFKQFLDVKNKEIWDVSHKERYNKTFDDVESFEASVGSILYLMTNNISRREEEERDQCAFGNLNDQSGLLLESYNSFGFLENVW

SEQ ID NO: 89536 - DNA, 1743 bp, Arabidopsis thaliana
  misc_feature (1)..(1743): Ceres Seq. ID no. 12719453
atgaacgttcaaattttcatcctccttttgataatctcatggcttacaccgaagattacttctcttcctcctgaatctcaagtccttgatcgaagtagttttcctgatgattttgttttcggaaccgctatatcggcctttcagagcgaaggtgcaacaagcgaaggtggaaaatcgccaactatttgggattacttcagccacacctttccagaaagaaccaatatgcagaatgcagatgtagccgtcgatttttaccatcgttataaggatgacatcaaattgatagaagagctaaatgtggacgctttcagattttcgatttcgtgggccagattaatacccagtggaaaggtaaaggatggagtaaacaaagaaggtgtacaattctacaaggctctcatagacgagcttattgctaatggcattcaaccttcggtgactctctatcattgggaccatcctcaagctcttgaggacgagtatggtggttttttaaaccctcaaataatagaagattttcgaaattttgcaagagtttgttttgaaaatttcggagacaaagttaagatgtggacaacaatcaacgagccttatgttataagtgttgcgggctacgacacgggcatcaaagcggttggacggtgctcgaaatgggtgaatagtcggtgtcaagccggtgactcggccatcgagccttacattgtatcacatcaccttcttctttcccatgctgcggcagtacaagagttccgaaattgtaacaagactttacaagatggtaagattgggatagtgatatctccttggtggcttgagccttacgactctacatcgtctgctgacaaagaagccgttgaacgaggccttcccttagaactagagtggcatttaaatccggtgatttacggagattatcctgaaacaatgaaaaagcatgtcggaaatagattacctgctttcacaccagaacaatcaaagatgttaataaattcatcagatttcattggagtaaactattatagcatacacttcaccgctcatctccctcatatcgatcatactcgacctcgattcagaactgatcaccattttgagaagaaatgtaaggatgatcgaggcaaaattcactcgcatccagaaggtttgcgaagagttctgaactatatcaaagataaatacaataaccctatcgtctatgtaaaagagaatggaatagatcactacgatgatggtacaaaatcgcgggaaacaattctcaaggacacatttaggataagctaccatcaggaccatcttaaacaagttcacaaagctataatagaggatgggtgtgatgttagaggatattacgtgtggtctttattcgacaacttcgagtgggagcatggatataattctagattcggtatgtactatgttgacttcaaaaacaatctccaacggtatcctaaagattccgtcaactggttcaagaaattcctcagtagaccggtggtaagaagtgaagaaacagaggatgaaaaagtatgcaatgtgtcacgcaaggaagaaaaaattaataaggctttggatgtctcagagggtttcaagacttcagttgattctattgtcaatctcatcaaaaacggatcgagaatagaagaagaagatgatgaagaagagagagatttctgtgcttttaagaatcataatgatcagttgggtttctttctgaagctacagaactcattgggattctag

SEQ ID NO: 89537 - protein, 580 aa, Arabidopsis thaliana
  peptide (1)..(580): Ceres Seq. ID no. 12719454
  misc_feature (1)..(441): Homolog of NCBI NO: 30689724 NR Description: glycosyl hydrolase family 1 [Arabidopsis thaliana]
  misc_feature (1)..(580): Homolog of NCBI NO: 7435453 NR Description: probable beta-glucosidase At2g44460 [imported] -
  misc_feature (1)..(580): Homolog of NCBI NO: 30689721 NR Description: glycosyl hydrolase family 1 [Arabidopsis thaliana]
  misc_feature (6)..(580): Homolog of NCBI NO: 15232262 NR Description: glycosyl hydrolase family 1, beta-glucosidase; id: At3g60140.1, supported by cDNA: gi_10834547 [Arabidopsis
  misc_feature (6)..(580): Homolog of NCBI NO: 10834548 NR Description: beta-glucosidase [Arabidopsis thaliana]
  misc_feature (3)..(497): Homolog of NCBI NO: 15238569 NR Description: glycosyl hydrolase family 1; protein id:
  misc_feature (3)..(497): Homolog of NCBI NO: 22327030 NR Description: glycosyl hydrolase family 1; protein id:
  misc_feature (3)..(497): Homolog of NCBI NO: 10177855 NR Description: beta-glucosidase [Arabidopsis thaliana]
  misc_feature (20)..(495): Homolog of NCBI NO: 30685472 NR Description: glycosyl hydrolase family 1 [Arabidopsis thaliana]
  misc_feature (20)..(495): Homolog of NCBI NO: 7435455 NR Description: probable beta-glucosidase At2g32860 [imported] -
MNVQIFILLLIISWLTPKITSLPPESQVLDRSSFPDDFVFGTAISAFQSEGATSEGGKSPTIWDYFSHTFPERTNMQNADVAVDFYHRYKDDIKLIEELNVDAFRFSISWARLIPSGKVKDGVNKEGVQFYKALIDELIANGIQPSVTLYHWDHPQALEDEYGGFLNPQIIEDFRNFARVCFENFGDKVKMWTTINEPYVISVAGYDTGIKAVGRCSKWVNSRCQAGDSAIEPYIVSHHLLLSHAAAVQEFRNCNKTLQDGKIGIVISPWWLEPYDSTSSADKEAVERGLPLELEWHLNPVIYGDYPETMKKHVGNRLPAFTPEQSKMLINSSDFIGVNYYSIHFTAHLPHIDHTRPRFRTDHHFEKKCKDDRGKIHSHPEGLRRVLNYIKDKYNNPIVYVKENGIDHYDDGTKSRETILKDTFRISYHQDHLKQVHKAIIEDGCDVRGYYVWSLFDNFEWEHGYNSRFGMYYVDFKNNLQRYPKDSVNWFKKFLSRPVVRSEETEDEKVCNVSRKEEKINKALDVSEGFKTSVDSIVNLIKNGSRIEEEDDEEERDFCAFKNHNDQLGFFLKLQNSLGF

SEQ ID NO: 89538 - protein, 505 aa, Arabidopsis thaliana
  peptide (1)..(505): Ceres Seq. ID no. 12719455
  misc_feature (1)..(366): Homolog of NCBI NO: 30689724 NR Description: glycosyl hydrolase family 1 [Arabidopsis thaliana]
  misc_feature (1)..(505): Homolog of NCBI NO: 7435453 NR Description: probable beta-glucosidase At2g44460 [imported] -
  misc_feature (1)..(505): Homolog of NCBI NO: 30689721 NR Description: glycosyl hydrolase family 1 [Arabidopsis thaliana]
  misc_feature (1)..(505): Homolog of NCBI NO: 15232262 NR Description: glycosyl hydrolase family 1, beta-glucosidase; id: At3g60140.1, supported by cDNA: gi_10834547 [Arabidopsis
  misc_feature (1)..(505): Homolog of NCBI NO: 10834548 NR Description: beta-glucosidase [Arabidopsis thaliana]
  misc_feature (1)..(422): Homolog of NCBI NO: 15238569 NR Description: glycosyl hydrolase family 1; protein id:
  misc_feature (1)..(422): Homolog of NCBI NO: 22327030 NR Description: glycosyl hydrolase family 1; protein id:
  misc_feature (1)..(422): Homolog of NCBI NO: 10177855 NR Description: beta-glucosidase [Arabidopsis thaliana]
  misc_feature (1)..(420): Homolog of NCBI NO: 30685472 NR Description: glycosyl hydrolase family 1 [Arabidopsis thaliana]
  misc_feature (1)..(420): Homolog of NCBI NO: 7435455 NR Description: probable beta-glucosidase At2g32860 [imported] -
MQNADVAVDFYHRYKDDIKLIEELNVDAFRFSISWARLIPSGKVKDGVNKEGVQFYKALIDELIANGIQPSVTLYHWDHPQALEDEYGGFLNPQIIEDFRNFARVCFENFGDKVKMWTTINEPYVISVAGYDTGIKAVGRCSKWVNSRCQAGDSAIEPYIVSHHLLLSHAAAVQEFRNCNKTLQDGKIGIVISPWWLEPYDSTSSADKEAVERGLPLELEWHLNPVIYGDYPETMKKHVGNRLPAFTPEQSKMLINSSDFIGVNYYSIHFTAHLPHIDHTRPRFRTDHHFEKKCKDDRGKIHSHPEGLRRVLNYIKDKYNNPIVYVKENGIDHYDDGTKSRETILKDTFRISYHQDHLKQVHKAIIEDGCDVRGYYVWSLFDNFEWEHGYNSRFGMYYVDFKNNLQRYPKDSVNWFKKFLSRPVVRSEETEDEKVCNVSRKEEKINKALDVSEGFKTSVDSIVNLIKNGSRIEEEDDEEERDFCAFKNHNDQLGFFLKLQNSLGF

SEQ ID NO: 89539 - protein, 390 aa, Arabidopsis thaliana; identical to SEQ ID NO: 75520
  peptide (1)..(390): Ceres Seq. ID no. 12719456
  misc_feature (1)..(251): Homolog of NCBI NO: 30689724 NR Description: glycosyl hydrolase family 1 [Arabidopsis thaliana]
  misc_feature (1)..(390): Homolog of NCBI NO: 7435453 NR Description: probable beta-glucosidase At2g44460 [imported] -
  misc_feature (1)..(390): Homolog of NCBI NO: 30689721 NR Description: glycosyl hydrolase family 1 [Arabidopsis thaliana]
  misc_feature (1)..(390): Homolog of NCBI NO: 15232262 NR Description: glycosyl hydrolase family 1, beta-glucosidase; id: At3g60140.1, supported by cDNA: gi_10834547 [Arabidopsis
  misc_feature (1)..(390): Homolog of NCBI NO: 10834548 NR Description: beta-glucosidase [Arabidopsis thaliana]
  misc_feature (1)..(307): Homolog of NCBI NO: 15238569 NR Description: glycosyl hydrolase family 1; protein id:
  misc_feature (1)..(307): Homolog of NCBI NO: 22327030 NR Description: glycosyl hydrolase family 1; protein id:
  misc_feature (1)..(307): Homolog of NCBI NO: 10177855 NR Description: beta-glucosidase [Arabidopsis thaliana]
  misc_feature (1)..(305): Homolog of NCBI NO: 30685472 NR Description: glycosyl hydrolase family 1 [Arabidopsis thaliana]
  misc_feature (1)..(305): Homolog of NCBI NO: 7435455 NR Description: probable beta-glucosidase At2g32860 [imported] -

SEQ ID NO: 89540 - DNA, 1463 bp, Arabidopsis thaliana
  misc_feature (1)..(1463): Ceres Seq. ID no. 12719461
  misc_feature: MA Experiment ID: 108464 Result: Down-regulated in Transcription
  misc_feature: MA Experiment 108464 PARAMETER Experiment Name: At_Germinating_Seeds_cDNA_P Parameter: Age (day) Value: 4 vs. 0
  misc_feature: MA Experiment 108464 PARAMETER Experiment Name: At_Germinating_Seeds_cDNA_P Parameter: Tissue Value: Germinating Seeds
  misc_feature: MA Experiment ID: 108569 Result: Up-regulated in Transcription
  misc_feature: MA Experiment 108569 PARAMETER Experiment Name: At_0.001%_MeJA__cDNA_P Parameter: Timepoint (hr) Value: 6
  misc_feature: MA Experiment 108569 PARAMETER Experiment Name: At_0.001%_MeJA__cDNA_P Parameter: Tissue Value: Aerial
  misc_feature: MA Experiment 108569 PARAMETER Experiment Name: At_0.001%_MeJA__cDNA_P Parameter: Treatment Value: 0.001% MeJA vs. No Treatment
  misc_feature: MA Experiment ID: 108573 Result: Up-regulated in Transcription
  misc_feature: MA Experiment 108573 PARAMETER Experiment Name: At_Drought_cDNA_P Parameter: Timepoint (hr) Value: 6
  misc_feature: MA Experiment 108573 PARAMETER Experiment Name: At_Drought_cDNA_P Parameter: Tissue Value: Aerial
  misc_feature: MA Experiment 108573 PARAMETER Experiment Name: At_Drought_cDNA_P Parameter: Treatment Value: Drought vs. No Drought
  misc_feature: MA Experiment ID: 108585 Result: Up-regulated in Transcription
  misc_feature: MA Experiment 108585 PARAMETER Experiment Name: At_5mM_NaNP_cDNA_P Parameter: Timepoint (hr) Value: 6
  misc_feature: MA Experiment 108585 PARAMETER Experiment Name: At_5mM_NaNP_cDNA_P Parameter: Tissue Value: Aerial
  misc_feature: MA Experiment 108585 PARAMETER Experiment Name: At_5mM_NaNP_cDNA_P Parameter: Treatment Value: null
  misc_feature: MA Experiment ID: 108595 Result: Down-regulated in Transcription
  misc_feature: MA Experiment 108595 PARAMETER Experiment Name: At_Ler-pi_Ovule_cDNA_P Parameter: Plant Line Value: null
gttcatatgatgaagaagtttctctcgttctcctccaacgcgtagaaaattctgacggcttaacgatgtggcgaagatctgttgtttatcgtttctcttcaagaatctctgtttcttcttcgttaccaaaccctagactgattccttggtcccgcgaattatgtgccgttaatagcttctcccagcctccggtctcgacggaatcaactgctaagttagggatcactggtgttagatctgatgccaatcgagtttttgccactgctactgccgccgctacagctacagctaccaccggtgagatttcgtctagagttgcggctttggctggattagggcatcactacgctcgttgttattgggagctttctaaagctaaacttagtatgcttgtggttgcaacttctggaactgggtatattctgggtacgggaaatgctgcaattagcttcccggggctttgttacacatgtgcaggaaccatgatgattgctgcatctgctaattccttgaatcagatttttgagataagcaatgattctaagatgaaaagaacgatgctaaggccattgccttcaggacgtattagtgttccacacgctgttgcatgggctactattgctggtgcttctggtgcttgtttgttggccagcaagactaatatgttggctgctggacttgcatctgccaatcttgtactttatgcgtttgtttatactccgttgaagcaacttcaccctatcaatacatgggttggcgctgttgttggtgctatcccacccttgcttgggtgggcggcagcgtctggtcagatttcatacaattcgatgattcttccagctgctctttacttttggcagatacctcattttatggcccttgcacatctctgccgcaatgattatgcagctggaggttacaagatgttgtcactctttgatccgtcagggaagagaatagcagcagtggctctaaggaactgcttttacatgatccctctcggtttcatcgcctatgactgggggttaacctcaagttggttttgcctcgaatcaacacttctcacactagcaatcgctgcaacagcattttcattctaccgagaccggaccatgcataaagcaaggaaaatgttccatgccagtcttctcttccttcctgttttcatgtctggtcttcttctacaccgtgtctctaatgataatcagcaacaactcgtagaagaagccggattaacaaattctgtatctggtgaagtcaaaactcagaggcgaaagaaacgtgtggctcaacctccggtggcttatgcctctgctgcaccgtttcctttcctcccagctccttccttctactctccatgataacctttaagcaagctattgaatttttggaaacagaaattaaaaaaaaaatctgaaaagttcttaagtttaatctttggttaataatgaagtggagaacgc

SEQ ID NO: 89541 - protein, 452 aa, Arabidopsis thaliana
  peptide (1)..(452): Ceres Seq. ID no. 12719462
  misc_feature (128)..(396): Pfam Name: UbiA prenyltransferase family Pfam Description: UbiA prenyltransferase family
  misc_feature (1)..(452): Homolog of NCBI NO: 7485006 NR Description: heme A farnesyltransferase homolog F16B22.1 -
  misc_feature (22)..(452): Homolog of NCBI NO: 18406556 NR Description: putative heme A:farnesyltransferase; protein id: supported by cDNA: gi_15028298, supported by cDNA: gi_21280972 thaliana] >gi|15028299|gb|AAK76626.1| putative heme
  misc_feature (22)..(452): Homolog of NCBI NO: 25408912 NR Description: probable heme A farnesyltransferase [imported] -
  misc_feature (22)..(451): Homolog of NCBI NO: 34913400 NR Description: putative heme A farnesyltransferase homolog
  misc_feature (122)..(389): Homolog of NCBI NO: 30410008 NR Description: RIKEN cDNA 2410004F01 [Mus musculus]
  misc_feature (82)..(404): Homolog of NCBI NO: 19112823 NR Description: cytochrome c oxidase assembly protein cox10 [Schizosaccharomyces pombe] >gi|7490416|pir||T40309 cytochrome c
  misc_feature (121)..(389): Homolog of NCBI NO: 20141419 NR Description: Protoheme IX farnesyltransferase, mitochondrial (Heme O synthase) >gi|2138300|gb|AAC51330.1| heme A: [Homo sapiens] >gi|12652629|gb|AAH00060.1|AAH00060 COX10 (yeast)
  misc_feature (121)..(389): Homolog of NCBI NO: 30584237 NR Description: Homo sapiens COX10 homolog, cytochrome c oxidase protein, heme A: farnesyltransferase (yeast) [synthetic
  misc_feature (122)..(389): Homolog of NCBI NO: 17921982 NR Description: heme A:farnesyltransferase; COX10 (yeast) cytochrome c oxidase assembly protein (heme A: cytochrome c oxidase subunit X; cytochrome c oxidase assembly
  misc_feature (119)..(413): Homolog of NCBI NO: 19921064 NR Description: CG5037-PA [Drosophila melanogaster]
SYDEEVSLVLLQRVENSDGLTMWRRSVVYRFSSRISVSSSLPNPRLIPWSRELCAVNSFSQPPVSTESTAKLGITGVRSDANRVFATATAAATATATTGEISSRVAALAGLGHHYARCYWELSKAKLSMLVVATSGTGYILGTGNAAISFPGLCYTCAGTMMIAASANSLNQIFEISNDSKMKRTMLRPLPSGRISVPHAVAWATIAGASGACLLASKTNMLAAGLASANLVLYAFVYTPLKQLHPINTWVGAVVGAIPPLLGWAAASGQISYNSMILPAALYFWQIPHFMALAHLCRNDYAAGGYKMLSLFDPSGKRIAAVALRNCFYMIPLGFIAYDWGLTSSWFCLESTLLTLAIAATAFSFYRDRTMHKARKMFHASLLFLPVFMSGLLLHRVSNDNQQQLVEEAGLTNSVSGEVKTQRRKKRVAQPPVAYASAAPFPFLPAPSFYSP

SEQ ID NO: 89542 - protein, 431 aa, Arabidopsis thaliana
  peptide (1)..(431): Ceres Seq. ID no. 12719463
  misc_feature (107)..(375): Pfam Name: UbiA prenyltransferase family Pfam Description: UbiA prenyltransferase family
  misc_feature (1)..(431): Homolog of NCBI NO: 7485006 NR Description: heme A farnesyltransferase homolog F16B22.1 -
  misc_feature (1)..(431): Homolog of NCBI NO: 18406556 NR Description: putative heme A:farnesyltransferase; protein id: supported by cDNA: gi_15028298, supported by cDNA: gi_21280972 thaliana] >gi|15028299|gb|AAK76626.1| putative heme
  misc_feature (1)..(431): Homolog of NCBI NO: 25408912 NR Description: probable heme A farnesyltransferase [imported] -
  misc_feature (1)..(430): Homolog of NCBI NO: 34913400 NR Description: putative heme A farnesyltransferase homolog
  misc_feature (101)..(368): Homolog of NCBI NO: 30410008 NR Description: RIKEN cDNA 2410004F01 [Mus musculus]
  misc_feature (61)..(383): Homolog of NCBI NO: 19112823 NR Description: cytochrome c oxidase assembly protein cox10 [Schizosaccharomyces pombe] >gi|7490416|pir||T40309 cytochrome c
  misc_feature (100)..(368): Homolog of NCBI NO: 20141419 NR Description: Protoheme IX farnesyltransferase, mitochondrial (Heme O synthase) >gi|2138300|gb|AAC51330.1| heme A: [Homo sapiens] >gi|12652629|gb|AAH00060.1|AAH00060 COX10 (yeast)
  misc_feature (100)..(368): Homolog of NCBI NO: 30584237 NR Description: Homo sapiens COX10 homolog, cytochrome c oxidase protein, heme A: farnesyltransferase (yeast) [synthetic
  misc_feature (101)..(368): Homolog of NCBI NO: 17921982 NR Description: heme A:farnesyltransferase; COX10 (yeast) cytochrome c oxidase assembly protein (heme A: cytochrome c oxidase subunit X; cytochrome c oxidase assembly
  misc_feature (98)..(392): Homolog of NCBI NO: 19921064 NR Description: CG5037-PA [Drosophila melanogaster]
MWRRSVVYRFSSRISVSSSLPNPRLIPWSRELCAVNSFSQPPVSTESTAKLGITGVRSDANRVFATATAAATATATTGEISSRVAALAGLGHHYARCYWELSKAKLSMLVVATSGTGYILGTGNAAISFPGLCYTCAGTMMIAASANSLNQIFEISNDSKMKRTMLRPLPSGRISVPHAVAWATIAGASGACLLASKTNMLAAGLASANLVLYAFVYTPLKQLHPINTWVGAVVGAIPPLLGWAAASGQISYNSMILPAALYFWQIPHFMALAHLCRNDYAAGGYKMLSLFDPSGKRIAAVALRNCFYMIPLGFIAYDWGLTSSWFCLESTLLTLAIAATAFSFYRDRTMHKARKMFHASLLFLPVFMSGLLLHRVSNDNQQQLVEEAGLTNSVSGEVKTQRRKKRVAQPPVAYASAAPFPFLPAPSFYSP

SEQ ID NO: 89543 - protein, 324 aa, Arabidopsis thaliana
  peptide (1)..(324): Ceres Seq. ID no. 12719464
  misc_feature (1)..(268): Pfam Name: UbiA prenyltransferase family Pfam Description: UbiA prenyltransferase family
  misc_feature (1)..(324): Homolog of NCBI NO: 7485006 NR Description: heme A farnesyltransferase homolog F16B22.1 -
  misc_feature (1)..(324): Homolog of NCBI NO: 18406556 NR Description: putative heme A:farnesyltransferase; protein id: supported by cDNA: gi_15028298, supported by cDNA: gi_21280972 thaliana] >gi|15028299|gb|AAK76626.1| putative heme
  misc_feature (1)..(324): Homolog of NCBI NO: 25408912 NR Description: probable heme A farnesyltransferase [imported] -
  misc_feature (1)..(323): Homolog of NCBI NO: 34913400 NR Description: putative heme A farnesyltransferase homolog
  misc_feature (1)..(261): Homolog of NCBI NO: 30410008 NR Description: RIKEN cDNA 2410004F01 [Mus musculus]
  misc_feature (1)..(276): Homolog of NCBI NO: 19112823 NR Description: cytochrome c oxidase assembly protein cox10 [Schizosaccharomyces pombe] >gi|7490416|pir||T40309 cytochrome c
  misc_feature (1)..(261): Homolog of NCBI NO: 20141419 NR Description: Protoheme IX farnesyltransferase, mitochondrial (Heme O synthase) >gi|2138300|gb|AAC51330.1| heme A: [Homo sapiens] >gi|12652629|gb|AAH00060.1|AAH00060 COX10 (yeast)
  misc_feature (1)..(261): Homolog of NCBI NO: 30584237 NR Description: Homo sapiens COX10 homolog, cytochrome c oxidase protein, heme A: farnesyltransferase (yeast) [synthetic
  misc_feature (1)..(261): Homolog of NCBI NO: 17921982 NR Description: heme A:farnesyltransferase; COX10 (yeast) cytochrome c oxidase assembly protein (heme A: cytochrome c oxidase subunit X; cytochrome c oxidase assembly
  misc_feature (1)..(285): Homolog of NCBI NO: 19921064 NR Description: CG5037-PA [Drosophila melanogaster]
MLVVATSGTGYILGTGNAAISFPGLCYTCAGTMMIAASANSLNQIFEISNDSKMKRTMLRPLPSGRISVPHAVAWATIAGASGACLLASKTNMLAAGLASANLVLYAFVYTPLKQLHPINTWVGAVVGAIPPLLGWAAASGQISYNSMILPAALYFWQIPHFMALAHLCRNDYAAGGYKMLSLFDPSGKRIAAVALRNCFYMIPLGFIAYDWGLTSSWFCLESTLLTLAIAATAFSFYRDRTMHKARKMFHASLLFLPVFMSGLLLHRVSNDNQQQLVEEAGLTNSVSGEVKTQRRKKRVAQPPVAYASAAPFPFLPAPSFYSP

SEQ ID NO: 89544 - DNA, 954 bp, Arabidopsis thaliana
  misc_feature (1)..(954): Ceres Seq. ID no. 12719504
  misc_feature: MA Experiment ID: 20000173 Result: Down-regulated in Transcription
  misc_feature: MA Experiment 20000173 PARAMETER Experiment Name: At_42deg_Heat_P Parameter: Age (day) Value: 14
  misc_feature: MA Experiment 20000173 PARAMETER Experiment Name: At_42deg_Heat_P Parameter: Organism Value: A. thaliana
  misc_feature: MA Experiment 20000173 PARAMETER Experiment Name: At_42deg_Heat_P Parameter: Plant Line Value: WS
  misc_feature: MA Experiment 20000173 PARAMETER Experiment Name: At_42deg_Heat_P Parameter: Temperature (deg C) Value: 42 vs. 22
  misc_feature: MA Experiment 20000173 PARAMETER Experiment Name: At_42deg_Heat_P Parameter: Timepoint (hr) Value: 6
  misc_feature: MA Experiment 20000173 PARAMETER Experiment Name: At_42deg_Heat_P Parameter: Tissue Value: Aerial
  misc_feature: MA Experiment ID: 20000185 Result: Up-regulated in Transcription
  misc_feature: MA Experiment 20000185 PARAMETER Experiment Name: At_Roots__P Parameter: Age (day) Value: 7 vs. 21
  misc_feature: MA Experiment 20000185 PARAMETER Experiment Name: At_Roots__P Parameter: Organism Value: A. thaliana
  misc_feature: MA Experiment 20000185 PARAMETER Experiment Name: At_Roots__P Parameter: Tissue Value: Roots vs. Whole Plant
  misc_feature: MA Experiment ID: 20000234 Result: Down-regulated in Transcription
  misc_feature: MA Experiment 20000234 PARAMETER Experiment Name: At_Siliques_P Parameter: Age (day) Value: 21
  misc_feature: MA Experiment 20000234 PARAMETER Experiment Name: At_Siliques_P Parameter: Organism Value: A. thaliana
  misc_feature: MA Experiment 20000234 PARAMETER Experiment Name: At_Siliques_P Parameter: Plant Line Value: WS
  misc_feature: MA Experiment 20000234 PARAMETER Experiment Name: At_Siliques_P Parameter: Tissue Value: Less Than 5mm Siliques vs. Whole Plant
  misc_feature: MA Experiment ID: 20000265 Result: Down-regulated in Transcription
  misc_feature: MA Experiment 20000265 PARAMETER Experiment Name: At_Open_Flower_P Parameter: Age (day) Value: 21
  misc_feature: MA Experiment 20000265 PARAMETER Experiment Name: At_Open_Flower_P Parameter: Plant Line Value: WS
  misc_feature: MA Experiment 20000265 PARAMETER Experiment Name: At_Open_Flower_P Parameter: Tissue Value: Closed Flower vs. Whole Plant
  misc_feature: MA Experiment ID: 20000288 Result: Down-regulated in Transcription
  misc_feature: MA Experiment 20000288 PARAMETER Experiment Name: At_Drought_P Parameter: Age (day) Value: 7
  misc_feature: MA Experiment 20000288 PARAMETER Experiment Name: At_Drought_P Parameter: Organism Value: A. thaliana
  misc_feature: MA Experiment 20000288 PARAMETER Experiment Name: At_Drought_P Parameter: Plant Line Value: WS
  misc_feature: MA Experiment 20000288 PARAMETER Experiment Name: At_Drought_P Parameter: Timepoint (hr) Value: 1
  misc_feature: MA Experiment 20000288 PARAMETER Experiment Name: At_Drought_P Parameter: Tissue Value: Whole Plant
  misc_feature: MA Experiment 20000288 PARAMETER Experiment Name: At_Drought_P Parameter: Treatment Value: Drought vs. No Drought
  misc_feature: MA Experiment ID: 20000438 Result: Down-regulated in Transcription
  misc_feature: MA Experiment 20000438 PARAMETER Experiment Name: At_Shoots__P Parameter: Age (day) Value: 14
  misc_feature: MA Experiment 20000438 PARAMETER Experiment Name: At_Shoots__P Parameter: Tissue Value: Shoots vs. Whole Plant
  misc_feature: MA Experiment ID: 20000439 Result: Up-regulated in Transcription
  misc_feature: MA Experiment 20000439 PARAMETER Experiment Name: At_Roots__P Parameter: Age (day) Value: 14 vs. 21
  misc_feature: MA Experiment 20000439 PARAMETER Experiment Name: At_Roots__P Parameter: Organism Value: A. thaliana
  misc_feature: MA Experiment 20000439 PARAMETER Experiment Name: At_Roots__P Parameter: Tissue Value: Roots vs. Whole Plant
  misc_feature: MA Experiment ID: 20001248 Result: Down-regulated in Transcription
  misc_feature: MA Experiment 20001248 PARAMETER Experiment Name: At_Far-red-induction_P Parameter: Age (day) Value: 7
  misc_feature: MA Experiment 20001248 PARAMETER Experiment Name: At_Far-red-induction_P Parameter: Light Value: Far-red vs. White
  misc_feature: MA Experiment 20001248 PARAMETER Experiment Name: At_Far-red-induction_P Parameter: Organism Value: A. thaliana
  misc_feature: MA Experiment 20001248 PARAMETER Experiment Name: At_Far-red-induction_P Parameter: Plant Line Value: Columbia
  misc_feature: MA Experiment 20001248 PARAMETER Experiment Name: At_Far-red-induction_P Parameter: Timepoint (hr) Value: 4
  misc_feature: MA Experiment 20001248 PARAMETER Experiment Name: At_Far-red-induction_P Parameter: Tissue Value: Whole Plant
  misc_feature: MA Experiment ID: 20001450 Result: Down-regulated in Transcription
  misc_feature: MA Experiment 20001450 PARAMETER Experiment Name: At_Far-red-induction_P Parameter: Age (day) Value: 7
  misc_feature: MA Experiment 20001450 PARAMETER Experiment Name: At_Far-red-induction_P Parameter: Light Value: Far-red vs. White
  misc_feature: MA Experiment 20001450 PARAMETER Experiment Name: At_Far-red-induction_P Parameter: Organism Value: A. thaliana
  misc_feature: MA Experiment 20001450 PARAMETER Experiment Name: At_Far-red-induction_P Parameter: Plant Line Value: Columbia
  misc_feature: MA Experiment 20001450 PARAMETER Experiment Name: At_Far-red-induction_P Parameter: Timepoint (hr) Value: 8
  misc_feature: MA Experiment 20001450 PARAMETER Experiment Name: At_Far-red-induction_P Parameter: Tissue Value: Whole Plant
  misc_feature: MA Experiment ID: 20001911 Result: Up-regulated in Transcription
  misc_feature: MA Experiment 20001911 PARAMETER Experiment Name: At_Drought_Reproduction_P Parameter: Age (day) Value: 40
  misc_feature: MA Experiment 20001911 PARAMETER Experiment Name: At_Drought_Reproduction_P Parameter: Organism Value: A. thaliana
  misc_feature: MA Experiment 20001911 PARAMETER Experiment Name: At_Drought_Reproduction_P Parameter: Plant Line Value: WS
  misc_feature: MA Experiment 20001911 PARAMETER Experiment Name: At_Drought_Reproduction_P Parameter: Timepoint (day) Value: 10
  misc_feature: MA Experiment 20001911 PARAMETER Experiment Name: At_Drought_Reproduction_P Parameter: Tissue Value: Flowers
  misc_feature: MA Experiment 20001911 PARAMETER Experiment Name: At_Drought_Reproduction_P Parameter: Treatment Value: Drought vs. No Drought
atggctaattcctcctccttctccccctctaccaccgtaacagatttaatctccaccgtccatgacgacatcatagagtctcacatcttgacacgtctcgacggcgcaaccttagcatccgtctcttgcgcctcctcacatcttcatcatctcgcttccaatgagatcctctggtccaaaatctgccgatccacgtggccttcttgctccggtggttctcgttctttcttctccgacgcttattctatggtggaaaccgccggtacagtctctgatctcgaccgtccgtttccggaattgatctccgccgtggatcttcactacagagggaagttgatttttagtagagtcgtgaagacggagactacgacggcgtggtttaagagttcgccgttgaggattgatctggtggatacaaaggatacggtggcgacgccgattaagagaagacagaggacggaagacacgtgtcgtgatctagagaaggatttgactttgagctggatcgtgattgatccgatcgggaaacgagcggcgaatatttcgagtcaccggccggtgtcggtgcagaggaactggataagcggagaagtggaggcgcaattcgcgacggtggtgggggcggtggagtgtgtgatcacggtggtcacgtgcggtgaggaggagatgcacgtgagggaagtgagtctcaaggtagagaagatggagggaacgcatttaaacgggagggacagtttggttattttaaggagtgtcatggagggtaaaagggtaaatggaagtaggagggaagtagaatcgaagaagagacacgaagagtttatggagaagaagagagagatgaaggagaagaagatgagggtagaatcggtatttgacattttgactgtagcttttggtattttaggctttgtgttgcttgttgtgttttgtctttggagaacctctatatga

SEQ ID NO: 89545 - protein, 317 aa, Arabidopsis thaliana
  peptide (1)..(317): Ceres Seq. ID no. 12719505
  misc_feature (1)..(317): Homolog of NCBI NO: 15227574 NR Description: hypothetical protein; protein id: At2g36090.1
  misc_feature (10)..(309): Homolog of NCBI NO: 32479726 NR Description: OJ991214_12.2 [Oryza sativa (japonica
  misc_feature (15)..(287): Homolog of NCBI NO: 15225867 NR Description: unknown protein; protein id: At2g27310.1, by cDNA: gi_13877666 [Arabidopsis thaliana]
  misc_feature (64)..(314): Homolog of NCBI NO: 15225867 NR Description: unknown protein; protein id: At2g27310.1, by cDNA: gi_13877666 [Arabidopsis thaliana]
MANSSSFSPSTTVTDLISTVHDDIIESHILTRLDGATLASVSCASSHLHHLASNEILWSKICRSTWPSCSGGSRSFFSDAYSMVETAGTVSDLDRPFPELISAVDLHYRGKLIFSRVVKTETTTAWFKSSPLRIDLVDTKDTVATPIKRRQRTEDTCRDLEKDLTLSWIVIDPIGKRAANISSHRPVSVQRNWISGEVEAQFATVVGAVECVITVVTCGEEEMHVREVSLKVEKMEGTHLNGRDSLVILRSVMEGKRVNGSRREVESKKRHEEFMEKKREMKEKKMRVESVFDILTVAFGILGFVLLVVFCLWRTSI

SEQ ID NO: 89546 - protein, 235 aa, Arabidopsis thaliana
  peptide (1)..(235): Ceres Seq. ID no. 12719506
  misc_feature (1)..(235): Homolog of NCBI NO: 15227574 NR Description: hypothetical protein; protein id: At2g36090.1
  misc_feature (1)..(227): Homolog of NCBI NO: 32479726 NR Description: OJ991214_12.2 [Oryza sativa (japonica
  misc_feature (1)..(205): Homolog of NCBI NO: 15225867 NR Description: unknown protein; protein id: At2g27310.1, by cDNA: gi_13877666 [Arabidopsis thaliana]
  misc_feature (1)..(232): Homolog of NCBI NO: 15225867 NR Description: unknown protein; protein id: At2g27310.1, by cDNA: gi_13877666 [Arabidopsis thaliana]
MVETAGTVSDLDRPFPELISAVDLHYRGKLIFSRVVKTETTTAWFKSSPLRIDLVDTKDTVATPIKRRQRTEDTCRDLEKDLTLSWIVIDPIGKRAANISSHRPVSVQRNWISGEVEAQFATVVGAVECVITVVTCGEEEMHVREVSLKVEKMEGTHLNGRDSLVILRSVMEGKRVNGSRREVESKKRHEEFMEKKREMKEKKMRVESVFDILTVAFGILGFVLLVVFCLWRTSI

SEQ ID NO: 89547 - DNA, 1029 bp, Arabidopsis thaliana
  misc_feature (1)..(1029): Ceres Seq. ID no. 12719513
  misc_feature: MA Experiment ID: 20000184 Result: Up-regulated in Transcription
  misc_feature: MA Experiment 20000184 PARAMETER Experiment Name: At_Shoots__P Parameter: Age (day) Value: 7
  misc_feature: MA Experiment 20000184 PARAMETER Experiment Name: At_Shoots__P Parameter: Tissue Value: Shoots vs. Whole Plant
  misc_feature: MA Experiment ID: 20000185 Result: Up-regulated in Transcription
  misc_feature: MA Experiment 20000185 PARAMETER Experiment Name: At_Roots__P Parameter: Age (day) Value: 7 vs. 21
  misc_feature: MA Experiment 20000185 PARAMETER Experiment Name: At_Roots__P Parameter: Organism Value: A. thaliana
  misc_feature: MA Experiment 20000185 PARAMETER Experiment Name: At_Roots__P Parameter: Tissue Value: Roots vs. Whole Plant
  misc_feature: MA Experiment ID: 20000439 Result: Up-regulated in Transcription
  misc_feature: MA Experiment 20000439 PARAMETER Experiment Name: At_Roots__P Parameter: Age (day) Value: 14 vs. 21
  misc_feature: MA Experiment 20000439 PARAMETER Experiment Name: At_Roots__P Parameter: Organism Value: A. thaliana
  misc_feature: MA Experiment 20000439 PARAMETER Experiment Name: At_Roots__P Parameter: Tissue Value: Roots vs. Whole Plant
acaactaaatcttaagtagaaagagtgaaacatggctaatcacaaaaatctcttctttctatgtttcttaataggtttagggttatgttctgctagacgagcactactctcctcctctgaatccgaggctgaagtcgctgcctatggcgtgaatagtggtttaagtgctggtcttggtgttggtattggtggtggtcctggaggaggatctggttacggaggtggaagcggtgaaggcggtggagctggtgggcatggcgagggacatattggtgggggcggaggtggtggacatggtggtggtgctggcggaggaggaggtggtggccctggaggaggctacggaggtggaagcggtgaaggtggtggagctggatacggaggcggagaagctggtgggcatggcggaggtggaggaggcggagcaggcggcggtggaggtggtggtggtggtgcacatggtggaggatacggtggtggacaaggtgctggtgctggaggaggatatggaggtggaggtgccgggggacatggaggtggtggaggcggtggaaatggtgggggtggaggaggaggttctggcgaaggaggagctcatggtggtggttacggagcaggaggtggagctggagagggatacggtggtggtgctggagctggtggacatggtggtggaggaggaggcggtggtggttccggaggtggaggaggaggaggtggaggttatgctgctgcttctggatacggtcacggtgggggtgctggtggtggagaaggaagcggtggctatgtaccatgaaaaattatctatatggagtgtaacggcaattgagtgaagtgtcatatctcgtaagggactatatagtttcacgatttatatgtggcaataaatagagtaatccttcgtataataagccgtagaaaggcggctattgttgaagtttttaaattgtaccacgaccaatattgttgtaagctactactacgtgtgtatcaagtttttataaatggaaatcatagttgttccta

SEQ ID NO: 89548 - protein, 255 aa, Arabidopsis thaliana
  peptide (1)..(255): Ceres Seq. ID no. 12719514
  misc_feature (54)..(252): Pfam Name: S-antigen protein Pfam Description: S-antigen protein
  misc_feature (1)..(255): Homolog of NCBI NO: 15227583 NR Description: unknown protein; protein id: At2g36120.1
  misc_feature (1)..(252): Homolog of NCBI NO: 322647 NR Description: glycine-rich protein GRP22 - rape
  misc_feature (33)..(253): Homolog of NCBI NO: 322647 NR Description: glycine-rich protein GRP22 - rape
  misc_feature (39)..(252): Homolog of NCBI NO: 30679122 NR Description: expressed protein [Arabidopsis thaliana]
  misc_feature (7)..(255): Homolog of NCBI NO: 121628 NR Description: GLYCINE-RICH CELL WALL STRUCTURAL PROTEIN 1.0
  misc_feature (36)..(251): Homolog of NCBI NO: 72320 NR Description: glycine-rich cell wall protein precursor - thaliana >gi|16293|emb|CAA41249.1| glycine rich protein
  misc_feature (36)..(251): Homolog of NCBI NO: 15228946 NR Description: unknown protein; protein id: At3g17050.1
  misc_feature (39)..(251): Homolog of NCBI NO: 72320 NR Description: glycine-rich cell wall protein precursor - thaliana >gi|16293|emb|CAA41249.1| glycine rich protein
  misc_feature (39)..(251): Homolog of NCBI NO: 15228946 NR Description: unknown protein; protein id: At3g17050.1
  misc_feature (39)..(251): Homolog of NCBI NO: 72320 NR Description: glycine-rich cell wall protein precursor - thaliana >gi|16293|emb|CAA41249.1| glycine rich protein
MANHKNLFFLCFLIGLGLCSARRALLSSSESEAEVAAYGVNSGLSAGLGVGIGGGPGGGSGYGGGSGEGGGAGGHGEGHIGGGGGGGHGGGAGGGGGGGPGGGYGGGSGEGGGAGYGGGEAGGHGGGGGGGAGGGGGGGGGAHGGGYGGGQGAGAGGGYGGGGAGGHGGGGGGGNGGGGGGGSGEGGAHGGGYGAGGGAGEGYGGGAGAGGHGGGGGGGGGSGGGGGGGGGYAAASGYGHGGGAGGGEGSGGYVP

SEQ ID NO: 89549 - protein, 193 aa, Arabidopsis thaliana
  peptide (1)..(193): Ceres Seq. ID no. 12719515
  misc_feature (1)..(193): Homolog of NCBI NO: 39579227 NR Description: Hypothetical protein CBG24854 [Caenorhabditis
MARDILVGAEVVDMVVVLAEEEVVALEEATEVEAVKVVELDTEAEKLVGMAEVEEAEQAAVEVVVVVHMVEDTVVDKVLVLEEDMEVEVPGDMEVVEAVEMVGVEEEVLAKEELMVVVTEQEVELERDTVVVLELVDMVVEEEAVVVPEVEEEEVEVMLLLLDTVTVGVLVVEKEAVAMYHEKLSIWSVTAIE

SEQ ID NO: 89550 - protein, 180 aa, Arabidopsis thaliana
  peptide (1)..(180): Ceres Seq. ID no. 12719516
  misc_feature (1)..(180): Homolog of NCBI NO: 39579227 NR Description: Hypothetical protein CBG24854 [Caenorhabditis
MVVVLAEEEVVALEEATEVEAVKVVELDTEAEKLVGMAEVEEAEQAAVEVVVVVHMVEDTVVDKVLVLEEDMEVEVPGDMEVVEAVEMVGVEEEVLAKEELMVVVTEQEVELERDTVVVLELVDMVVEEEAVVVPEVEEEEVEVMLLLLDTVTVGVLVVEKEAVAMYHEKLSIWSVTAIE

SEQ ID NO: 89551 - DNA, 2850 bp, Arabidopsis thaliana
  misc_feature (1)..(2850): Ceres Seq. ID no. 12719528
  misc_feature: MA Experiment ID: 20000264 Result: Up-regulated in Transcription
  misc_feature: MA Experiment 20000264 PARAMETER Experiment Name: At_Open_Flower_P Parameter: Age (day) Value: 21
  misc_feature: MA Experiment 20000264 PARAMETER Experiment Name: At_Open_Flower_P Parameter: Plant Line Value: WS
  misc_feature: MA Experiment 20000264 PARAMETER Experiment Name: At_Open_Flower_P Parameter: Tissue Value: Open Flower vs. Whole Plant
  misc_feature: MA Experiment ID: 20000439 Result: Up-regulated in Transcription
  misc_feature: MA Experiment 20000439 PARAMETER Experiment Name: At_Roots__P Parameter: Age (day) Value: 14 vs. 21
  misc_feature: MA Experiment 20000439 PARAMETER Experiment Name: At_Roots__P Parameter: Organism Value: A. thaliana
  misc_feature: MA Experiment 20000439 PARAMETER Experiment Name: At_Roots__P Parameter: Tissue Value: Roots vs. Whole Plant
  misc_feature: MA Experiment ID: 20000495 Result: Up-regulated in Transcription
  misc_feature: MA Experiment 20000495 PARAMETER Experiment Name: At_Guard_Cells_P Parameter: Harvest Date Value: 8/2/2002
  misc_feature: MA Experiment 20000495 PARAMETER Experiment Name: At_Guard_Cells_P Parameter: Organism Value: A. thaliana
  misc_feature: MA Experiment 20000495 PARAMETER Experiment Name: At_Guard_Cells_P Parameter: Tissue Value: Guard Cells vs. Leaves
  misc_feature: MA Experiment ID: 20000794 Result: Up-regulated in Transcription
  misc_feature: MA Experiment 20000794 PARAMETER Experiment Name: At_Petals_P Parameter: Age (day) Value: 23-25 days
  misc_feature: MA Experiment 20000794 PARAMETER Experiment Name: At_Petals_P Parameter: Plant Line Value: WS
  misc_feature: MA Experiment 20000794 PARAMETER Experiment Name: At_Petals_P Parameter: Tissue Value: Petals vs. Whole plant
  misc_feature: MA Experiment ID: 20001451 Result: Up-regulated in Transcription
  misc_feature: MA Experiment 20001451 PARAMETER Experiment Name: At_Far-red-induction_P Parameter: Age (day) Value: 7
  misc_feature: MA Experiment 20001451 PARAMETER Experiment Name: At_Far-red-induction_P Parameter: Light Value: Far-red vs. White
  misc_feature: MA Experiment 20001451 PARAMETER Experiment Name: At_Far-red-induction_P Parameter: Organism Value: A. thaliana
  misc_feature: MA Experiment 20001451 PARAMETER Experiment Name: At_Far-red-induction_P Parameter: Plant Line Value: Columbia
  misc_feature: MA Experiment 20001451 PARAMETER Experiment Name: At_Far-red-induction_P Parameter: Timepoint (hr) Value: 24
  misc_feature: MA Experiment 20001451 PARAMETER Experiment Name: At_Far-red-induction_P Parameter: Tissue Value: Whole Plant
  misc_feature: MA Experiment ID: 20001557 Result: Up-regulated in Transcription
  misc_feature: MA Experiment 20001557 PARAMETER Experiment Name: At_Drought_Soil_Dry_P Parameter: Age (day) Value: 27
  misc_feature: MA Experiment 20001557 PARAMETER Experiment Name: At_Drought_Soil_Dry_P Parameter: Organism Value: A. thaliana
  misc_feature: MA Experiment 20001557 PARAMETER Experiment Name: At_Drought_Soil_Dry_P Parameter: Plant Line Value: WS
  misc_feature: MA Experiment 20001557 PARAMETER Experiment Name: At_Drought_Soil_Dry_P Parameter: Post Timepoint (hr) Value: 3
  misc_feature: MA Experiment 20001557 PARAMETER Experiment Name: At_Drought_Soil_Dry_P Parameter: Post-Treatment Value: Re-Water vs. No Drought
  misc_feature: MA Experiment 20001557 PARAMETER Experiment Name: At_Drought_Soil_Dry_P Parameter: Timepoint (day) Value: 13
  misc_feature: MA Experiment 20001557 PARAMETER Experiment Name: At_Drought_Soil_Dry_P Parameter: Treatment Value: Drought vs. No Drought
atggaatcctttgcaggttcttgtgaaattgttgaggagaaggatgcggtaaggttagccaaacattctagcagatattgtatgtcacctttgggatcaagtaaagatatggagcagcgtcctgcattgaagtcagggtaccaaggttctatggagtatgacattgatcagcttttccagtctataactataaaaccatcacctagaagagtgatgggctcttctttccatcatcttgagacgagcgcaagtgctggtacgagcaggagcacaagcccttcaaataaaggcgctatgaaaaagccctttcccatgggaacccctcgatcaccaagagttggtccctctgattcaatatctctgaagcaggctctgagagatctttgcatctccaaggcatcagaaatggcttcccagaaacgtttatcaaaatctgcagctgcatctccgagggtttctgaagcagacaggataaagactctttacagacaagttttgaatgaatctgctggcaagcctgggcttcctgtggacaagggtaaaagcttggttgaaatatctttgacgccggtagtcgatatacccagctcctcccagagtgtacctcagcggtatgatgtccttgagacagagccatctaacttcatttctgaaccatctcaggctgaaatccttctccacgtacttggaaatgggtcgggaataaagacagtgggatatggaatgctggagactgtatcactgtgtaaatccaacaaatctggatcttgtctcagttctggcagtggagattatgagatagagatagatgaaaatcatacatctcctcctcatatggtcattgaagatcaattagtggaaatcgacaaacatgttacctcgctgccttcttgttctggcagcaaagttgatactgaagagctagacaagagcatcgtctcatcagctagagtgaaaagtgagccaacagctttgagctcagggttaaaaggaaagttggataactttcctggttcaggaacagagaagagcaaactggtaagcaaggtgacaagaaatatcccacgtcccaaaccgcggccgaagaagaagatattgcttaaaaagaagctaaaaatcgttgtaaattctgctacaaaaatggttgaggaagtcgatacttccttagagcctagtgcaagtcaacttctgtgccagaagtgccactgtgcggtaaagagcaccagcactgaaaaccacccgccctcgaatactagtcatactactgataaaaatgtcagtatagaagcagatcaagaatcactcgcaagcccgcgtctcattcgcattgtgaagtgtaataaagaggccagcaagggttcctcggattcttgtgaggttagtgatagcggtgaagctgtcattgtcatgaaacaagaagtctctccaagcaattatagtggaaaaggtgatgcagatgaacagataagagcgaatccaacttccagtgaaaaatttgatttctcgttgagctcaaagaatagcctaggggactatagcagcagcacaagcatgagtgaggagagcaatctgagcaggtttagctgtggcaataaacctcacatgtctatggatgtgagatgggaagcagttaagcatgtaaagttgcagtatggctctttaggactgcgacatttcaaccttttgaaaaagcttggttgtggagatattggaactgtctatcttgctgagctggttggtacaaactgcctgtttgccatcaaggtcatggacaacgagttcttggcccgaaggaaaaagacaccaagagcacaggcagaacgggcaatccttaaaatgttggaccatccttttctgcctaccttgtatgcgcaatttacttcagataatttatcgtgtctggtgatggagtattgtcctggtggtgatcttcatgtcctaaggcagaaacagctcagcaggtgtttctccgaacccgcaactaggttctatgtagcagaaatcctccttgcgctggagtacttacacatgcttggtgttatataccgagatttgaaaccagagaacattctagtccgagaagatggtcacatcatgcttacagattttgacctctcactcagatgtgcggtgaacccgactcttctcagatcaacttctccacccgagaaagatcccgcaaggatgtccggtccatacagcacatcgaattgcatacaacctctatgtattgaaccatcatgtcgggtcccatgtttcagccctaggctcttatcaacccaagcaagaaaccaaaaaccaagaaaaccgaaaaggcctgatcttttgacacagcagttcagatcattgcctcagcttgtggctgaaccaaccgaagcaagatcaaattcgtttgtgggaacgcacgagtacttggccccggagatcattaaaggagaaggacatggtgctgcagtagactggtggacatttggggtccttctctatgagcttttgtacgggaagacacctttcaaaggttatgacaatgaggagacactgtccaatgttgtataccagaacctcaagtttcctgatagcccgctcgtgagcttccaggcaaaggagttgatcagaaggctgctggtgaaggatccagagagtcgtcttgggtcagaaaaaggagctgcagagatcaaaagacatcctttctttgaaggattgaattgggctctcatccgctgcgccataccacctgagctgccagatatctatgacaatggtgccacggaagcgacttctcctgaggggaataataggtatcttgaatgtaaagccatcggagatcatcttgagttcgagttgttttag

SEQ ID NO: 89552 - protein, 949 aa, Arabidopsis thaliana
  peptide (1)..(949): Ceres Seq. ID no. 12719529
  misc_feature (559)..(898): Pfam Name: Protein kinase domain Pfam Description: Protein kinase domain
  misc_feature (87)..(949): Homolog of NCBI NO: 30693719 NR Description: protein kinase (KIPK) [Arabidopsis thaliana]
  misc_feature (212)..(949): Homolog of NCBI NO: 7716430 NR Description: protein kinase KIPK [Arabidopsis thaliana]
  misc_feature (386)..(949): Homolog of NCBI NO: 15242814 NR Description: protein kinase -like protein; protein id:
  misc_feature (1)..(221): Homolog of NCBI NO: 15242814 NR Description: protein kinase -like protein; protein id:
  misc_feature (496)..(949): Homolog of NCBI NO: 15238798 NR Description: protein kinase (EC 2.7.1.37) 5 (pir||JN0505); id: At5g47750.1, supported by cDNA: gi_15809918, supported by gi_17064849, supported by cDNA: gi_20259909 [Arabidopsis
  misc_feature (496)..(949): Homolog of NCBI NO: 17064850 NR Description: protein kinase 5 [Arabidopsis thaliana]
  misc_feature (447)..(949): Homolog of NCBI NO: 15236802 NR Description: putative protein kinase; protein id: At4g26610.1, by cDNA: gi_17380933, supported by cDNA: gi_20258942 [Arabidopsis >gi|7488161|pir||T08927 probable protein kinase T15N24.60
  misc_feature (532)..(949): Homolog of NCBI NO: 320622 NR Description: probable protein kinase - maize (fragment)
  misc_feature (513)..(915): Homolog of NCBI NO: 1346057 NR Description: Protein kinase G11A >gi|100705|pir||B30311
  misc_feature (450)..(949): Homolog of NCBI NO: 15241076 NR Description: serine threonine-specific protein kinase ATPK64
MESFAGSCEIVEEKDAVRLAKHSSRYCMSPLGSSKDMEQRPALKSGYQGSMEYDIDQLFQSITIKPSPRRVMGSSFHHLETSASAGTSRSTSPSNKGAMKKPFPMGTPRSPRVGPSDSISLKQALRDLCISKASEMASQKRLSKSAAASPRVSEADRIKTLYRQVLNESAGKPGLPVDKGKSLVEISLTPVVDIPSSSQSVPQRYDVLETEPSNFISEPSQAEILLHVLGNGSGIKTVGYGMLETVSLCKSNKSGSCLSSGSGDYEIEIDENHTSPPHMVIEDQLVEIDKHVTSLPSCSGSKVDTEELDKSIVSSARVKSEPTALSSGLKGKLDNFPGSGTEKSKLVSKVTRNIPRPKPRPKKKILLKKKLKIVVNSATKMVEEVDTSLEPSASQLLCQKCHCAVKSTSTENHPPSNTSHTTDKNVSIEADQESLASPRLIRIVKCNKEASKGSSDSCEVSDSGEAVIVMKQEVSPSNYSGKGDADEQIRANPTSSEKFDFSLSSKNSLGDYSSSTSMSEESNLSRFSCGNKPHMSMDVRWEAVKHVKLQYGSLGLRHFNLLKKLGCGDIGTVYLAELVGTNCLFAIKVMDNEFLARRKKTPRAQAERAILKMLDHPFLPTLYAQFTSDNLSCLVMEYCPGGDLHVLRQKQLSRCFSEPATRFYVAEILLALEYLHMLGVIYRDLKPENILVREDGHIMLTDFDLSLRCAVNPTLLRSTSPPEKDPARMSGPYSTSNCIQPLCIEPSCRVPCFSPRLLSTQARNQKPRKPKRPDLLTQQFRSLPQLVAEPTEARSNSFVGTHEYLAPEIIKGEGHGAAVDWWTFGVLLYELLYGKTPFKGYDNEETLSNVVYQNLKFPDSPLVSFQAKELIRRLLVKDPESRLGSEKGAAEIKRHPFFEGLNWALIRCAIPPELPDIYDNGATEATSPEGNNRYLECKAIGDHLEFELF

SEQ ID NO: 89553 - protein, 922 aa, Arabidopsis thaliana
  peptide (1)..(922): Ceres Seq. ID no. 12719530
  misc_feature (532)..(871): Pfam Name: Protein kinase domain Pfam Description: Protein kinase domain
  misc_feature (60)..(922): Homolog of NCBI NO: 30693719 NR Description: protein kinase (KIPK) [Arabidopsis thaliana]
  misc_feature (185)..(922): Homolog of NCBI NO: 7716430 NR Description: protein kinase KIPK [Arabidopsis thaliana]
  misc_feature (359)..(922): Homolog of NCBI NO: 15242814 NR Description: protein kinase -like protein; protein id:
  misc_feature (1)..(194): Homolog of NCBI NO: 15242814 NR Description: protein kinase -like protein; protein id:
  misc_feature (469)..(922): Homolog of NCBI NO: 15238798 NR Description: protein kinase (EC 2.7.1.37) 5 (pir||JN0505); id: At5g47750.1, supported by cDNA: gi_15809918, supported by gi_17064849, supported by cDNA: gi_20259909 [Arabidopsis
  misc_feature (469)..(922): Homolog of NCBI NO: 17064850 NR Description: protein kinase 5 [Arabidopsis thaliana]
  misc_feature (420)..(922): Homolog of NCBI NO: 15236802 NR Description: putative protein kinase; protein id: At4g26610.1, by cDNA: gi_17380933, supported by cDNA: gi_20258942 [Arabidopsis >gi|7488161|pir||T08927 probable protein kinase T15N24.60
  misc_feature (505)..(922): Homolog of NCBI NO: 320622 NR Description: probable protein kinase - maize (fragment)
  misc_feature (486)..(888): Homolog of NCBI NO: 1346057 NR Description: Protein kinase G11A >gi|100705|pir||B30311
  misc_feature (423)..(922): Homolog of NCBI NO: 15241076 NR Description: serine threonine-specific protein kinase ATPK64
MSPLGSSKDMEQRPALKSGYQGSMEYDIDQLFQSITIKPSPRRVMGSSFHHLETSASAGTSRSTSPSNKGAMKKPFPMGTPRSPRVGPSDSISLKQALRDLCISKASEMASQKRLSKSAAASPRVSEADRIKTLYRQVLNESAGKPGLPVDKGKSLVEISLTPVVDIPSSSQSVPQRYDVLETEPSNFISEPSQAEILLHVLGNGSGIKTVGYGMLETVSLCKSNKSGSCLSSGSGDYEIEIDENHTSPPHMVIEDQLVEIDKHVTSLPSCSGSKVDTEELDKSIVSSARVKSEPTALSSGLKGKLDNFPGSGTEKSKLVSKVTRNIPRPKPRPKKKILLKKKLKIVVNSATKMVEEVDTSLEPSASQLLCQKCHCAVKSTSTENHPPSNTSHTTDKNVSIEADQESLASPRLIRIVKCNKEASKGSSDSCEVSDSGEAVIVMKQEVSPSNYSGKGDADEQIRANPTSSEKFDFSLSSKNSLGDYSSSTSMSEESNLSRFSCGNKPHMSMDVRWEAVKHVKLQYGSLGLRHFNLLKKLGCGDIGTVYLAELVGTNCLFAIKVMDNEFLARRKKTPRAQAERAILKMLDHPFLPTLYAQFTSDNLSCLVMEYCPGGDLHVLRQKQLSRCFSEPATRFYVAEILLALEYLHMLGVIYRDLKPENILVREDGHIMLTDFDLSLRCAVNPTLLRSTSPPEKDPARMSGPYSTSNCIQPLCIEPSCRVPCFSPRLLSTQARNQKPRKPKRPDLLTQQFRSLPQLVAEPTEARSNSFVGTHEYLAPEIIKGEGHGAAVDWWTFGVLLYELLYGKTPFKGYDNEETLSNVVYQNLKFPDSPLVSFQAKELIRRLLVKDPESRLGSEKGAAEIKRHPFFEGLNWALIRCAIPPELPDIYDNGATEATSPEGNNRYLECKAIGDHLEFELF

SEQ ID NO: 89554 - protein, 913 aa, Arabidopsis thaliana
  peptide (1)..(913): Ceres Seq. ID no. 12719531
  misc_feature (523)..(862): Pfam Name: Protein kinase domain Pfam Description: Protein kinase domain
  misc_feature (51)..(913): Homolog of NCBI NO: 30693719 NR Description: protein kinase (KIPK) [Arabidopsis thaliana]
  misc_feature (176)..(913): Homolog of NCBI NO: 7716430 NR Description: protein kinase KIPK [Arabidopsis thaliana]
  misc_feature (350)..(913): Homolog of NCBI NO: 15242814 NR Description: protein kinase -like protein; protein id:
  misc_feature (1)..(185): Homolog of NCBI NO: 15242814 NR Description: protein kinase -like protein; protein id:
  misc_feature (460)..(913): Homolog of NCBI NO: 15238798 NR Description: protein kinase (EC 2.7.1.37) 5 (pir||JN0505); id: At5g47750.1, supported by cDNA: gi_15809918, supported by gi_17064849, supported by cDNA: gi_20259909 [Arabidopsis
  misc_feature (460)..(913): Homolog of NCBI NO: 17064850 NR Description: protein kinase 5 [Arabidopsis thaliana]
  misc_feature (411)..(913): Homolog of NCBI NO: 15236802 NR Description: putative protein kinase; protein id: At4g26610.1, by cDNA: gi_17380933, supported by cDNA: gi_20258942 [Arabidopsis >gi|7488161|pir||T08927 probable protein kinase T15N24.60
  misc_feature (496)..(913): Homolog of NCBI NO: 320622 NR Description: probable protein kinase - maize (fragment)
  misc_feature (477)..(879): Homolog of NCBI NO: 1346057 NR Description: Protein kinase G11A >gi|100705|pir||B30311
  misc_feature (414)..(913): Homolog of NCBI NO: 15241076 NR Description: serine threonine-specific protein kinase ATPK64
MEQRPALKSGYQGSMEYDIDQLFQSITIKPSPRRVMGSSFHHLETSASAGTSRSTSPSNKGAMKKPFPMGTPRSPRVGPSDSISLKQALRDLCISKASEMASQKRLSKSAAASPRVSEADRIKTLYRQVLNESAGKPGLPVDKGKSLVEISLTPVVDIPSSSQSVPQRYDVLETEPSNFISEPSQAEILLHVLGNGSGIKTVGYGMLETVSLCKSNKSGSCLSSGSGDYEIEIDENHTSPPHMVIEDQLVEIDKHVTSLPSCSGSKVDTEELDKSIVSSARVKSEPTALSSGLKGKLDNFPGSGTEKSKLVSKVTRNIPRPKPRPKKKILLKKKLKIVVNSATKMVEEVDTSLEPSASQLLCQKCHCAVKSTSTENHPPSNTSHTTDKNVSIEADQESLASPRLIRIVKCNKEASKGSSDSCEVSDSGEAVIVMKQEVSPSNYSGKGDADEQIRANPTSSEKFDFSLSSKNSLGDYSSSTSMSEESNLSRFSCGNKPHMSMDVRWEAVKHVKLQYGSLGLRHFNLLKKLGCGDIGTVYLAELVGTNCLFAIKVMDNEFLARRKKTPRAQAERAILKMLDHPFLPTLYAQFTSDNLSCLVMEYCPGGDLHVLRQKQLSRCFSEPATRFYVAEILLALEYLHMLGVIYRDLKPENILVREDGHIMLTDFDLSLRCAVNPTLLRSTSPPEKDPARMSGPYSTSNCIQPLCIEPSCRVPCFSPRLLSTQARNQKPRKPKRPDLLTQQFRSLPQLVAEPTEARSNSFVGTHEYLAPEIIKGEGHGAAVDWWTFGVLLYELLYGKTPFKGYDNEETLSNVVYQNLKFPDSPLVSFQAKELIRRLLVKDPESRLGSEKGAAEIKRHPFFEGLNWALIRCAIPPELPDIYDNGATEATSPEGNNRYLECKAIGDHLEFELF

SEQ ID NO: 89555 - DNA, 1572 bp, Arabidopsis thaliana
  misc_feature (1)..(1572): Ceres Seq. ID no. 12719572
  misc_feature: MA Experiment ID: 20000184 Result: Up-regulated in Transcription
  misc_feature: MA Experiment 20000184 PARAMETER Experiment Name: At_Shoots__P Parameter: Age (day) Value: 7
  misc_feature: MA Experiment 20000184 PARAMETER Experiment Name: At_Shoots__P Parameter: Tissue Value: Shoots vs. Whole Plant
  misc_feature: MA Experiment ID: 20000437 Result: Up-regulated in Transcription
  misc_feature: MA Experiment 20000437 PARAMETER Experiment Name: At_Drought_P Parameter: Age (day) Value: 8
  misc_feature: MA Experiment 20000437 PARAMETER Experiment Name: At_Drought_P Parameter: Organism Value: A. thaliana
  misc_feature: MA Experiment 20000437 PARAMETER Experiment Name: At_Drought_P Parameter: Plant Line Value: WS
  misc_feature: MA Experiment 20000437 PARAMETER Experiment Name: At_Drought_P Parameter: Timepoint (hr) Value: 24
  misc_feature: MA Experiment 20000437 PARAMETER Experiment Name: At_Drought_P Parameter: Tissue Value: Whole Plant
  misc_feature: MA Experiment 20000437 PARAMETER Experiment Name: At_Drought_P Parameter: Treatment Value: Drought vs. No Drought
taaaatcgtaaagttctaaagcggtttttcatcaattttcaagcaatcgagaaaaaagcaatggcgtcagacaaacaaaaggcggagagagccgaggttgcggcgaggctagcggctgaggacttgcatgacattaacaaatccggtggtgctgatgtcacaatgtataaggtgacggagagaacaactgaacatccaccggagcaagataggcccggtgtgataggatcagtgttcagggctgtccaaggaacgtatgagcatgcgagagacgctgtagttggaaaaacccacgaagcggctgagtctaccaaagaaggagctcagatagcttcagagaaagcggttggagcaaaggacgcaaccgtcgagaaagctaaggaaaccgctgattatactgcggagaaggtgggtgagtataaagactatacggttgataaagctaaagaggctaaggacacaactgcagagaaggcgaaggagactgctaattatactgcggataaggcggtggaagcaaaggataagacggcggagaagattggtgagtacaaagactatgcggtggataaggcagtagaagctaaagataagacagcggagaaggcgaaggagactgcgaattatacggcggataaggctaaagaggctaaggacaagacggctgagaaggttggtgagtataaggattacacggtggacaaggccgtggaagctagggattacacagcggagaaggctattgaagcaaaggataagacagctgagaagactggagagtataaggactatacggtggagaaggcgacggaggggaaagatgttacggtgagtaagctaggagagctgaaggatagtgccgttgagacagcgaagagagctatgggtttcttgtcggggaagacagaggaggccaaaggaaaagctgtggagaccaaagatactgccaaggaaaacatggagaaagctggagaagtaacaagacaaaagatggaggaaatgagattggaaggtaaagagctcaaagaagaagctggagcaaaagcccaagaggcatctcaaaagactagggagagtactgagtcgggagctcaaaaagccgaagagaccaaagattctgctgccgtgaggggaaatgaagcgaaagggactatttttggtgcattagggaatgtaacggaagcaataaagagcaaactgacaatgccatcagacattgtggaggaaacacgcgcggcacgtgagcatggagggacgggtaggactgtggttgaagtcaaggtcgaggattcaaagccgggtaaggtggcgacttcactgaaggcgtcggatcaaatgaccggtcaaacattcaacgacgttggacggatggatgatgatgctcggaaagataagggaaagctgtgagaatactagaaaaatgacaatgttttttgggccttttgttctggatgaatatctctgttgttttttgggccttttgttttggatacgtctgttatagcagataacgttttctgatagtttctatgtttgtattcttgttttggaataggaaagctttcttcagtt

SEQ ID NO: 89556 - protein, 448 aa, Arabidopsis thaliana
  peptide (1)..(448): Ceres Seq. ID no. 12719573
  misc_feature (287)..(359): Pfam Name: Late embryogenesis abundant protein Pfam Description: Late embryogenesis abundant protein
  misc_feature (1)..(448): Homolog of NCBI NO: 15228014 NR Description: late embryogenesis abundant protein (AtECP63); id: At2g36640.1, supported by cDNA: gi_1526423 [Arabidopsis >gi|25307676|pir||H84782 late embryogenesis abundant protein
  misc_feature (1)..(448): Homolog of NCBI NO: 7487938 NR Description: late embryogenesis abundant protein - Arabidopsis >gi|1526424|dbj|BAA11017.1| LEA protein in group 3 [Arabidopsis
  misc_feature (70)..(442): Homolog of NCBI NO: 15231736 NR Description: late embryogenesis abundant protein - like; id: At3g53040.1, supported by cDNA: gi_18175756, supported by gi_20465916 [Arabidopsis thaliana] >gi|11358481|pir||T47561 late
  misc_feature (2)..(365): Homolog of NCBI NO: 15231736 NR Description: late embryogenesis abundant protein - like; id: At3g53040.1, supported by cDNA: gi_18175756, supported by gi_20465916 [Arabidopsis thaliana] >gi|11358481|pir||T47561 late
  misc_feature (1)..(440): Homolog of NCBI NO: 282899 NR Description: embryonic abundant protein, 59K - soybean maturation polypeptide >gi|384333|prf||1905420A late
  misc_feature (6)..(440): Homolog of NCBI NO: 119127 NR Description: Embryonic protein DC-8 >gi|82044|pir||S04909
  misc_feature (1)..(448): Homolog of NCBI NO: 481805 NR Description: embryonic protein BP8 - European white birch
  misc_feature (300)..(448): Homolog of NCBI NO: 26451786 NR Description: putative f13k3 late embryogenesis abundant AtECP63 [Arabidopsis thaliana] >gi|28372836|gb|AAO39900.1|
  misc_feature (1)..(360): Homolog of NCBI NO: 481805 NR Description: embryonic protein BP8 - European white birch
  misc_feature (1)..(395): Homolog of NCBI NO: 119127 NR Description: Embryonic protein DC-8 >gi|82044|pir||S04909
MASDKQKAERAEVAARLAAEDLHDINKSGGADVTMYKVTERTTEHPPEQDRPGVIGSVFRAVQGTYEHARDAVVGKTHEAAESTKEGAQIASEKAVGAKDATVEKAKETADYTAEKVGEYKDYTVDKAKEAKDTTAEKAKETANYTADKAVEAKDKTAEKIGEYKDYAVDKAVEAKDKTAEKAKETANYTADKAKEAKDKTAEKVGEYKDYTVDKAVEARDYTAEKAIEAKDKTAEKTGEYKDYTVEKATEGKDVTVSKLGELKDSAVETAKRAMGFLSGKTEEAKGKAVETKDTAKENMEKAGEVTRQKMEEMRLEGKELKEEAGAKAQEASQKTRESTESGAQKAEETKDSAAVRGNEAKGTIFGALGNVTEAIKSKLTMPSDIVEETRAAREHGGTGRTVVEVKVEDSKPGKVATSLKASDQMTGQTFNDVGRMDDDARKDKGKL

SEQ ID NO: 89557 - protein, 414 aa, Arabidopsis thaliana
  peptide (1)..(414): Ceres Seq. ID no. 12719574
  misc_feature (253)..(325): Pfam Name: Late embryogenesis abundant protein Pfam Description: Late embryogenesis abundant protein
  misc_feature (1)..(414): Homolog of NCBI NO: 15228014 NR Description: late embryogenesis abundant protein (AtECP63); id: At2g36640.1, supported by cDNA: gi_1526423 [Arabidopsis >gi|25307676|pir||H84782 late embryogenesis abundant protein
  misc_feature (1)..(414): Homolog of NCBI NO: 7487938 NR Description: late embryogenesis abundant protein - Arabidopsis >gi|1526424|dbj|BAA11017.1| LEA protein in group 3 [Arabidopsis
  misc_feature (36)..(408): Homolog of NCBI NO: 15231736 NR Description: late embryogenesis abundant protein - like; id: At3g53040.1, supported by cDNA: gi_18175756, supported by gi_20465916 [Arabidopsis thaliana] >gi|11358481|pir||T47561 late
  misc_feature (1)..(331): Homolog of NCBI NO: 15231736 NR Description: late embryogenesis abundant protein - like; id: At3g53040.1, supported by cDNA: gi_18175756, supported by gi_20465916 [Arabidopsis thaliana] >gi|11358481|pir||T47561 late
  misc_feature (1)..(406): Homolog of NCBI NO: 282899 NR Description: embryonic abundant protein, 59K - soybean maturation polypeptide >gi|384333|prf||1905420A late
  misc_feature (1)..(406): Homolog of NCBI NO: 119127 NR Description: Embryonic protein DC-8 >gi|82044|pir||S04909
  misc_feature (1)..(414): Homolog of NCBI NO: 481805 NR Description: embryonic protein BP8 - European white birch
  misc_feature (266)..(414): Homolog of NCBI NO: 26451786 NR Description: putative f13k3 late embryogenesis abundant AtECP63 [Arabidopsis thaliana] >gi|28372836|gb|AAO39900.1|
  misc_feature (1)..(326): Homolog of NCBI NO: 481805 NR Description: embryonic protein BP8 - European white birch
  misc_feature (1)..(361): Homolog of NCBI NO: 119127 NR Description: Embryonic protein DC-8 >gi|82044|pir||S04909
MYKVTERTTEHPPEQDRPGVIGSVFRAVQGTYEHARDAVVGKTHEAAESTKEGAQIASEKAVGAKDATVEKAKETADYTAEKVGEYKDYTVDKAKEAKDTTAEKAKETANYTADKAVEAKDKTAEKIGEYKDYAVDKAVEAKDKTAEKAKETANYTADKAKEAKDKTAEKVGEYKDYTVDKAVEARDYTAEKAIEAKDKTAEKTGEYKDYTVEKATEGKDVTVSKLGELKDSAVETAKRAMGFLSGKTEEAKGKAVETKDTAKENMEKAGEVTRQKMEEMRLEGKELKEEAGAKAQEASQKTRESTESGAQKAEETKDSAAVRGNEAKGTIFGALGNVTEAIKSKLTMPSDIVEETRAAREHGGTGRTVVEVKVEDSKPGKVATSLKASDQMTGQTFNDVGRMDDDARKDKGKL

SEQ ID NO: 89558 - DNA, 862 bp, Arabidopsis thaliana
  misc_feature (1)..(862): Ceres Seq. ID no. 12719579
  misc_feature: MA Experiment ID: 20000182 Result: Up-regulated in Transcription
  misc_feature: MA Experiment 20000182 PARAMETER Experiment Name: At_2mM_SA_P Parameter: Age (day) Value: 14
  misc_feature: MA Experiment 20000182 PARAMETER Experiment Name: At_2mM_SA_P Parameter: Organism Value: A. thaliana
  misc_feature: MA Experiment 20000182 PARAMETER Experiment Name: At_2mM_SA_P Parameter: Plant Line Value: WS
  misc_feature: MA Experiment 20000182 PARAMETER Experiment Name: At_2mM_SA_P Parameter: Timepoint (hr) Value: 6
  misc_feature: MA Experiment 20000182 PARAMETER Experiment Name: At_2mM_SA_P Parameter: Tissue Value: Aerial
  misc_feature: MA Experiment 20000182 PARAMETER Experiment Name: At_2mM_SA_P Parameter: Treatment Value: 2mM SA vs. No Treatment
  misc_feature: MA Experiment ID: 20000184 Result: Down-regulated in Transcription
  misc_feature: MA Experiment 20000184 PARAMETER Experiment Name: At_Shoots__P Parameter: Age (day) Value: 7
  misc_feature: MA Experiment 20000184 PARAMETER Experiment Name: At_Shoots__P Parameter: Tissue Value: Shoots vs. Whole Plant
  misc_feature: MA Experiment ID: 20000437 Result: Up-regulated in Transcription
  misc_feature: MA Experiment 20000437 PARAMETER Experiment Name: At_Drought_P Parameter: Age (day) Value: 8
  misc_feature: MA Experiment 20000437 PARAMETER Experiment Name: At_Drought_P Parameter: Organism Value: A. thaliana
  misc_feature: MA Experiment 20000437 PARAMETER Experiment Name: At_Drought_P Parameter: Plant Line Value: WS
  misc_feature: MA Experiment 20000437 PARAMETER Experiment Name: At_Drought_P Parameter: Timepoint (hr) Value: 24
  misc_feature: MA Experiment 20000437 PARAMETER Experiment Name: At_Drought_P Parameter: Tissue Value: Whole Plant
  misc_feature: MA Experiment 20000437 PARAMETER Experiment Name: At_Drought_P Parameter: Treatment Value: Drought vs. No Drought
atctgctgaataacaacagtgattggctcttctgattagcaagcttcttcttttcgaaatcgcatcactttggctgatcggtggattctacgaaccatgttcaatttctggggatcaaaagaacagcaacaaggacaatctcgtccttctccagaagcttctgcaacaccgtggtattcgccgtctcttgtcacctctcctagctcatcccggcctcaaacctcagggcagattccatcacatgtttcaccaggtgaagccgccggcattattgccattttaaaagacaaaagtgtggatgagcttaggaagcttctctctgacaaggatgcgtatcaacagtttctgcactcgcttgaccaggtcactattcaaaacaatatcagagaagagcttcgcaaagaaacgttacatctagctagagaaaacttggagaaggaaccacagatagtggagctcagaaaccaaaataatccgtacatccgagcttgcgactgctcaagagaagctcaatgagcttgagaatcaaagagaagagatcctcaaattctactctccaggttctcttcttcatagacttcaagatgctatgaaccaggtggatgaagaatcagaggagctgcaacagaagtttatggagaaggatattgacacagctgcatttgtgcagaaatacaaaaagctaagaagcaagtatcatcgacgggctttgattcatctcgctgctaaaacttcatctattggctgaaaacaaacttacacgttttgttttttttgcttccgaccttaattcgatgtgtaagtaaacaaaactggttaaaagtcgagatctatatacgagatcaatatatatcattgtatt

SEQ ID NO: 89559 - protein, 139 aa, Arabidopsis thaliana
  peptide (1)..(139): Ceres Seq. ID no. 12719580
  misc_feature (1)..(139): Homolog of NCBI NO: 30686868 NR Description: expressed protein [Arabidopsis thaliana] At2g36680/F13K3.8 [Arabidopsis thaliana]
  misc_feature (1)..(131): Homolog of NCBI NO: 30686871 NR Description: expressed protein [Arabidopsis thaliana]
  misc_feature (118)..(139): Homolog of NCBI NO: 30686871 NR Description: expressed protein [Arabidopsis thaliana]
  misc_feature (1)..(131): Homolog of NCBI NO: 25408498 NR Description: hypothetical protein At2g36680 [imported] - thaliana >gi|4415913|gb|AAD20144.1| unknown protein [Arabidopsis
  misc_feature (118)..(139): Homolog of NCBI NO: 25408498 NR Description: hypothetical protein At2g36680 [imported] - thaliana >gi|4415913|gb|AAD20144.1| unknown protein [Arabidopsis
  misc_feature (1)..(139): Homolog of NCBI NO: 15231750 NR Description: putative protein; protein id: At3g53120.1
MFNFWGSKEQQQGQSRPSPEASATPWYSPSLVTSPSSSRPQTSGQIPSHVSPGEAAGIIAILKDKSVDELRKLLSDKDAYQQFLHSLDQVTIQNNIREELRKETLHLARENLEKEPQIVELRNQNNPYIRACDCSREAQ

SEQ ID NO: 89560 - DNA, 1506 bp, Arabidopsis thaliana
  misc_feature (1)..(1506): Ceres Seq. ID no. 12719591
  misc_feature: MA Experiment ID: 20000227 Result: Up-regulated in Transcription
  misc_feature: MA Experiment 20000227 PARAMETER Experiment Name: At_Root-Tips-vs-Tops_P Parameter: Tissue Value: Root Tips vs. Root Tops
  misc_feature: MA Experiment ID: 20000495 Result: Up-regulated in Transcription
  misc_feature: MA Experiment 20000495 PARAMETER Experiment Name: At_Guard_Cells_P Parameter: Harvest Date Value: 8/2/2002
  misc_feature: MA Experiment 20000495 PARAMETER Experiment Name: At_Guard_Cells_P Parameter: Organism Value: A. thaliana
  misc_feature: MA Experiment 20000495 PARAMETER Experiment Name: At_Guard_Cells_P Parameter: Tissue Value: Guard Cells vs. Leaves
atgatttggagttcagattcatgcttcaaatccaggaaacaccaatgtcttatcttcctcaagctatgttcctcaattaaacaccttctacagatccatggtcaaatccatctctcctctctccaaaatgacagctttatcatcagcgagcttgtacgggtttcatcactatccctcgccaaagaccttgcctttgcgcgaacccttctgcttcactcttcagattcgactccttctacttggaatatgctcagtagaggctattcttcaagtgattctcctgtggaatcgatttgggtttactctgagatgaagagacgaggaatcaaacctaataagctcacttttccttttcttctcaaggcttgtgcttcgtttttaggtctcactgctgggagacagattcaagttgaggttttgaaacatgggtttgattttgatgtatatgttgggaacaatttgatccatctttatggtacttgtaagaaaacttctgatgccaggaaggtgttcgacgaaatgactgagagaaatgttgtttcttggaactcgattatgactgctcttgttgagaatggtaagttaaatttggtgtttgagtgtttttgtgagatgattggtaagcggttttgtccagatgagacgacaatggtggttttgctttcggcttgtggcggtaacttgagcttggggaaattggtgcattcacaggtgatggtaagagagttagagttaaactgtagactaggtactgcacttgtagacatgtatgcaaaatcaggtggattagagtatgctaggttagttttcgaaagaatggttgacaaaaatgtttggacttggagtgccatgattgtaggattagcacaatatggatttgcagaagaagcccttcaactattctcgaagatgatgaaagaatcatcggtgagaccaaactacgtaacatttctcggtgttttatgcgcttgtagccacacgggattggtggatgacgggtacaaatatttccacgaaatggagaaaatacacaagatcaaaccaatgatgattcactacggagcaatggtagatatcttgggacgtgcaggtcgactaaacgaggcgtatgacttcataaagaaaatgccttttgagcctgatgcggttgtttggaggactctactctccgcttgtagtatccatcacgatgaagatgatgagggaattggtgagaaagtaaagaagagattgattgagttagaaccaaagaggagtgggaatttggtgattgtggcgaataggtttgcggaagcgaggatgtgggctgaggcagcagaagttaggagagtaatgaaggaaactaagatgaagaagatcgccggagagagttgtctagagctaggagggtcgtttcatagattcttctcagggtatgatcctcgttctgaatatgtatccatctatgaattattagatttgttcaagtttcagttgacatgtgactatcgtttggtgtccgaatga

SEQ ID NO: 89561 - protein, 501 aa, Arabidopsis thaliana
  peptide (1)..(501): Ceres Seq. ID no. 12719592
  misc_feature (180)..(214): Pfam Name: PPR repeat Pfam Description: PPR repeat
  misc_feature (1)..(501): Homolog of NCBI NO: 15228026 NR Description: hypothetical protein; protein id: At2g36730.1
  misc_feature (17)..(486): Homolog of NCBI NO: 15227067 NR Description: hypothetical protein; protein id: At2g02980.1
  misc_feature (15)..(485): Homolog of NCBI NO: 7486979 NR Description: hypothetical protein T13K14.230 - Arabidopsis
  misc_feature (17)..(486): Homolog of NCBI NO: 21780142 NR Description: hypothetical protein [Arabidopsis thaliana]
  misc_feature (13)..(485): Homolog of NCBI NO: 34393394 NR Description: putative pentatricopeptide (PPR)
  misc_feature (7)..(492): Homolog of NCBI NO: 25346319 NR Description: hypothetical protein F23H11.3 [imported] - thaliana >gi|5080805|gb|AAD39314.1|AC007258_3 Hypothetical
  misc_feature (4)..(492): Homolog of NCBI NO: 15218900 NR Description: hypothetical protein; protein id: At1g59720.1
  misc_feature (14)..(492): Homolog of NCBI NO: 8778758 NR Description: T30E16.32 [Arabidopsis thaliana]
  misc_feature (31)..(492): Homolog of NCBI NO: 15222917 NR Description: hypothetical protein; protein id: At1g50270.1
  misc_feature (24)..(486): Homolog of NCBI NO: 15226299 NR Description: hypothetical protein; protein id: At2g01510.1
MIWSSDSCFKSRKHQCLIFLKLCSSIKHLLQIHGQIHLSSLQNDSFIISELVRVSSLSLAKDLAFARTLLLHSSDSTPSTWNMLSRGYSSSDSPVESIWVYSEMKRRGIKPNKLTFPFLLKACASFLGLTAGRQIQVEVLKHGFDFDVYVGNNLIHLYGTCKKTSDARKVFDEMTERNVVSWNSIMTALVENGKLNLVFECFCEMIGKRFCPDETTMVVLLSACGGNLSLGKLVHSQVMVRELELNCRLGTALVDMYAKSGGLEYARLVFERMVDKNVWTWSAMIVGLAQYGFAEEALQLFSKMMKESSVRPNYVTFLGVLCACSHTGLVDDGYKYFHEMEKIHKIKPMMIHYGAMVDILGRAGRLNEAYDFIKKMPFEPDAVVWRTLLSACSIHHDEDDEGIGEKVKKRLIELEPKRSGNLVIVANRFAEARMWAEAAEVRRVMKETKMKKIAGESCLELGGSFHRFFSGYDPRSEYVSIYELLDLFKFQLTCDYRLVSE

SEQ ID NO: 89562 - protein, 419 aa, Arabidopsis thaliana
  peptide (1)..(419): Ceres Seq. ID no. 12719593
  misc_feature (98)..(132): Pfam Name: PPR repeat Pfam Description: PPR repeat
  misc_feature (1)..(419): Homolog of NCBI NO: 15228026 NR Description: hypothetical protein; protein id: At2g36730.1
  misc_feature (1)..(404): Homolog of NCBI NO: 15227067 NR Description: hypothetical protein; protein id: At2g02980.1
  misc_feature (1)..(403): Homolog of NCBI NO: 7486979 NR Description: hypothetical protein T13K14.230 - Arabidopsis
  misc_feature (1)..(404): Homolog of NCBI NO: 21780142 NR Description: hypothetical protein [Arabidopsis thaliana]
  misc_feature (1)..(403): Homolog of NCBI NO: 34393394 NR Description: putative pentatricopeptide (PPR)
  misc_feature (1)..(410): Homolog of NCBI NO: 25346319 NR Description: hypothetical protein F23H11.3 [imported] - thaliana >gi|5080805|gb|AAD39314.1|AC007258_3 Hypothetical
  misc_feature (1)..(410): Homolog of NCBI NO: 15218900 NR Description: hypothetical protein; protein id: At1g59720.1
  misc_feature (1)..(410): Homolog of NCBI NO: 8778758 NR Description: T30E16.32 [Arabidopsis thaliana]
  misc_feature (1)..(410): Homolog of NCBI NO: 15222917 NR Description: hypothetical protein; protein id: At1g50270.1
  misc_feature (1)..(404): Homolog of NCBI NO: 15226299 NR Description: hypothetical protein; protein id: At2g01510.1
MLSRGYSSSDSPVESIWVYSEMKRRGIKPNKLTFPFLLKACASFLGLTAGRQIQVEVLKHGFDFDVYVGNNLIHLYGTCKKTSDARKVFDEMTERNVVSWNSIMTALVENGKLNLVFECFCEMIGKRFCPDETTMVVLLSACGGNLSLGKLVHSQVMVRELELNCRLGTALVDMYAKSGGLEYARLVFERMVDKNVWTWSAMIVGLAQYGFAEEALQLFSKMMKESSVRPNYVTFLGVLCACSHTGLVDDGYKYFHEMEKIHKIKPMMIHYGAMVDILGRAGRLNEAYDFIKKMPFEPDAVVWRTLLSACSIHHDEDDEGIGEKVKKRLIELEPKRSGNLVIVANRFAEARMWAEAAEVRRVMKETKMKKIAGESCLELGGSFHRFFSGYDPRSEYVSIYELLDLFKFQLTCDYRLVSE

SEQ ID NO: 89563 - protein, 398 aa, Arabidopsis thaliana
  peptide (1)..(398): Ceres Seq. ID no. 12719594
  misc_feature (77)..(111): Pfam Name: PPR repeat Pfam Description: PPR repeat
  misc_feature (1)..(398): Homolog of NCBI NO: 15228026 NR Description: hypothetical protein; protein id: At2g36730.1
  misc_feature (1)..(383): Homolog of NCBI NO: 15227067 NR Description: hypothetical protein; protein id: At2g02980.1
  misc_feature (1)..(382): Homolog of NCBI NO: 7486979 NR Description: hypothetical protein T13K14.230 - Arabidopsis
  misc_feature (1)..(383): Homolog of NCBI NO: 21780142 NR Description: hypothetical protein [Arabidopsis thaliana]
  misc_feature (1)..(382): Homolog of NCBI NO: 34393394 NR Description: putative pentatricopeptide (PPR)
  misc_feature (1)..(389): Homolog of NCBI NO: 25346319 NR Description: hypothetical protein F23H11.3 [imported] - thaliana >gi|5080805|gb|AAD39314.1|AC007258_3 Hypothetical
  misc_feature (1)..(389): Homolog of NCBI NO: 15218900 NR Description: hypothetical protein; protein id: At1g59720.1
  misc_feature (1)..(389): Homolog of NCBI NO: 8778758 NR Description: T30E16.32 [Arabidopsis thaliana]
  misc_feature (1)..(389): Homolog of NCBI NO: 15222917 NR Description: hypothetical protein; protein id: At1g50270.1
  misc_feature (1)..(383): Homolog of NCBI NO: 15226299 NR Description: hypothetical protein; protein id: At2g01510.1
MKRRGIKPNKLTFPFLLKACASFLGLTAGRQIQVEVLKHGFDFDVYVGNNLIHLYGTCKKTSDARKVFDEMTERNVVSWNSIMTALVENGKLNLVFECFCEMIGKRFCPDETTMVVLLSACGGNLSLGKLVHSQVMVRELELNCRLGTALVDMYAKSGGLEYARLVFERMVDKNVWTWSAMIVGLAQYGFAEEALQLFSKMMKESSVRPNYVTFLGVLCACSHTGLVDDGYKYFHEMEKIHKIKPMMIHYGAMVDILGRAGRLNEAYDFIKKMPFEPDAVVWRTLLSACSIHHDEDDEGIGEKVKKRLIELEPKRSGNLVIVANRFAEARMWAEAAEVRRVMKETKMKKIAGESCLELGGSFHRFFSGYDPRSEYVSIYELLDLFKFQLTCDYRLVSE

SEQ ID NO: 89564 - DNA, 1476 bp, Arabidopsis thaliana
  misc_feature (1)..(1476): Ceres Seq. ID no. 12719595
  misc_feature: MA Experiment ID: 20000306 Result: Down-regulated in Transcription
  misc_feature: MA Experiment 20000306 PARAMETER Experiment Name: At_Germinating_Seeds_Sub_P Parameter: Age (hr) Value: 6 vs. 0
  misc_feature: MA Experiment 20000306 PARAMETER Experiment Name: At_Germinating_Seeds_Sub_P Parameter: Organism Value: A. thaliana
  misc_feature: MA Experiment 20000306 PARAMETER Experiment Name: At_Germinating_Seeds_Sub_P Parameter: Plant Line Value: WS
  misc_feature: MA Experiment 20000306 PARAMETER Experiment Name: At_Germinating_Seeds_Sub_P Parameter: Tissue Value: Germinating Seeds
  misc_feature: MA Experiment ID: 20000307 Result: Down-regulated in Transcription
  misc_feature: MA Experiment 20000307 PARAMETER Experiment Name: At_Germinating_Seeds_Sub_P Parameter: Age (hr) Value: 24 vs. 0
  misc_feature: MA Experiment 20000307 PARAMETER Experiment Name: At_Germinating_Seeds_Sub_P Parameter: Organism Value: A. thaliana
  misc_feature: MA Experiment 20000307 PARAMETER Experiment Name: At_Germinating_Seeds_Sub_P Parameter: Plant Line Value: WS
  misc_feature: MA Experiment 20000307 PARAMETER Experiment Name: At_Germinating_Seeds_Sub_P Parameter: Tissue Value: Germinating Seeds
  misc_feature: MA Experiment ID: 20000327 Result: Up-regulated in Transcription
  misc_feature: MA Experiment 20000327 PARAMETER Experiment Name: At_42deg_Heat_Sub_P Parameter: Age (day) Value: 14
  misc_feature: MA Experiment 20000327 PARAMETER Experiment Name: At_42deg_Heat_Sub_P Parameter: Organism Value: A. thaliana
  misc_feature: MA Experiment 20000327 PARAMETER Experiment Name: At_42deg_Heat_Sub_P Parameter: Plant Line Value: WS
  misc_feature: MA Experiment 20000327 PARAMETER Experiment Name: At_42deg_Heat_Sub_P Parameter: Temperature (deg C) Value: 42 vs. 22
  misc_feature: MA Experiment 20000327 PARAMETER Experiment Name: At_42deg_Heat_Sub_P Parameter: Timepoint (hr) Value: 1
  misc_feature: MA Experiment 20000327 PARAMETER Experiment Name: At_42deg_Heat_Sub_P Parameter: Tissue Value: Aerial
  misc_feature: MA Experiment ID: 20000328 Result: Up-regulated in Transcription
  misc_feature: MA Experiment 20000328 PARAMETER Experiment Name: At_42deg_Heat_Sub_P Parameter: Age (day) Value: 14
  misc_feature: MA Experiment 20000328 PARAMETER Experiment Name: At_42deg_Heat_Sub_P Parameter: Organism Value: A. thaliana
  misc_feature: MA Experiment 20000328 PARAMETER Experiment Name: At_42deg_Heat_Sub_P Parameter: Plant Line Value: WS
  misc_feature: MA Experiment 20000328 PARAMETER Experiment Name: At_42deg_Heat_Sub_P Parameter: Temperature (deg C) Value: 42 vs. 22
  misc_feature: MA Experiment 20000328 PARAMETER Experiment Name: At_42deg_Heat_Sub_P Parameter: Timepoint (hr) Value: 6
  misc_feature: MA Experiment 20000328 PARAMETER Experiment Name: At_42deg_Heat_Sub_P Parameter: Tissue Value: Aerial
  misc_feature: MA Experiment ID: 20000346 Result: Up-regulated in Transcription
  misc_feature: MA Experiment 20000346 PARAMETER Experiment Name: At_2mM_SA_Sub_P Parameter: Age (day) Value: 14
  misc_feature: MA Experiment 20000346 PARAMETER Experiment Name: At_2mM_SA_Sub_P Parameter: Organism Value: A. thaliana
  misc_feature: MA Experiment 20000346 PARAMETER Experiment Name: At_2mM_SA_Sub_P Parameter: Plant Line Value: WS
  misc_feature: MA Experiment 20000346 PARAMETER Experiment Name: At_2mM_SA_Sub_P Parameter: Timepoint (hr) Value: 1
  misc_feature: MA Experiment 20000346 PARAMETER Experiment Name: At_2mM_SA_Sub_P Parameter: Tissue Value: Aerial
  misc_feature: MA Experiment 20000346 PARAMETER Experiment Name: At_2mM_SA_Sub_P Parameter: Treatment Value: 2mM SA vs. No Treatment
  misc_feature: MA Experiment ID: 20000347 Result: Up-regulated in Transcription
  misc_feature: MA Experiment 20000347 PARAMETER Experiment Name: At_2mM_SA_Sub_P Parameter: Age (day) Value: 14
  misc_feature: MA Experiment 20000347 PARAMETER Experiment Name: At_2mM_SA_Sub_P Parameter: Organism Value: A. thaliana
  misc_feature: MA Experiment 20000347 PARAMETER Experiment Name: At_2mM_SA_Sub_P Parameter: Plant Line Value: WS
  misc_feature: MA Experiment 20000347 PARAMETER Experiment Name: At_2mM_SA_Sub_P Parameter: Timepoint (hr) Value: 6
  misc_feature: MA Experiment 20000347 PARAMETER Experiment Name: At_2mM_SA_Sub_P Parameter: Tissue Value: Aerial
  misc_feature: MA Experiment 20000347 PARAMETER Experiment Name: At_2mM_SA_Sub_P Parameter: Treatment Value: 2mM SA vs. No Treatment
  misc_feature: MA Experiment ID: 20000440 Result: Up-regulated in Transcription
  misc_feature: MA Experiment 20000440 PARAMETER Experiment Name: At_Closed-Flower__Sub_P Parameter: Tissue Value: Closed Flower vs. Whole Plant
atggcatcggaatttcgtcctcctcttcattttgttctcttccctttcatggctcaaggccacatgatcccaatggtagatattgcaaggctcctggctcagcgcggggtgactataaccattgtcactacacctcaaaacgcaggccggttcaagaacgttcttagccgggctatccaatccggcttgcccatcaatctcgtgcaagtaaagtttccatctcaagaatcgggttcaccggaaggacaggagaatttggacttgctcgattcattgggggcttcattaaccttcttcaaagcatttagcctgctcgaggaaccagtcgagaagctcttgaaagagattcaacctaggccaaactgcataatcgctgacatgtgtttgccttatacaaacagaattgccaagaatcttggtataccaaaaatcatctttcatggcatgtgttgcttcaatcttctttgtacgcacataatgcaccaaaaccacgagttcttggaaactatagagtctgacaaggaatacttccccattcctaatttccctgacagagttgagttcacaaaatctcagcttccaatggtattagttgctggagattggaaagacttccttgacggaatgacagaaggggataacacttcttatggtgtgattgttaacacgtttgaagagctcgagccagcttatgttagagactacaagaaggttaaagcgggtaagatatggagcatcggaccggtttccttgtgcaacaagttaggagaagaccaagctgagaggggaaacaaggcggacattgatcaagacgagtgtattaaatggcttgattctaaagaagaagggtcggtgctatatgtttgccttggaagtatatgcaatcttcctctgtctcagctcaaagagctcggcttaggcctcgaggaatcccaaagacctttcatttgggtcataagaggttgggagaagtataacgagttacttgaatggatctcagagagcggttataaggaaagaatcaaagaaagaggccttctcataacaggatggtcgcctcaaatgcttatccttacacatcctgccgttggaggattcttgacacattgtggatggaactctactcttgaaggaatcacttcaggcgttccattactcacgtggccactgtttggagaccaattctgcaatgagaaattggcggtgcagatactaaaagccggtgtgagagctggggttgaagagtccatgagatggggagaagaggagaaaataggagtactggtggataaagaaggagtaaagaaggcagtggaggaattgatgggtgatagtaatgatgctaaggagagaagaaaaagagtgaaagagcttggagaattagctcacaaggctgtggaagaaggaggctcttctcattccaacatcacattcttgctacaagacataatgcaattagaacaacccaagaaatga

SEQ ID NO: 89565 - protein, 491 aa, Arabidopsis thaliana
  peptide (1)..(491): Ceres Seq. ID no. 12719596
  misc_feature (10)..(491): Pfam Name: UDP-glucoronosyl and UDP-glucosyl transferase Pfam Description: UDP-glucoronosyl and UDP-glucosyl transferase
  misc_feature (1)..(491): Homolog of NCBI NO: 15228031 NR Description: putative glucosyl transferase; protein id: [Arabidopsis thaliana] >gi|25286801|pir||C84784 probable glucosyl
  misc_feature (8)..(489): Homolog of NCBI NO: 15228037 NR Description: putative glucosyl transferase; protein id: supported by cDNA: gi_17065333 [Arabidopsis thaliana]
  misc_feature (4)..(490): Homolog of NCBI NO: 15228034 NR Description: putative glucosyl transferase; protein id: supported by cDNA: gi_15028388, supported by cDNA: gi_19310660
  misc_feature (1)..(490): Homolog of NCBI NO: 15228033 NR Description: putative glucosyl transferase; protein id: supported by cDNA: gi_20856889 [Arabidopsis thaliana]
  misc_feature (8)..(488): Homolog of NCBI NO: 15228035 NR Description: putative glucosyl transferase; protein id: [Arabidopsis thaliana] >gi|25286803|pir||G84784 probable glucosyl
  misc_feature (8)..(488): Homolog of NCBI NO: 26450153 NR Description: putative glucosyl transferase [Arabidopsis
  misc_feature (4)..(490): Homolog of NCBI NO: 15228032 NR Description: putative glucosyl transferase; protein id: [Arabidopsis thaliana] >gi|25286791|pir||D84784 probable glucosyl
  misc_feature (8)..(488): Homolog of NCBI NO: 15231758 NR Description: glucosyltransferase - like protein; protein id:
  misc_feature (22)..(488): Homolog of NCBI NO: 19911211 NR Description: glucosyltransferase-14 [Vigna angularis]
  misc_feature (10)..(491): Homolog of NCBI NO: 19911201 NR Description: glucosyltransferase-9 [Vigna angularis]
MASEFRPPLHFVLFPFMAQGHMIPMVDIARLLAQRGVTITIVTTPQNAGRFKNVLSRAIQSGLPINLVQVKFPSQESGSPEGQENLDLLDSLGASLTFFKAFSLLEEPVEKLLKEIQPRPNCIIADMCLPYTNRIAKNLGIPKIIFHGMCCFNLLCTHIMHQNHEFLETIESDKEYFPIPNFPDRVEFTKSQLPMVLVAGDWKDFLDGMTEGDNTSYGVIVNTFEELEPAYVRDYKKVKAGKIWSIGPVSLCNKLGEDQAERGNKADIDQDECIKWLDSKEEGSVLYVCLGSICNLPLSQLKELGLGLEESQRPFIWVIRGWEKYNELLEWISESGYKERIKERGLLITGWSPQMLILTHPAVGGFLTHCGWNSTLEGITSGVPLLTWPLFGDQFCNEKLAVQILKAGVRAGVEESMRWGEEEKIGVLVDKEGVKKAVEELMGDSNDAKERRKRVKELGELAHKAVEEGGSSHSNITFLLQDIMQLEQPKK

SEQ ID NO: 89566 - protein, 475 aa, Arabidopsis thaliana
  peptide (1)..(475): Ceres Seq. ID no. 12719597
  misc_feature (1)..(475): Pfam Name: UDP-glucoronosyl and UDP-glucosyl transferase Pfam Description: UDP-glucoronosyl and UDP-glucosyl transferase
  misc_feature (1)..(475): Homolog of NCBI NO: 15228031 NR Description: putative glucosyl transferase; protein id: [Arabidopsis thaliana] >gi|25286801|pir||C84784 probable glucosyl
  misc_feature (1)..(473): Homolog of NCBI NO: 15228037 NR Description: putative glucosyl transferase; protein id: supported by cDNA: gi_17065333 [Arabidopsis thaliana]
  misc_feature (1)..(474): Homolog of NCBI NO: 15228034 NR Description: putative glucosyl transferase; protein id: supported by cDNA: gi_15028388, supported by cDNA: gi_19310660
  misc_feature (1)..(474): Homolog of NCBI NO: 15228033 NR Description: putative glucosyl transferase; protein id: supported by cDNA: gi_20856889 [Arabidopsis thaliana]
  misc_feature (1)..(472): Homolog of NCBI NO: 15228035 NR Description: putative glucosyl transferase; protein id: [Arabidopsis thaliana] >gi|25286803|pir||G84784 probable glucosyl
  misc_feature (1)..(472): Homolog of NCBI NO: 26450153 NR Description: putative glucosyl transferase [Arabidopsis
  misc_feature (1)..(474): Homolog of NCBI NO: 15228032 NR Description: putative glucosyl transferase; protein id: [Arabidopsis thaliana] >gi|25286791|pir||D84784 probable glucosyl
  misc_feature (1)..(472): Homolog of NCBI NO: 15231758 NR Description: glucosyltransferase - like protein; protein id:
  misc_feature (6)..(472): Homolog of NCBI NO: 19911211 NR Description: glucosyltransferase-14 [Vigna angularis]
  misc_feature (1)..(475): Homolog of NCBI NO: 19911201 NR Description: glucosyltransferase-9 [Vigna angularis]
MAQGHMIPMVDIARLLAQRGVTITIVTTPQNAGRFKNVLSRAIQSGLPINLVQVKFPSQESGSPEGQENLDLLDSLGASLTFFKAFSLLEEPVEKLLKEIQPRPNCIIADMCLPYTNRIAKNLGIPKIIFHGMCCFNLLCTHIMHQNHEFLETIESDKEYFPIPNFPDRVEFTKSQLPMVLVAGDWKDFLDGMTEGDNTSYGVIVNTFEELEPAYVRDYKKVKAGKIWSIGPVSLCNKLGEDQAERGNKADIDQDECIKWLDSKEEGSVLYVCLGSICNLPLSQLKELGLGLEESQRPFIWVIRGWEKYNELLEWISESGYKERIKERGLLITGWSPQMLILTHPAVGGFLTHCGWNSTLEGITSGVPLLTWPLFGDQFCNEKLAVQILKAGVRAGVEESMRWGEEEKIGVLVDKEGVKKAVEELMGDSNDAKERRKRVKELGELAHKAVEEGGSSHSNITFLLQDIMQLEQPKK

SEQ ID NO: 89567 - protein, 470 aa, Arabidopsis thaliana
  peptide (1)..(470): Ceres Seq. ID no. 12719598
  misc_feature (1)..(470): Pfam Name: UDP-glucoronosyl and UDP-glucosyl transferase Pfam Description: UDP-glucoronosyl and UDP-glucosyl transferase
  misc_feature (1)..(470): Homolog of NCBI NO: 15228031 NR Description: putative glucosyl transferase; protein id: [Arabidopsis thaliana] >gi|25286801|pir||C84784 probable glucosyl
  misc_feature (1)..(468): Homolog of NCBI NO: 15228037 NR Description: putative glucosyl transferase; protein id: supported by cDNA: gi_17065333 [Arabidopsis thaliana]
  misc_feature (1)..(469): Homolog of NCBI NO: 15228034 NR Description: putative glucosyl transferase; protein id: supported by cDNA: gi_15028388, supported by cDNA: gi_19310660
  misc_feature (1)..(469): Homolog of NCBI NO: 15228033 NR Description: putative glucosyl transferase; protein id: supported by cDNA: gi_20856889 [Arabidopsis thaliana]
  misc_feature (1)..(467): Homolog of NCBI NO: 15228035 NR Description: putative glucosyl transferase; protein id: [Arabidopsis thaliana] >gi|25286803|pir||G84784 probable glucosyl
  misc_feature (1)..(467): Homolog of NCBI NO: 26450153 NR Description: putative glucosyl transferase [Arabidopsis
  misc_feature (1)..(469): Homolog of NCBI NO: 15228032 NR Description: putative glucosyl transferase; protein id: [Arabidopsis thaliana] >gi|25286791|pir||D84784 probable glucosyl
  misc_feature (1)..(467): Homolog of NCBI NO: 15231758 NR Description: glucosyltransferase - like protein; protein id:
  misc_feature (1)..(467): Homolog of NCBI NO: 19911211 NR Description: glucosyltransferase-14 [Vigna angularis]
  misc_feature (1)..(470): Homolog of NCBI NO: 19911201 NR Description: glucosyltransferase-9 [Vigna angularis]
MIPMVDIARLLAQRGVTITIVTTPQNAGRFKNVLSRAIQSGLPINLVQVKFPSQESGSPEGQENLDLLDSLGASLTFFKAFSLLEEPVEKLLKEIQPRPNCIIADMCLPYTNRIAKNLGIPKIIFHGMCCFNLLCTHIMHQNHEFLETIESDKEYFPIPNFPDRVEFTKSQLPMVLVAGDWKDFLDGMTEGDNTSYGVIVNTFEELEPAYVRDYKKVKAGKIWSIGPVSLCNKLGEDQAERGNKADIDQDECIKWLDSKEEGSVLYVCLGSICNLPLSQLKELGLGLEESQRPFIWVIRGWEKYNELLEWISESGYKERIKERGLLITGWSPQMLILTHPAVGGFLTHCGWNSTLEGITSGVPLLTWPLFGDQFCNEKLAVQILKAGVRAGVEESMRWGEEEKIGVLVDKEGVKKAVEELMGDSNDAKERRKRVKELGELAHKAVEEGGSSHSNITFLLQDIMQLEQPKK

SEQ ID NO: 89568 - DNA, 1663 bp, Arabidopsis thaliana
  misc_feature (1)..(1663): Ceres Seq. ID no. 12719603
  misc_feature: MA Experiment ID: 20000307 Result: Down-regulated in Transcription
  misc_feature: MA Experiment 20000307 PARAMETER Experiment Name: At_Germinating_Seeds_Sub_P Parameter: Age (hr) Value: 24 vs. 0
  misc_feature: MA Experiment 20000307 PARAMETER Experiment Name: At_Germinating_Seeds_Sub_P Parameter: Organism Value: A. thaliana
  misc_feature: MA Experiment 20000307 PARAMETER Experiment Name: At_Germinating_Seeds_Sub_P Parameter: Plant Line Value: WS
  misc_feature: MA Experiment 20000307 PARAMETER Experiment Name: At_Germinating_Seeds_Sub_P Parameter: Tissue Value: Germinating Seeds
  misc_feature: MA Experiment ID: 20000315 Result: Down-regulated in Transcription
  misc_feature: MA Experiment 20000315 PARAMETER Experiment Name: At_14day_Shoots-Roots_Sub_P Parameter: Age (day) Value: 14
  misc_feature: MA Experiment 20000315 PARAMETER Experiment Name: At_14day_Shoots-Roots_Sub_P Parameter: Organism Value: A. thaliana
  misc_feature: MA Experiment 20000315 PARAMETER Experiment Name: At_14day_Shoots-Roots_Sub_P Parameter: Plant Line Value: WS
  misc_feature: MA Experiment 20000315 PARAMETER Experiment Name: At_14day_Shoots-Roots_Sub_P Parameter: Tissue Value: Shoots vs. Whole Plant
  misc_feature: MA Experiment ID: 20000346 Result: Up-regulated in Transcription
  misc_feature: MA Experiment 20000346 PARAMETER Experiment Name: At_2mM_SA_Sub_P Parameter: Age (day) Value: 14
  misc_feature: MA Experiment 20000346 PARAMETER Experiment Name: At_2mM_SA_Sub_P Parameter: Organism Value: A. thaliana
  misc_feature: MA Experiment 20000346 PARAMETER Experiment Name: At_2mM_SA_Sub_P Parameter: Plant Line Value: WS
  misc_feature: MA Experiment 20000346 PARAMETER Experiment Name: At_2mM_SA_Sub_P Parameter: Timepoint (hr) Value: 1
  misc_feature: MA Experiment 20000346 PARAMETER Experiment Name: At_2mM_SA_Sub_P Parameter: Tissue Value: Aerial
  misc_feature: MA Experiment 20000346 PARAMETER Experiment Name: At_2mM_SA_Sub_P Parameter: Treatment Value: 2mM SA vs. No Treatment
  misc_feature: MA Experiment ID: 20000347 Result: Up-regulated in Transcription
  misc_feature: MA Experiment 20000347 PARAMETER Experiment Name: At_2mM_SA_Sub_P Parameter: Age (day) Value: 14
  misc_feature: MA Experiment 20000347 PARAMETER Experiment Name: At_2mM_SA_Sub_P Parameter: Organism Value: A. thaliana
  misc_feature: MA Experiment 20000347 PARAMETER Experiment Name: At_2mM_SA_Sub_P Parameter: Plant Line Value: WS
  misc_feature: MA Experiment 20000347 PARAMETER Experiment Name: At_2mM_SA_Sub_P Parameter: Timepoint (hr) Value: 6
  misc_feature: MA Experiment 20000347 PARAMETER Experiment Name: At_2mM_SA_Sub_P Parameter: Tissue Value: Aerial
  misc_feature: MA Experiment 20000347 PARAMETER Experiment Name: At_2mM_SA_Sub_P Parameter: Treatment Value: 2mM SA vs. No Treatment
  misc_feature: MA Experiment ID: 20000355 Result: Down-regulated in Transcription
  misc_feature: MA Experiment 20000355 PARAMETER Experiment Name: At_Siliques_Sub_P Parameter: Age (day) Value: 21
  misc_feature: MA Experiment 20000355 PARAMETER Experiment Name: At_Siliques_Sub_P Parameter: Organism Value: A. thaliana
  misc_feature: MA Experiment 20000355 PARAMETER Experiment Name: At_Siliques_Sub_P Parameter: Plant Line Value: WS
  misc_feature: MA Experiment 20000355 PARAMETER Experiment Name: At_Siliques_Sub_P Parameter: Tissue Value: Less Than 5mm Siliques vs. Whole Plant
  misc_feature: MA Experiment ID: 20000440 Result: Down-regulated in Transcription
  misc_feature: MA Experiment 20000440 PARAMETER Experiment Name: At_Closed-Flower__Sub_P Parameter: Tissue Value: Closed Flower vs. Whole Plant
aaaaacacataacttgagtattcctcattgagtcgttgcaaacggtatggctacggaaaaaacccaccaatttcatccttctcttcactttgtcctcttccctttcatggctcaaggccacatgattcccatgattgatattgcaagactcttggctcagcgtggtgtgaccataacaattgtcacgacacctcacaacgcagcaaggtttaagaatgtcctaaaccgagcgatcgagtctggcttggccatcaacatactgcatgtgaagtttccatatcaagagtttggtttgccagaaggaaaagagaatatagattcgttagactcaacggagttgatggtacctttcttcaaagcggtgaacttgcttgaagatccggtcatgaagctcatggaagagatgaaacctagacctagctgtctaatttctgattggtgtttgccttatacaagcataatcgccaagaacttcaatataccaaagatagttttccacggcatgggttgctttaatcttttgtgtatgcatgttctacgcagaaacttagagatcctagagaatgtaaagtcggatgaagagtatttcttggttcctagttttcctgatagagttgaatttacaaagcttcaacttcctgtgaaagcaaatgcaagtggagattggaaagagataatggatgaaatggtaaaagcagaatacacatcctatggtgtgatcgtcaacacatttcaggagttggagccaccttatgtcaaagactacaaagaggcaatggatggaaaagtatggtccattggacccgtttccttgtgtaacaaggcaggtgcagacaaagctgagaggggaagcaaggccgccattgatcaagatgagtgtcttcaatggcttgattctaaagaagaaggttcggtgctctatgtttgccttggaagtatatgtaatcttcctttgtctcagctcaaggagctggggctaggccttgaggaatctcgaagatcttttatttgggtcataagaggttcggaaaagtataaagaactatttgagtggatgttggagagcggttttgaagaaagaatcaaagagagaggacttctcattaaagggtgggcacctcaagtccttatcctttcacatccttccgttggaggattcctgacacactgtggatggaactcgactctcgaaggaatcacctcaggcattccactgatcacttggccgctgtttggagaccaattctgcaaccaaaaactggtcgttcaagtactaaaagccggtgtaagtgccggggttgaagaagtcatgaaatggggagaagaagataaaataggagtgttagtggataaagaaggagtgaaaaaggctgtggaagaattgatgggtgatagtgatgatgcaaaagagaggagaagaagagtcaaagagcttggagaattagctcacaaagctgtggaaaaaggaggctcttctcattctaacatcacactcttgctacaagacataatgcaactagcacaattcaagaattgagcatatgtcattttatgttcatagaaatttaaacattaaacagtttttgatttctatattggagaaatttaaatcagagcctttgttaaacacgtggataatgaatcagaagaagataaatcagtg

SEQ ID NO: 89569 - protein, 496 aa, Arabidopsis thaliana
  peptide (1)..(496): Ceres Seq. ID no. 12719604
  misc_feature (14)..(492): Pfam Name: UDP-glucoronosyl and UDP-glucosyl transferase Pfam Description: UDP-glucoronosyl and UDP-glucosyl transferase
  misc_feature (1)..(496): Homolog of NCBI NO: 15228034 NR Description: putative glucosyl transferase; protein id: supported by cDNA: gi_15028388, supported by cDNA: gi_19310660
  misc_feature (1)..(496): Homolog of NCBI NO: 15228033 NR Description: putative glucosyl transferase; protein id: supported by cDNA: gi_20856889 [Arabidopsis thaliana]
  misc_feature (1)..(496): Homolog of NCBI NO: 15228032 NR Description: putative glucosyl transferase; protein id: [Arabidopsis thaliana] >gi|25286791|pir||D84784 probable glucosyl
  misc_feature (1)..(496): Homolog of NCBI NO: 15228037 NR Description: putative glucosyl transferase; protein id: supported by cDNA: gi_17065333 [Arabidopsis thaliana]
  misc_feature (1)..(496): Homolog of NCBI NO: 15228035 NR Description: putative glucosyl transferase; protein id: [Arabidopsis thaliana] >gi|25286803|pir||G84784 probable glucosyl
  misc_feature (1)..(496): Homolog of NCBI NO: 26450153 NR Description: putative glucosyl transferase [Arabidopsis
  misc_feature (8)..(495): Homolog of NCBI NO: 15228031 NR Description: putative glucosyl transferase; protein id: [Arabidopsis thaliana] >gi|25286801|pir||C84784 probable glucosyl
  misc_feature (10)..(493): Homolog of NCBI NO: 15231758 NR Description: glucosyltransferase - like protein; protein id:
  misc_feature (26)..(493): Homolog of NCBI NO: 19911211 NR Description: glucosyltransferase-14 [Vigna angularis]
  misc_feature (14)..(495): Homolog of NCBI NO: 19911201 NR Description: glucosyltransferase-9 [Vigna angularis]
MATEKTHQFHPSLHFVLFPFMAQGHMIPMIDIARLLAQRGVTITIVTTPHNAARFKNVLNRAIESGLAINILHVKFPYQEFGLPEGKENIDSLDSTELMVPFFKAVNLLEDPVMKLMEEMKPRPSCLISDWCLPYTSIIAKNFNIPKIVFHGMGCFNLLCMHVLRRNLEILENVKSDEEYFLVPSFPDRVEFTKLQLPVKANASGDWKEIMDEMVKAEYTSYGVIVNTFQELEPPYVKDYKEAMDGKVWSIGPVSLCNKAGADKAERGSKAAIDQDECLQWLDSKEEGSVLYVCLGSICNLPLSQLKELGLGLEESRRSFIWVIRGSEKYKELFEWMLESGFEERIKERGLLIKGWAPQVLILSHPSVGGFLTHCGWNSTLEGITSGIPLITWPLFGDQFCNQKLVVQVLKAGVSAGVEEVMKWGEEDKIGVLVDKEGVKKAVEELMGDSDDAKERRRRVKELGELAHKAVEKGGSSHSNITLLLQDIMQLAQFKN

SEQ ID NO: 89570 - protein, 476 aa, Arabidopsis thaliana
  peptide (1)..(476): Ceres Seq. ID no. 12719605
  misc_feature (1)..(472): Pfam Name: UDP-glucoronosyl and UDP-glucosyl transferase Pfam Description: UDP-glucoronosyl and UDP-glucosyl transferase
  misc_feature (1)..(476): Homolog of NCBI NO: 15228034 NR Description: putative glucosyl transferase; protein id: supported by cDNA: gi_15028388, supported by cDNA: gi_19310660
  misc_feature (1)..(476): Homolog of NCBI NO: 15228033 NR Description: putative glucosyl transferase; protein id: supported by cDNA: gi_20856889 [Arabidopsis thaliana]
  misc_feature (1)..(476): Homolog of NCBI NO: 15228032 NR Description: putative glucosyl transferase; protein id: [Arabidopsis thaliana] >gi|25286791|pir||D84784 probable glucosyl
  misc_feature (1)..(476): Homolog of NCBI NO: 15228037 NR Description: putative glucosyl transferase; protein id: supported by cDNA: gi_17065333 [Arabidopsis thaliana]
  misc_feature (1)..(476): Homolog of NCBI NO: 15228035 NR Description: putative glucosyl transferase; protein id: [Arabidopsis thaliana] >gi|25286803|pir||G84784 probable glucosyl
  misc_feature (1)..(476): Homolog of NCBI NO: 26450153 NR Description: putative glucosyl transferase [Arabidopsis
  misc_feature (1)..(475): Homolog of NCBI NO: 15228031 NR Description: putative glucosyl transferase; protein id: [Arabidopsis thaliana] >gi|25286801|pir||C84784 probable glucosyl
  misc_feature (1)..(473): Homolog of NCBI NO: 15231758 NR Description: glucosyltransferase - like protein; protein id:
  misc_feature (6)..(473): Homolog of NCBI NO: 19911211 NR Description: glucosyltransferase-14 [Vigna angularis]
  misc_feature (1)..(475): Homolog of NCBI NO: 19911201 NR Description: glucosyltransferase-9 [Vigna angularis]
MAQGHMIPMIDIARLLAQRGVTITIVTTPHNAARFKNVLNRAIESGLAINILHVKFPYQEFGLPEGKENIDSLDSTELMVPFFKAVNLLEDPVMKLMEEMKPRPSCLISDWCLPYTSIIAKNFNIPKIVFHGMGCFNLLCMHVLRRNLEILENVKSDEEYFLVPSFPDRVEFTKLQLPVKANASGDWKEIMDEMVKAEYTSYGVIVNTFQELEPPYVKDYKEAMDGKVWSIGPVSLCNKAGADKAERGSKAAIDQDECLQWLDSKEEGSVLYVCLGSICNLPLSQLKELGLGLEESRRSFIWVIRGSEKYKELFEWMLESGFEERIKERGLLIKGWAPQVLILSHPSVGGFLTHCGWNSTLEGITSGIPLITWPLFGDQFCNQKLVVQVLKAGVSAGVEEVMKWGEEDKIGVLVDKEGVKKAVEELMGDSDDAKERRRRVKELGELAHKAVEKGGSSHSNITLLLQDIMQLAQFKN

SEQ ID NO: 89571 - protein, 471 aa, Arabidopsis thaliana
  peptide (1)..(471): Ceres Seq. ID no. 12719606
  misc_feature (1)..(467): Pfam Name: UDP-glucoronosyl and UDP-glucosyl transferase Pfam Description: UDP-glucoronosyl and UDP-glucosyl transferase
  misc_feature (1)..(471): Homolog of NCBI NO: 15228034 NR Description: putative glucosyl transferase; protein id: supported by cDNA: gi_15028388, supported by cDNA: gi_19310660
  misc_feature (1)..(471): Homolog of NCBI NO: 15228033 NR Description: putative glucosyl transferase; protein id: supported by cDNA: gi_20856889 [Arabidopsis thaliana]
  misc_feature (1)..(471): Homolog of NCBI NO: 15228032 NR Description: putative glucosyl transferase; protein id: [Arabidopsis thaliana] >gi|25286791|pir||D84784 probable glucosyl
  misc_feature (1)..(471): Homolog of NCBI NO: 15228037 NR Description: putative glucosyl transferase; protein id: supported by cDNA: gi_17065333 [Arabidopsis thaliana]
  misc_feature (1)..(471): Homolog of NCBI NO: 15228035 NR Description: putative glucosyl transferase; protein id: [Arabidopsis thaliana] >gi|25286803|pir||G84784 probable glucosyl
  misc_feature (1)..(471): Homolog of NCBI NO: 26450153 NR Description: putative glucosyl transferase [Arabidopsis
  misc_feature (1)..(470): Homolog of NCBI NO: 15228031 NR Description: putative glucosyl transferase; protein id: [Arabidopsis thaliana] >gi|25286801|pir||C84784 probable glucosyl
  misc_feature (1)..(468): Homolog of NCBI NO: 15231758 NR Description: glucosyltransferase - like protein; protein id:
  misc_feature (1)..(468): Homolog of NCBI NO: 19911211 NR Description: glucosyltransferase-14 [Vigna angularis]
  misc_feature (1)..(470): Homolog of NCBI NO: 19911201 NR Description: glucosyltransferase-9 [Vigna angularis]
MIPMIDIARLLAQRGVTITIVTTPHNAARFKNVLNRAIESGLAINILHVKFPYQEFGLPEGKENIDSLDSTELMVPFFKAVNLLEDPVMKLMEEMKPRPSCLISDWCLPYTSIIAKNFNIPKIVFHGMGCFNLLCMHVLRRNLEILENVKSDEEYFLVPSFPDRVEFTKLQLPVKANASGDWKEIMDEMVKAEYTSYGVIVNTFQELEPPYVKDYKEAMDGKVWSIGPVSLCNKAGADKAERGSKAAIDQDECLQWLDSKEEGSVLYVCLGSICNLPLSQLKELGLGLEESRRSFIWVIRGSEKYKELFEWMLESGFEERIKERGLLIKGWAPQVLILSHPSVGGFLTHCGWNSTLEGITSGIPLITWPLFGDQFCNQKLVVQVLKAGVSAGVEEVMKWGEEDKIGVLVDKEGVKKAVEELMGDSDDAKERRRRVKELGELAHKAVEKGGSSHSNITLLLQDIMQLAQFKN

SEQ ID NO: 89572 - DNA, 1605 bp, Arabidopsis thaliana
  misc_feature (1)..(1605): Ceres Seq. ID no. 12719611
  misc_feature: MA Experiment ID: 20000306 Result: Down-regulated in Transcription
  misc_feature: MA Experiment 20000306 PARAMETER Experiment Name: At_Germinating_Seeds_Sub_P Parameter: Age (hr) Value: 6 vs. 0
  misc_feature: MA Experiment 20000306 PARAMETER Experiment Name: At_Germinating_Seeds_Sub_P Parameter: Organism Value: A. thaliana
  misc_feature: MA Experiment 20000306 PARAMETER Experiment Name: At_Germinating_Seeds_Sub_P Parameter: Plant Line Value: WS
  misc_feature: MA Experiment 20000306 PARAMETER Experiment Name: At_Germinating_Seeds_Sub_P Parameter: Tissue Value: Germinating Seeds
  misc_feature: MA Experiment ID: 20000307 Result: Down-regulated in Transcription
  misc_feature: MA Experiment 20000307 PARAMETER Experiment Name: At_Germinating_Seeds_Sub_P Parameter: Age (hr) Value: 24 vs. 0
  misc_feature: MA Experiment 20000307 PARAMETER Experiment Name: At_Germinating_Seeds_Sub_P Parameter: Organism Value: A. thaliana
  misc_feature: MA Experiment 20000307 PARAMETER Experiment Name: At_Germinating_Seeds_Sub_P Parameter: Plant Line Value: WS
  misc_feature: MA Experiment 20000307 PARAMETER Experiment Name: At_Germinating_Seeds_Sub_P Parameter: Tissue Value: Germinating Seeds
  misc_feature: MA Experiment ID: 20000315 Result: Down-regulated in Transcription
  misc_feature: MA Experiment 20000315 PARAMETER Experiment Name: At_14day_Shoots-Roots_Sub_P Parameter: Age (day) Value: 14
  misc_feature: MA Experiment 20000315 PARAMETER Experiment Name: At_14day_Shoots-Roots_Sub_P Parameter: Organism Value: A. thaliana
  misc_feature: MA Experiment 20000315 PARAMETER Experiment Name: At_14day_Shoots-Roots_Sub_P Parameter: Plant Line Value: WS
  misc_feature: MA Experiment 20000315 PARAMETER Experiment Name: At_14day_Shoots-Roots_Sub_P Parameter: Tissue Value: Shoots vs. Whole Plant
  misc_feature: MA Experiment ID: 20000346 Result: Up-regulated in Transcription
  misc_feature: MA Experiment 20000346 PARAMETER Experiment Name: At_2mM_SA_Sub_P Parameter: Age (day) Value: 14
  misc_feature: MA Experiment 20000346 PARAMETER Experiment Name: At_2mM_SA_Sub_P Parameter: Organism Value: A. thaliana
  misc_feature: MA Experiment 20000346 PARAMETER Experiment Name: At_2mM_SA_Sub_P Parameter: Plant Line Value: WS
  misc_feature: MA Experiment 20000346 PARAMETER Experiment Name: At_2mM_SA_Sub_P Parameter: Timepoint (hr) Value: 1
  misc_feature: MA Experiment 20000346 PARAMETER Experiment Name: At_2mM_SA_Sub_P Parameter: Tissue Value: Aerial
  misc_feature: MA Experiment 20000346 PARAMETER Experiment Name: At_2mM_SA_Sub_P Parameter: Treatment Value: 2mM SA vs. No Treatment
aagcaaaacttgagagtttcttactaaggttgaatcatggtttccgaaacaaccaaatcttctccacttcactttgttctcttccctttcatggctcaaggccacatgattcccatggttgatattgcaaggctcttggctcagcgtggtgtgatcataacaattgtcacgacgcctcacaatgcagcgaggttcaagaatgtcctaaaccgtgccattgagtctggcttgcccatcaacttagtgcaagtcaagtttccatatctagaagctggtttgcaagaaggacaagagaatatcgattctcttgacacaatggagcggatgatacctttctttaaagcggttaactttctcgaagaaccagtccagaagctcattgaagagatgaaccctcgaccaagctgtctaatttctgatttttgtttgccttatacaagcaaaatcgccaagaagttcaatatcccaaagatcctcttccatggcatgggttgcttttgtcttctgtgtatgcatgttttacgcaagaaccgtgagatcttggacaatttaaagtcagataaggagcttttcactgttcctgattttcctgatagagttgaattcacaagaacgcaagttccggtagaaacatatgttccagctggagactggaaagatatctttgatggtatggtagaagcgaatgagacatcttatggtgtgatcgtcaactcatttcaagagctcgagcctgcttatgccaaagactacaaggaggtaaggtccggtaaagcatggaccattggacccgtttccttgtgcaacaaggtaggagccgacaaagcagagaggggaaacaaatcagacattgatcaagatgagtgccttaaatggctcgattctaagaaacatggctcggtgctttacgtttgtcttggaagtatctgtaatcttcctttgtctcaactcaaggagctgggactaggcctagaggaatcccaaagacctttcatttgggtcataagaggttgggagaagtacaaagagttagttgagtggttctcggaaagcggctttgaagatagaatccaagatagaggacttctcatcaaaggatggtcccctcaaatgcttatcctttcacatccatcagttggagggttcctaacacactgtggttggaactcgactcttgaggggataactgctggtctaccgctacttacatggccgctattcgcagaccaattctgcaatgagaaattggtcgttgaggtactaaaagccggtgtaagatccggggttgaacagcctatgaaatggggagaagaggagaaaataggagtgttggtggataaagaaggagtgaagaaggcagtggaagaattaatgggtgagagtgatgatgcaaaagagagaagaagaagagccaaagagcttggagattcagctcacaaggctgtggaagaaggaggctcttctcattctaacatctctttcttgctacaagacataatggaactggcagaacccaataattgagtatacgtcatctttttaaaggaatttaaaaattaaatagttttgttttctgtatttgtgaaatttaaaacagagtcttag

SEQ ID NO: 89573 - protein, 495 aa, Arabidopsis thaliana
  peptide (1)..(495): Ceres Seq. ID no. 12719612
  misc_feature (1)..(495): Homolog of NCBI NO: 15228037 NR Description: putative glucosyl transferase; protein id: supported by cDNA: gi_17065333 [Arabidopsis thaliana]
  misc_feature (10)..(495): Homolog of NCBI NO: 15228035 NR Description: putative glucosyl transferase; protein id: [Arabidopsis thaliana] >gi|25286803|pir||G84784 probable glucosyl
  misc_feature (10)..(495): Homolog of NCBI NO: 26450153 NR Description: putative glucosyl transferase [Arabidopsis
  misc_feature (1)..(495): Homolog of NCBI NO: 15228034 NR Description: putative glucosyl transferase; protein id: supported by cDNA: gi_15028388, supported by cDNA: gi_19310660
  misc_feature (1)..(495): Homolog of NCBI NO: 15228033 NR Description: putative glucosyl transferase; protein id: supported by cDNA: gi_20856889 [Arabidopsis thaliana]
  misc_feature (10)..(493): Homolog of NCBI NO: 15228031 NR Description: putative glucosyl transferase; protein id: [Arabidopsis thaliana] >gi|25286801|pir||C84784 probable glucosyl
  misc_feature (1)..(492): Homolog of NCBI NO: 15228032 NR Description: putative glucosyl transferase; protein id: [Arabidopsis thaliana] >gi|25286791|pir||D84784 probable glucosyl
  misc_feature (10)..(492): Homolog of NCBI NO: 15231758 NR Description: glucosyltransferase - like protein; protein id:
  misc_feature (6)..(489): Homolog of NCBI NO: 19911201 NR Description: glucosyltransferase-9 [Vigna angularis]
  misc_feature (24)..(492): Homolog of NCBI NO: 19911211 NR Description: glucosyltransferase-14 [Vigna angularis]
MVSETTKSSPLHFVLFPFMAQGHMIPMVDIARLLAQRGVIITIVTTPHNAARFKNVLNRAIESGLPINLVQVKFPYLEAGLQEGQENIDSLDTMERMIPFFKAVNFLEEPVQKLIEEMNPRPSCLISDFCLPYTSKIAKKFNIPKILFHGMGCFCLLCMHVLRKNREILDNLKSDKELFTVPDFPDRVEFTRTQVPVETYVPAGDWKDIFDGMVEANETSYGVIVNSFQELEPAYAKDYKEVRSGKAWTIGPVSLCNKVGADKAERGNKSDIDQDECLKWLDSKKHGSVLYVCLGSICNLPLSQLKELGLGLEESQRPFIWVIRGWEKYKELVEWFSESGFEDRIQDRGLLIKGWSPQMLILSHPSVGGFLTHCGWNSTLEGITAGLPLLTWPLFADQFCNEKLVVEVLKAGVRSGVEQPMKWGEEEKIGVLVDKEGVKKAVEELMGESDDAKERRRRAKELGDSAHKAVEEGGSSHSNISFLLQDIMELAEPNN

SEQ ID NO: 89574 - protein, 477 aa, Arabidopsis thaliana
  peptide (1)..(477): Ceres Seq. ID no. 12719613
  misc_feature (1)..(477): Homolog of NCBI NO: 15228037 NR Description: putative glucosyl transferase; protein id: supported by cDNA: gi_17065333 [Arabidopsis thaliana]
  misc_feature (1)..(477): Homolog of NCBI NO: 15228035 NR Description: putative glucosyl transferase; protein id: [Arabidopsis thaliana] >gi|25286803|pir||G84784 probable glucosyl
  misc_feature (1)..(477): Homolog of NCBI NO: 26450153 NR Description: putative glucosyl transferase [Arabidopsis
  misc_feature (1)..(477): Homolog of NCBI NO: 15228034 NR Description: putative glucosyl transferase; protein id: supported by cDNA: gi_15028388, supported by cDNA: gi_19310660
  misc_feature (1)..(477): Homolog of NCBI NO: 15228033 NR Description: putative glucosyl transferase; protein id: supported by cDNA: gi_20856889 [Arabidopsis thaliana]
  misc_feature (1)..(475): Homolog of NCBI NO: 15228031 NR Description: putative glucosyl transferase; protein id: [Arabidopsis thaliana] >gi|25286801|pir||C84784 probable glucosyl
  misc_feature (1)..(474): Homolog of NCBI NO: 15228032 NR Description: putative glucosyl transferase; protein id: [Arabidopsis thaliana] >gi|25286791|pir||D84784 probable glucosyl
  misc_feature (1)..(474): Homolog of NCBI NO: 15231758 NR Description: glucosyltransferase - like protein; protein id:
  misc_feature (1)..(471): Homolog of NCBI NO: 19911201 NR Description: glucosyltransferase-9 [Vigna angularis]
  misc_feature (6)..(474): Homolog of NCBI NO: 19911211 NR Description: glucosyltransferase-14 [Vigna angularis]
MAQGHMIPMVDIARLLAQRGVIITIVTTPHNAARFKNVLNRAIESGLPINLVQVKFPYLEAGLQEGQENIDSLDTMERMIPFFKAVNFLEEPVQKLIEEMNPRPSCLISDFCLPYTSKIAKKFNIPKILFHGMGCFCLLCMHVLRKNREILDNLKSDKELFTVPDFPDRVEFTRTQVPVETYVPAGDWKDIFDGMVEANETSYGVIVNSFQELEPAYAKDYKEVRSGKAWTIGPVSLCNKVGADKAERGNKSDIDQDECLKWLDSKKHGSVLYVCLGSICNLPLSQLKELGLGLEESQRPFIWVIRGWEKYKELVEWFSESGFEDRIQDRGLLIKGWSPQMLILSHPSVGGFLTHCGWNSTLEGITAGLPLLTWPLFADQFCNEKLVVEVLKAGVRSGVEQPMKWGEEEKIGVLVDKEGVKKAVEELMGESDDAKERRRRAKELGDSAHKAVEEGGSSHSNISFLLQDIMELAEPNN

SEQ ID NO: 89575 - protein, 472 aa, Arabidopsis thaliana
  peptide (1)..(472): Ceres Seq. ID no. 12719614
  misc_feature (1)..(472): Homolog of NCBI NO: 15228037 NR Description: putative glucosyl transferase; protein id: supported by cDNA: gi_17065333 [Arabidopsis thaliana]
  misc_feature (1)..(472): Homolog of NCBI NO: 15228035 NR Description: putative glucosyl transferase; protein id: [Arabidopsis thaliana] >gi|25286803|pir||G84784 probable glucosyl
  misc_feature (1)..(472): Homolog of NCBI NO: 26450153 NR Description: putative glucosyl transferase [Arabidopsis
  misc_feature (1)..(472): Homolog of NCBI NO: 15228034 NR Description: putative glucosyl transferase; protein id: supported by cDNA: gi_15028388, supported by cDNA: gi_19310660
  misc_feature (1)..(472): Homolog of NCBI NO: 15228033 NR Description: putative glucosyl transferase; protein id: supported by cDNA: gi_20856889 [Arabidopsis thaliana]
  misc_feature (1)..(470): Homolog of NCBI NO: 15228031 NR Description: putative glucosyl transferase; protein id: [Arabidopsis thaliana] >gi|25286801|pir||C84784 probable glucosyl
  misc_feature (1)..(469): Homolog of NCBI NO: 15228032 NR Description: putative glucosyl transferase; protein id: [Arabidopsis thaliana] >gi|25286791|pir||D84784 probable glucosyl
  misc_feature (1)..(469): Homolog of NCBI NO: 15231758 NR Description: glucosyltransferase - like protein; protein id:
  misc_feature (1)..(466): Homolog of NCBI NO: 19911201 NR Description: glucosyltransferase-9 [Vigna angularis]
  misc_feature (1)..(469): Homolog of NCBI NO: 19911211 NR Description: glucosyltransferase-14 [Vigna angularis]
MIPMVDIARLLAQRGVIITIVTTPHNAARFKNVLNRAIESGLPINLVQVKFPYLEAGLQEGQENIDSLDTMERMIPFFKAVNFLEEPVQKLIEEMNPRPSCLISDFCLPYTSKIAKKFNIPKILFHGMGCFCLLCMHVLRKNREILDNLKSDKELFTVPDFPDRVEFTRTQVPVETYVPAGDWKDIFDGMVEANETSYGVIVNSFQELEPAYAKDYKEVRSGKAWTIGPVSLCNKVGADKAERGNKSDIDQDECLKWLDSKKHGSVLYVCLGSICNLPLSQLKELGLGLEESQRPFIWVIRGWEKYKELVEWFSESGFEDRIQDRGLLIKGWSPQMLILSHPSVGGFLTHCGWNSTLEGITAGLPLLTWPLFADQFCNEKLVVEVLKAGVRSGVEQPMKWGEEEKIGVLVDKEGVKKAVEELMGESDDAKERRRRAKELGDSAHKAVEEGGSSHSNISFLLQDIMELAEPNN

SEQ ID NO: 89576 - DNA, 926 bp, Arabidopsis thaliana
  misc_feature (1)..(926): Ceres Seq. ID no. 12719626
  misc_feature: MA Experiment ID: 20000171 Result: Up-regulated in Transcription
  misc_feature: MA Experiment 20000171 PARAMETER Experiment Name: At_42deg_Heat_P Parameter: Age (day) Value: 14
  misc_feature: MA Experiment 20000171 PARAMETER Experiment Name: At_42deg_Heat_P Parameter: Organism Value: A. thaliana
  misc_feature: MA Experiment 20000171 PARAMETER Experiment Name: At_42deg_Heat_P Parameter: Plant Line Value: WS
  misc_feature: MA Experiment 20000171 PARAMETER Experiment Name: At_42deg_Heat_P Parameter: Temperature (deg C) Value: 42 vs. 22
  misc_feature: MA Experiment 20000171 PARAMETER Experiment Name: At_42deg_Heat_P Parameter: Timepoint (hr) Value: 1
  misc_feature: MA Experiment 20000171 PARAMETER Experiment Name: At_42deg_Heat_P Parameter: Tissue Value: Aerial
  misc_feature: MA Experiment ID: 20000185 Result: Up-regulated in Transcription
  misc_feature: MA Experiment 20000185 PARAMETER Experiment Name: At_Roots__P Parameter: Age (day) Value: 7 vs. 21
  misc_feature: MA Experiment 20000185 PARAMETER Experiment Name: At_Roots__P Parameter: Organism Value: A. thaliana
  misc_feature: MA Experiment 20000185 PARAMETER Experiment Name: At_Roots__P Parameter: Tissue Value: Roots vs. Whole Plant
  misc_feature: MA Experiment ID: 20000265 Result: Up-regulated in Transcription
  misc_feature: MA Experiment 20000265 PARAMETER Experiment Name: At_Open_Flower_P Parameter: Age (day) Value: 21
  misc_feature: MA Experiment 20000265 PARAMETER Experiment Name: At_Open_Flower_P Parameter: Plant Line Value: WS
  misc_feature: MA Experiment 20000265 PARAMETER Experiment Name: At_Open_Flower_P Parameter: Tissue Value: Closed Flower vs. Whole Plant
  misc_feature: MA Experiment ID: 20000439 Result: Up-regulated in Transcription
  misc_feature: MA Experiment 20000439 PARAMETER Experiment Name: At_Roots__P Parameter: Age (day) Value: 14 vs. 21
  misc_feature: MA Experiment 20000439 PARAMETER Experiment Name: At_Roots__P Parameter: Organism Value: A. thaliana
  misc_feature: MA Experiment 20000439 PARAMETER Experiment Name: At_Roots__P Parameter: Tissue Value: Roots vs. Whole Plant
  misc_feature: MA Experiment ID: 20000527 Result: Down-regulated in Transcription
  misc_feature: MA Experiment 20000527 PARAMETER Experiment Name: At_10percent_PEG_P Parameter: Age (day) Value: 20
  misc_feature: MA Experiment 20000527 PARAMETER Experiment Name: At_10percent_PEG_P Parameter: Organism Value: A. thaliana
  misc_feature: MA Experiment 20000527 PARAMETER Experiment Name: At_10percent_PEG_P Parameter: Plant Line Value: WS
  misc_feature: MA Experiment 20000527 PARAMETER Experiment Name: At_10percent_PEG_P Parameter: Timepoint (day) Value: 20
  misc_feature: MA Experiment 20000527 PARAMETER Experiment Name: At_10percent_PEG_P Parameter: Tissue Value: Whole Plant
  misc_feature: MA Experiment 20000527 PARAMETER Experiment Name: At_10percent_PEG_P Parameter: Treatment Value: 10percent PEG vs. No Treatment
atgggtagggctccatgttgtgacaaggcaaatgtgaagagaggtccatggtctcctgaagaagacgcaaagcttaaagattacatcgagaaacaaggaactggtggcaattggattgctctccctcacaaagctggtttaaggagatgtgggaagagttgcagactgagatggttaaattatttgagaccaaacataagacatggagatttcactgaagaagaagacaatattatctacagcctctttgcctccattggaagcaggtggtcagtaatagcagctcacttgcaaggtagaactgataatgacatcaagaactattggaacactaagctcaagaagaagctcatagccaccatggctcctcctccacatcaccacttagccattgctacatcatcatcatcagcatccccatcatcatcatcacattacaacatgatcaatagtcttcttccgtataacccatcaacaaaccaacttctcacacctcatcagggtatcatgatgacaatgatgggccaacaacaacaactattttatcaagaagacatgggcaatttggtaaattctccaaacagaaacaatctcataatgagccatcaagaagacaaccaagagcaaagtacaaacaagggaataatgttgttgagtgatgtaagaagtgggtcgagtacaacaagtacagtaacaagagtgaagatggaacatcgtgatcatgatgatcatcatcatcatcatgaagaagatgagagatcaatgacctcggtagtgatggaagattatggaatggaggagatcaagcaattaataagtagtagttgtacgagtagtaacaatagcttgtggtttgacgaaaacaagacggaggataagttcatgttgtactactgatctcgagtaccaactttgatttaatctcc

SEQ ID NO: 89577 - protein, 298 aa, Arabidopsis thaliana
  peptide (1)..(298): Ceres Seq. ID no. 12719627
  misc_feature (14)..(62): Pfam Name: Myb-like DNA-binding domain Pfam Description: Myb-like DNA-binding domain
  misc_feature (1)..(298): Homolog of NCBI NO: 15228049 NR Description: light-regulated myb protein, putative; protein At2g36890.1 [Arabidopsis thaliana] >gi|25294087|pir||H84785
  misc_feature (55)..(298): Homolog of NCBI NO: 11358537 NR Description: myb-related transcription factor MYB38 [imported] Arabidopsis thaliana (fragment) >gi|3941452|gb|AAC83602.1|
  misc_feature (1)..(297): Homolog of NCBI NO: 18419456 NR Description: blind [Lycopersicon esculentum]
  misc_feature (1)..(280): Homolog of NCBI NO: 15237193 NR Description: myb family transcription factor; protein id:
  misc_feature (1)..(212): Homolog of NCBI NO: 11273952 NR Description: myb-related transcription factor MYB68 [imported] Arabidopsis thaliana >gi|3941494|gb|AAC83623.1| putative
  misc_feature (1)..(212): Homolog of NCBI NO: 15239158 NR Description: myb DNA-binding protein (MYB68); protein id: supported by cDNA: gi_3941493 [Arabidopsis thaliana]
  misc_feature (1)..(153): Homolog of NCBI NO: 11358686 NR Description: probable transcription factor MYB36 [imported] - thaliana >gi|3941448|gb|AAC83600.1| putative transcription factor
  misc_feature (1)..(153): Homolog of NCBI NO: 15242793 NR Description: myb family transcription factor; protein id: supported by cDNA: gi_3941447 [Arabidopsis thaliana]
  misc_feature (1)..(134): Homolog of NCBI NO: 40253739 NR Description: putative P-type R2R3 Myb protein [Oryza sativa
  misc_feature (1)..(118): Homolog of NCBI NO: 2832408 NR Description: R2R3-MYB transcription factor [Arabidopsis
MGRAPCCDKANVKRGPWSPEEDAKLKDYIEKQGTGGNWIALPHKAGLRRCGKSCRLRWLNYLRPNIRHGDFTEEEDNIIYSLFASIGSRWSVIAAHLQGRTDNDIKNYWNTKLKKKLIATMAPPPHHHLAIATSSSSASPSSSSHYNMINSLLPYNPSTNQLLTPHQGIMMTMMGQQQQLFYQEDMGNLVNSPNRNNLIMSHQEDNQEQSTNKGIMLLSDVRSGSSTTSTVTRVKMEHRDHDDHHHHHEEDERSMTSVVMEDYGMEEIKQLISSSCTSSNNSLWFDENKTEDKFMLYY

SEQ ID NO: 89578 - protein, 178 aa, Arabidopsis thaliana
  peptide (1)..(178): Ceres Seq. ID no. 12719628
  misc_feature (1)..(178): Homolog of NCBI NO: 15228049 NR Description: light-regulated myb protein, putative; protein At2g36890.1 [Arabidopsis thaliana] >gi|25294087|pir||H84785
  misc_feature (1)..(178): Homolog of NCBI NO: 11358537 NR Description: myb-related transcription factor MYB38 [imported] Arabidopsis thaliana (fragment) >gi|3941452|gb|AAC83602.1|
  misc_feature (1)..(177): Homolog of NCBI NO: 18419456 NR Description: blind [Lycopersicon esculentum]
  misc_feature (1)..(160): Homolog of NCBI NO: 15237193 NR Description: myb family transcription factor; protein id:
  misc_feature (1)..(92): Homolog of NCBI NO: 11273952 NR Description: myb-related transcription factor MYB68 [imported] Arabidopsis thaliana >gi|3941494|gb|AAC83623.1| putative
  misc_feature (1)..(92): Homolog of NCBI NO: 15239158 NR Description: myb DNA-binding protein (MYB68); protein id: supported by cDNA: gi_3941493 [Arabidopsis thaliana]
  misc_feature (1)..(33): Homolog of NCBI NO: 11358686 NR Description: probable transcription factor MYB36 [imported] - thaliana >gi|3941448|gb|AAC83600.1| putative transcription factor
  misc_feature (1)..(33): Homolog of NCBI NO: 15242793 NR Description: myb family transcription factor; protein id: supported by cDNA: gi_3941447 [Arabidopsis thaliana]
  misc_feature (1)..(14): Homolog of NCBI NO: 40253739 NR Description: putative P-type R2R3 Myb protein [Oryza sativa
  misc_feature (1)..(23): Homolog of NCBI NO: 34906426 NR Description: putative MYB family transcription factor [Oryza
MAPPPHHHLAIATSSSSASPSSSSHYNMINSLLPYNPSTNQLLTPHQGIMMTMMGQQQQLFYQEDMGNLVNSPNRNNLIMSHQEDNQEQSTNKGIMLLSDVRSGSSTTSTVTRVKMEHRDHDDHHHHHEEDERSMTSVVMEDYGMEEIKQLISSSCTSSNNSLWFDENKTEDKFMLYY

SEQ ID NO: 89579 - protein, 151 aa, Arabidopsis thaliana
  peptide (1)..(151): Ceres Seq. ID no. 12719629
  misc_feature (1)..(151): Homolog of NCBI NO: 15228049 NR Description: light-regulated myb protein, putative; protein At2g36890.1 [Arabidopsis thaliana] >gi|25294087|pir||H84785
  misc_feature (1)..(151): Homolog of NCBI NO: 11358537 NR Description: myb-related transcription factor MYB38 [imported] Arabidopsis thaliana (fragment) >gi|3941452|gb|AAC83602.1|
  misc_feature (1)..(150): Homolog of NCBI NO: 18419456 NR Description: blind [Lycopersicon esculentum]
  misc_feature (1)..(133): Homolog of NCBI NO: 15237193 NR Description: myb family transcription factor; protein id:
  misc_feature (1)..(65): Homolog of NCBI NO: 11273952 NR Description: myb-related transcription factor MYB68 [imported] Arabidopsis thaliana >gi|3941494|gb|AAC83623.1| putative
  misc_feature (1)..(65): Homolog of NCBI NO: 15239158 NR Description: myb DNA-binding protein (MYB68); protein id: supported by cDNA: gi_3941493 [Arabidopsis thaliana]
  misc_feature (1)..(97): Homolog of NCBI NO: 15235710 NR Description: myb DNA-binding protein (AtMYB87); protein id: [Arabidopsis thaliana] >gi|7438332|pir||T06025 transcription
  misc_feature (1)..(64): Homolog of NCBI NO: 18415694 NR Description: myb family protein; protein id: At4g21440.1, by cDNA: 33333., supported by cDNA: gi_17065085 [Arabidopsis >gi|7242487|emb|CAB77384.1| putative transcription factor
  misc_feature (1)..(64): Homolog of NCBI NO: 21592858 NR Description: myb-related protein M4 [Arabidopsis thaliana]
  misc_feature (1)..(17): Homolog of NCBI NO: 282963 NR Description: myb-related protein Ph2 - garden petunia
MINSLLPYNPSTNQLLTPHQGIMMTMMGQQQQLFYQEDMGNLVNSPNRNNLIMSHQEDNQEQSTNKGIMLLSDVRSGSSTTSTVTRVKMEHRDHDDHHHHHEEDERSMTSVVMEDYGMEEIKQLISSSCTSSNNSLWFDENKTEDKFMLYY

SEQ ID NO: 89580 - DNA, 1522 bp, Arabidopsis thaliana
  misc_feature (1)..(1522): Ceres Seq. ID no. 12719634
  misc_feature: MA Experiment ID: 20000166 Result: Down-regulated in Transcription
  misc_feature: MA Experiment 20000166 PARAMETER Experiment Name: At_100uM_ABA_P Parameter: Age (day) Value: 14
  misc_feature: MA Experiment 20000166 PARAMETER Experiment Name: At_100uM_ABA_P Parameter: Organism Value: A. thaliana
  misc_feature: MA Experiment 20000166 PARAMETER Experiment Name: At_100uM_ABA_P Parameter: Plant Line Value: WS
  misc_feature: MA Experiment 20000166 PARAMETER Experiment Name: At_100uM_ABA_P Parameter: Timepoint (hr) Value: 1
  misc_feature: MA Experiment 20000166 PARAMETER Experiment Name: At_100uM_ABA_P Parameter: Tissue Value: Aerial
  misc_feature: MA Experiment 20000166 PARAMETER Experiment Name: At_100uM_ABA_P Parameter: Treatment Value: 100uM ABA vs. No Treatment
  misc_feature: MA Experiment ID: 20000169 Result: Down-regulated in Transcription
  misc_feature: MA Experiment 20000169 PARAMETER Experiment Name: At_100uM_ABA_P Parameter: Age (day) Value: 14
  misc_feature: MA Experiment 20000169 PARAMETER Experiment Name: At_100uM_ABA_P Parameter: Organism Value: A. thaliana
  misc_feature: MA Experiment 20000169 PARAMETER Experiment Name: At_100uM_ABA_P Parameter: Plant Line Value: WS
  misc_feature: MA Experiment 20000169 PARAMETER Experiment Name: At_100uM_ABA_P Parameter: Timepoint (hr) Value: 6
  misc_feature: MA Experiment 20000169 PARAMETER Experiment Name: At_100uM_ABA_P Parameter: Tissue Value: Aerial
  misc_feature: MA Experiment 20000169 PARAMETER Experiment Name: At_100uM_ABA_P Parameter: Treatment Value: 100uM ABA vs. No Treatment
  misc_feature: MA Experiment ID: 20000173 Result: Down-regulated in Transcription
  misc_feature: MA Experiment 20000173 PARAMETER Experiment Name: At_42deg_Heat_P Parameter: Age (day) Value: 14
  misc_feature: MA Experiment 20000173 PARAMETER Experiment Name: At_42deg_Heat_P Parameter: Organism Value: A. thaliana
  misc_feature: MA Experiment 20000173 PARAMETER Experiment Name: At_42deg_Heat_P Parameter: Plant Line Value: WS
  misc_feature: MA Experiment 20000173 PARAMETER Experiment Name: At_42deg_Heat_P Parameter: Temperature (deg C) Value: 42 vs. 22
  misc_feature: MA Experiment 20000173 PARAMETER Experiment Name: At_42deg_Heat_P Parameter: Timepoint (hr) Value: 6
  misc_feature: MA Experiment 20000173 PARAMETER Experiment Name: At_42deg_Heat_P Parameter: Tissue Value: Aerial
  misc_feature: MA Experiment ID: 20000179 Result: Down-regulated in Transcription
  misc_feature: MA Experiment 20000179 PARAMETER Experiment Name: At_Germinating_Seeds_P Parameter: Age (hr) Value: 6 vs. 0
  misc_feature: MA Experiment 20000179 PARAMETER Experiment Name: At_Germinating_Seeds_P Parameter: Tissue Value: Germinating Seeds
  misc_feature: MA Experiment ID: 20000180 Result: Down-regulated in Transcription
  misc_feature: MA Experiment 20000180 PARAMETER Experiment Name: At_Germinating_Seeds_P Parameter: Age (hr) Value: 24 vs. 0
  misc_feature: MA Experiment 20000180 PARAMETER Experiment Name: At_Germinating_Seeds_P Parameter: Tissue Value: Germinating Seeds
  misc_feature: MA Experiment ID: 20000184 Result: Down-regulated in Transcription
  misc_feature: MA Experiment 20000184 PARAMETER Experiment Name: At_Shoots__P Parameter: Age (day) Value: 7
  misc_feature: MA Experiment 20000184 PARAMETER Experiment Name: At_Shoots__P Parameter: Tissue Value: Shoots vs. Whole Plant
  misc_feature: MA Experiment ID: 20000264 Result: Up-regulated in Transcription
  misc_feature: MA Experiment 20000264 PARAMETER Experiment Name: At_Open_Flower_P Parameter: Age (day) Value: 21
  misc_feature: MA Experiment 20000264 PARAMETER Experiment Name: At_Open_Flower_P Parameter: Plant Line Value: WS
  misc_feature: MA Experiment 20000264 PARAMETER Experiment Name: At_Open_Flower_P Parameter: Tissue Value: Open Flower vs. Whole Plant
  misc_feature: MA Experiment ID: 20000527 Result: Down-regulated in Transcription
  misc_feature: MA Experiment 20000527 PARAMETER Experiment Name: At_10percent_PEG_P Parameter: Age (day) Value: 20
  misc_feature: MA Experiment 20000527 PARAMETER Experiment Name: At_10percent_PEG_P Parameter: Organism Value: A. thaliana
  misc_feature: MA Experiment 20000527 PARAMETER Experiment Name: At_10percent_PEG_P Parameter: Plant Line Value: WS
  misc_feature: MA Experiment 20000527 PARAMETER Experiment Name: At_10percent_PEG_P Parameter: Timepoint (day) Value: 20
  misc_feature: MA Experiment 20000527 PARAMETER Experiment Name: At_10percent_PEG_P Parameter: Tissue Value: Whole Plant
  misc_feature: MA Experiment 20000527 PARAMETER Experiment Name: At_10percent_PEG_P Parameter: Treatment Value: 10percent PEG vs. No Treatment
  misc_feature: MA Experiment ID: 20000794 Result: Up-regulated in Transcription
  misc_feature: MA Experiment 20000794 PARAMETER Experiment Name: At_Petals_P Parameter: Age (day) Value: 23-25 days
  misc_feature: MA Experiment 20000794 PARAMETER Experiment Name: At_Petals_P Parameter: Plant Line Value: WS
  misc_feature: MA Experiment 20000794 PARAMETER Experiment Name: At_Petals_P Parameter: Tissue Value: Petals vs. Whole plant
  misc_feature: MA Experiment ID: 20001450 Result: Down-regulated in Transcription
  misc_feature: MA Experiment 20001450 PARAMETER Experiment Name: At_Far-red-induction_P Parameter: Age (day) Value: 7
  misc_feature: MA Experiment 20001450 PARAMETER Experiment Name: At_Far-red-induction_P Parameter: Light Value: Far-red vs. White
  misc_feature: MA Experiment 20001450 PARAMETER Experiment Name: At_Far-red-induction_P Parameter: Organism Value: A. thaliana
  misc_feature: MA Experiment 20001450 PARAMETER Experiment Name: At_Far-red-induction_P Parameter: Plant Line Value: Columbia
  misc_feature: MA Experiment 20001450 PARAMETER Experiment Name: At_Far-red-induction_P Parameter: Timepoint (hr) Value: 8
  misc_feature: MA Experiment 20001450 PARAMETER Experiment Name: At_Far-red-induction_P Parameter: Tissue Value: Whole Plant
  misc_feature: MA Experiment ID: 20001554 Result: Down-regulated in Transcription
  misc_feature: MA Experiment 20001554 PARAMETER Experiment Name: At_Drought_Soil_Dry_P Parameter: Age (day) Value: 21
  misc_feature: MA Experiment 20001554 PARAMETER Experiment Name: At_Drought_Soil_Dry_P Parameter: Organism Value: A. thaliana
  misc_feature: MA Experiment 20001554 PARAMETER Experiment Name: At_Drought_Soil_Dry_P Parameter: Plant Line Value: WS
  misc_feature: MA Experiment 20001554 PARAMETER Experiment Name: At_Drought_Soil_Dry_P Parameter: Post Timepoint (hr) Value: None
  misc_feature: MA Experiment 20001554 PARAMETER Experiment Name: At_Drought_Soil_Dry_P Parameter: Post-Treatment Value: None
  misc_feature: MA Experiment 20001554 PARAMETER Experiment Name: At_Drought_Soil_Dry_P Parameter: Timepoint (day) Value: 7
  misc_feature: MA Experiment 20001554 PARAMETER Experiment Name: At_Drought_Soil_Dry_P Parameter: Treatment Value: Drought vs. No Drought
  misc_feature: MA Experiment ID: 20001768 Result: Down-regulated in Transcription
  misc_feature: MA Experiment 20001768 PARAMETER Experiment Name: At_Far-red-enriched-adult_P Parameter: Age (day) Value: 28
  misc_feature: MA Experiment 20001768 PARAMETER Experiment Name: At_Far-red-enriched-adult_P Parameter: Light Value: Far-red enriched vs. White
  misc_feature: MA Experiment 20001768 PARAMETER Experiment Name: At_Far-red-enriched-adult_P Parameter: Organism Value: A. thaliana
  misc_feature: MA Experiment 20001768 PARAMETER Experiment Name: At_Far-red-enriched-adult_P Parameter: Plant Line Value: Columbia
  misc_feature: MA Experiment 20001768 PARAMETER Experiment Name: At_Far-red-enriched-adult_P Parameter: Timepoint (hr) Value: 1
  misc_feature: MA Experiment 20001768 PARAMETER Experiment Name: At_Far-red-enriched-adult_P Parameter: Tissue Value: Aerial
aaaacttcaagaaaaaaagattcttcaaaagagcaaaaaaatcaatggagagagcaaagtcgaggaagcctcatatcatgatgataccatacccacttcaaggtcacgttatcccttttgtccacttagccatcaaacttgcttctcatggcttcaccatcactttcgtcaacaccgactccatccaccaccacatctccaccgctcaccaagatgacgccggtgacatcttctccgccgctcgcagctccggccagcacgacatacgttacaccaccgtgagcgacggcttccctttagactttgaccggtcactgaaccatgaccagtttttcgaaggcattctccacgtcttctctgcccacgtggatgatctcatcgccaaactctcccgccgtgatgatcctcccgtgacttgcttgatcgccgacacgttttatgtttggtcatctatgatttgcgacaagcacaaccttgtaaatgtctcgttttggaccgaacctgccttggtcctcaatctctattatcacatggatctcctcatatctaacggtcatttcaaatctcttgataatcgtaaagacgtgatcgattacgtaccaggggttaaagcaatagaaccaaaggacttgatgtcatatcttcaagtaagcgacaaagacgtagacacaaatacagtagtatacagaatattattcaaggcctttaaagacgtcaagagagccgacttcgtcgtatgcaacacggtgcaagagctcgaaccagactctctctcggctctacaagccaaacaaccggtttacgctatcggtccggttttctcaactgattcggtagttcccacaagcttatgggccgagtcagactgtaccgagtggcttaagggccggcccactgggtcagttctctacgtctcgtttggtagctatgcacatgttggtaagaaggagattgttgagatagctcatgggcttttgcttagtgggattagtttcatttgggttttacgtccggatatagttggatccaacgtaccagattttcttccagccgggtttgtggaccaagcccaagatcgaggtcttgtggtccaatggtgctgccagatggaagttatttcaaatccggccgtgggagggtttttcacacattgtggatggaattcaattctagagagcgtttggtgtggtttgcctttgttgtgttatccacttttgacagatcagttcacgaataggaagcttgtggtcgatgattggtgcattgggattaatctttgtgagaagaagacaatcacaagggaccaagtctcagcgaatgttaaaagattgatgaatggagaaacttcaagtgagctaagaaacaatgttgaaaaggttaaacgtcatctcaaagatgcggttacaaccgttggatcttcggagacgaattttaacttgtttgttagtgaggtccgaaatagaatagaaactaaattgtgtaatgtaaatggactagaaataagtccatcaaactaaacaat

SEQ ID NO: 89581 - protein, 504 aa, Arabidopsis thaliana
  peptide (1)..(504): Ceres Seq. ID no. 12719635
  misc_feature (15)..(504): Homolog of NCBI NO: 15228063 NR Description: putative glucosyltransferase; protein id: supported by cDNA: gi_15809993 [Arabidopsis thaliana]
  misc_feature (24)..(488): Homolog of NCBI NO: 21537408 NR Description: putative glucosyltransferase [Arabidopsis
  misc_feature (24)..(488): Homolog of NCBI NO: 15226332 NR Description: putative glucosyltransferase; protein id: supported by cDNA: 13761. [Arabidopsis thaliana]
  misc_feature (18)..(487): Homolog of NCBI NO: 37534766 NR Description: putative putative glucosyltransferase [Oryza
  misc_feature (18)..(484): Homolog of NCBI NO: 15218268 NR Description: UDP-glucose glucosyltransferase, putative; id: At1g78270.1, supported by cDNA: gi_20466351 [Arabidopsis >gi|8052539|gb|AAF71803.1|AC013430_12 F3F9.19 [Arabidopsis
  misc_feature (20)..(483): Homolog of NCBI NO: 15219876 NR Description: UDP-glucose glucosyltransferase, putative; id: At1g22400.1, supported by cDNA: gi_19698984 [Arabidopsis
  misc_feature (20)..(484): Homolog of NCBI NO: 17065006 NR Description: UDP-glucose glucosyltransferase [Arabidopsis
  misc_feature (20)..(484): Homolog of NCBI NO: 15219870 NR Description: UDP-glucose glucosyltransferase; protein id: supported by cDNA: gi_12083243, supported by cDNA: gi_17065005,
  misc_feature (20)..(484): Homolog of NCBI NO: 15219867 NR Description: UDP-glucose glucosyltransferase, putative;
  misc_feature (21)..(484): Homolog of NCBI NO: 25286821 NR Description: T16E15.2 protein - Arabidopsis thaliana
NFKKKRFFKRAKKSMERAKSRKPHIMMIPYPLQGHVIPFVHLAIKLASHGFTITFVNTDSIHHHISTAHQDDAGDIFSAARSSGQHDIRYTTVSDGFPLDFDRSLNHDQFFEGILHVFSAHVDDLIAKLSRRDDPPVTCLIADTFYVWSSMICDKHNLVNVSFWTEPALVLNLYYHMDLLISNGHFKSLDNRKDVIDYVPGVKAIEPKDLMSYLQVSDKDVDTNTVVYRILFKAFKDVKRADFVVCNTVQELEPDSLSALQAKQPVYAIGPVFSTDSVVPTSLWAESDCTEWLKGRPTGSVLYVSFGSYAHVGKKEIVEIAHGLLLSGISFIWVLRPDIVGSNVPDFLPAGFVDQAQDRGLVVQWCCQMEVISNPAVGGFFTHCGWNSILESVWCGLPLLCYPLLTDQFTNRKLVVDDWCIGINLCEKKTITRDQVSANVKRLMNGETSSELRNNVEKVKRHLKDAVTTVGSSETNFNLFVSEVRNRIETKLCNVNGLEISPSN

SEQ ID NO: 89582 - protein, 490 aa, Arabidopsis thaliana
  peptide (1)..(490): Ceres Seq. ID no. 12719636
  misc_feature (1)..(490): Homolog of NCBI NO: 15228063 NR Description: putative glucosyltransferase; protein id: supported by cDNA: gi_15809993 [Arabidopsis thaliana]
  misc_feature (10)..(474): Homolog of NCBI NO: 21537408 NR Description: putative glucosyltransferase [Arabidopsis
  misc_feature (10)..(474): Homolog of NCBI NO: 15226332 NR Description: putative glucosyltransferase; protein id: supported by cDNA: 13761. [Arabidopsis thaliana]
  misc_feature (4)..(473): Homolog of NCBI NO: 37534766 NR Description: putative putative glucosyltransferase [Oryza
  misc_feature (4)..(470): Homolog of NCBI NO: 15218268 NR Description: UDP-glucose glucosyltransferase, putative; id: At1g78270.1, supported by cDNA: gi_20466351 [Arabidopsis >gi|8052539|gb|AAF71803.1|AC013430_12 F3F9.19 [Arabidopsis
  misc_feature (6)..(469): Homolog of NCBI NO: 15219876 NR Description: UDP-glucose glucosyltransferase, putative; id: At1g22400.1, supported by cDNA: gi_19698984 [Arabidopsis
  misc_feature (6)..(470): Homolog of NCBI NO: 17065006 NR Description: UDP-glucose glucosyltransferase [Arabidopsis
  misc_feature (6)..(470): Homolog of NCBI NO: 15219870 NR Description: UDP-glucose glucosyltransferase; protein id: supported by cDNA: gi_12083243, supported by cDNA: gi_17065005,
  misc_feature (6)..(470): Homolog of NCBI NO: 15219867 NR Description: UDP-glucose glucosyltransferase, putative;
  misc_feature (7)..(470): Homolog of NCBI NO: 25286821 NR Description: T16E15.2 protein - Arabidopsis thaliana
MERAKSRKPHIMMIPYPLQGHVIPFVHLAIKLASHGFTITFVNTDSIHHHISTAHQDDAGDIFSAARSSGQHDIRYTTVSDGFPLDFDRSLNHDQFFEGILHVFSAHVDDLIAKLSRRDDPPVTCLIADTFYVWSSMICDKHNLVNVSFWTEPALVLNLYYHMDLLISNGHFKSLDNRKDVIDYVPGVKAIEPKDLMSYLQVSDKDVDTNTVVYRILFKAFKDVKRADFVVCNTVQELEPDSLSALQAKQPVYAIGPVFSTDSVVPTSLWAESDCTEWLKGRPTGSVLYVSFGSYAHVGKKEIVEIAHGLLLSGISFIWVLRPDIVGSNVPDFLPAGFVDQAQDRGLVVQWCCQMEVISNPAVGGFFTHCGWNSILESVWCGLPLLCYPLLTDQFTNRKLVVDDWCIGINLCEKKTITRDQVSANVKRLMNGETSSELRNNVEKVKRHLKDAVTTVGSSETNFNLFVSEVRNRIETKLCNVNGLEISPSN

SEQ ID NO: 89583 - protein, 479 aa, Arabidopsis thaliana
  peptide (1)..(479): Ceres Seq. ID no. 12719637
  misc_feature (1)..(479): Homolog of NCBI NO: 15228063 NR Description: putative glucosyltransferase; protein id: supported by cDNA: gi_15809993 [Arabidopsis thaliana]
  misc_feature (1)..(463): Homolog of NCBI NO: 21537408 NR Description: putative glucosyltransferase [Arabidopsis
  misc_feature (1)..(463): Homolog of NCBI NO: 15226332 NR Description: putative glucosyltransferase; protein id: supported by cDNA: 13761. [Arabidopsis thaliana]
  misc_feature (1)..(462): Homolog of NCBI NO: 37534766 NR Description: putative putative glucosyltransferase [Oryza
  misc_feature (1)..(459): Homolog of NCBI NO: 15218268 NR Description: UDP-glucose glucosyltransferase, putative; id: At1g78270.1, supported by cDNA: gi_20466351 [Arabidopsis >gi|8052539|gb|AAF71803.1|AC013430_12 F3F9.19 [Arabidopsis
  misc_feature (1)..(458): Homolog of NCBI NO: 15219876 NR Description: UDP-glucose glucosyltransferase, putative; id: At1g22400.1, supported by cDNA: gi_19698984 [Arabidopsis
  misc_feature (1)..(459): Homolog of NCBI NO: 17065006 NR Description: UDP-glucose glucosyltransferase [Arabidopsis
  misc_feature (1)..(459): Homolog of NCBI NO: 15219870 NR Description: UDP-glucose glucosyltransferase; protein id: supported by cDNA: gi_12083243, supported by cDNA: gi_17065005,
  misc_feature (1)..(459): Homolog of NCBI NO: 15219867 NR Description: UDP-glucose glucosyltransferase, putative;
  misc_feature (1)..(459): Homolog of NCBI NO: 25286821 NR Description: T16E15.2 protein - Arabidopsis thaliana
MMIPYPLQGHVIPFVHLAIKLASHGFTITFVNTDSIHHHISTAHQDDAGDIFSAARSSGQHDIRYTTVSDGFPLDFDRSLNHDQFFEGILHVFSAHVDDLIAKLSRRDDPPVTCLIADTFYVWSSMICDKHNLVNVSFWTEPALVLNLYYHMDLLISNGHFKSLDNRKDVIDYVPGVKAIEPKDLMSYLQVSDKDVDTNTVVYRILFKAFKDVKRADFVVCNTVQELEPDSLSALQAKQPVYAIGPVFSTDSVVPTSLWAESDCTEWLKGRPTGSVLYVSFGSYAHVGKKEIVEIAHGLLLSGISFIWVLRPDIVGSNVPDFLPAGFVDQAQDRGLVVQWCCQMEVISNPAVGGFFTHCGWNSILESVWCGLPLLCYPLLTDQFTNRKLVVDDWCIGINLCEKKTITRDQVSANVKRLMNGETSSELRNNVEKVKRHLKDAVTTVGSSETNFNLFVSEVRNRIETKLCNVNGLEISPSN

SEQ ID NO: 89584 - DNA, 823 bp, Arabidopsis thaliana
  misc_feature (1)..(823): Ceres Seq. ID no. 12719656
  misc_feature: MA Experiment ID: 20000173 Result: Up-regulated in Transcription
  misc_feature: MA Experiment 20000173 PARAMETER Experiment Name: At_42deg_Heat_P Parameter: Age (day) Value: 14
  misc_feature: MA Experiment 20000173 PARAMETER Experiment Name: At_42deg_Heat_P Parameter: Organism Value: A. thaliana
  misc_feature: MA Experiment 20000173 PARAMETER Experiment Name: At_42deg_Heat_P Parameter: Plant Line Value: WS
  misc_feature: MA Experiment 20000173 PARAMETER Experiment Name: At_42deg_Heat_P Parameter: Temperature (deg C) Value: 42 vs. 22
  misc_feature: MA Experiment 20000173 PARAMETER Experiment Name: At_42deg_Heat_P Parameter: Timepoint (hr) Value: 6
  misc_feature: MA Experiment 20000173 PARAMETER Experiment Name: At_42deg_Heat_P Parameter: Tissue Value: Aerial
  misc_feature: MA Experiment ID: 20000573 Result: Up-regulated in Transcription
  misc_feature: MA Experiment 20000573 PARAMETER Experiment Name: At_100uM_ABA_Mutants__P Parameter: Organism Value: A. thaliana
  misc_feature: MA Experiment 20000573 PARAMETER Experiment Name: At_100uM_ABA_Mutants__P Parameter: Plant Line Value: CS22 vs. Ler wt
  misc_feature: MA Experiment 20000573 PARAMETER Experiment Name: At_100uM_ABA_Mutants__P Parameter: Timepoint (hr) Value: N/A
  misc_feature: MA Experiment 20000573 PARAMETER Experiment Name: At_100uM_ABA_Mutants__P Parameter: Tissue Value: Whole Plant
  misc_feature: MA Experiment 20000573 PARAMETER Experiment Name: At_100uM_ABA_Mutants__P Parameter: Treatment Value: None
  misc_feature: MA Experiment ID: 20000574 Result: Up-regulated in Transcription
  misc_feature: MA Experiment 20000574 PARAMETER Experiment Name: At_100uM_ABA_Mutants__P Parameter: Organism Value: A. thaliana
  misc_feature: MA Experiment 20000574 PARAMETER Experiment Name: At_100uM_ABA_Mutants__P Parameter: Plant Line Value: CS23 vs. Ler wt
  misc_feature: MA Experiment 20000574 PARAMETER Experiment Name: At_100uM_ABA_Mutants__P Parameter: Timepoint (hr) Value: N/A
  misc_feature: MA Experiment 20000574 PARAMETER Experiment Name: At_100uM_ABA_Mutants__P Parameter: Tissue Value: Whole Plant
  misc_feature: MA Experiment 20000574 PARAMETER Experiment Name: At_100uM_ABA_Mutants__P Parameter: Treatment Value: None
  misc_feature: MA Experiment ID: 20001557 Result: Up-regulated in Transcription
  misc_feature: MA Experiment 20001557 PARAMETER Experiment Name: At_Drought_Soil_Dry_P Parameter: Age (day) Value: 27
  misc_feature: MA Experiment 20001557 PARAMETER Experiment Name: At_Drought_Soil_Dry_P Parameter: Organism Value: A. thaliana
  misc_feature: MA Experiment 20001557 PARAMETER Experiment Name: At_Drought_Soil_Dry_P Parameter: Plant Line Value: WS
  misc_feature: MA Experiment 20001557 PARAMETER Experiment Name: At_Drought_Soil_Dry_P Parameter: Post Timepoint (hr) Value: 3
  misc_feature: MA Experiment 20001557 PARAMETER Experiment Name: At_Drought_Soil_Dry_P Parameter: Post-Treatment Value: Re-Water vs. No Drought
  misc_feature: MA Experiment 20001557 PARAMETER Experiment Name: At_Drought_Soil_Dry_P Parameter: Timepoint (day) Value: 13
  misc_feature: MA Experiment 20001557 PARAMETER Experiment Name: At_Drought_Soil_Dry_P Parameter: Treatment Value: Drought vs. No Drought
  misc_feature: MA Experiment ID: 20001560 Result: Up-regulated in Transcription
  misc_feature: MA Experiment 20001560 PARAMETER Experiment Name: At_Drought_Soil_Dry_P Parameter: Age (day) Value: 28
  misc_feature: MA Experiment 20001560 PARAMETER Experiment Name: At_Drought_Soil_Dry_P Parameter: Organism Value: A. thaliana
  misc_feature: MA Experiment 20001560 PARAMETER Experiment Name: At_Drought_Soil_Dry_P Parameter: Plant Line Value: WS
  misc_feature: MA Experiment 20001560 PARAMETER Experiment Name: At_Drought_Soil_Dry_P Parameter: Post Timepoint (hr) Value: None
  misc_feature: MA Experiment 20001560 PARAMETER Experiment Name: At_Drought_Soil_Dry_P Parameter: Post-Treatment Value: None
  misc_feature: MA Experiment 20001560 PARAMETER Experiment Name: At_Drought_Soil_Dry_P Parameter: Timepoint (day) Value: 14
  misc_feature: MA Experiment 20001560 PARAMETER Experiment Name: At_Drought_Soil_Dry_P Parameter: Treatment Value: Drought vs. No Drought
ctcttctctcgatctctctccctctctgcctcctctcttcctccaatcaacaaacacctctctgtttcactcccgccctttttcgaattcttctgatggcggagtcgcaggccaagagtcccggaggctgtggaagccatgagagtggtggagatcaaagtcccaggtcgttacatgttcgtgagcaagataggtttcttccgattgctaacataagccgtatcatgaaaagaggtcttcctgctaatgggaaaatcgctaaagatgctaaggagattgtgcaggaatgtgtctctgaattcatcagtttcgtcaccagcgaagcgagtgataaatgtcaaagagagaaaaggaagactattaatggagatgatttgctttgggcaatggctactttaggatttgaagactacatggaacctctcaaggtttacctgatgagatatagagagatggagggtgacacaaagggatcagcaaaaggtggggatccaaatgcaaagaaagatgggcaatcaagccaaaatggccagttctcgcagcttgctcaccaaggtccttatgggaactctcaagctcagcagcatatgatggttccaatgccgggaacagactagtatgagaggagtattcaactttggttatgttccaccaaaagaggttatcttatctgtatattatttgtgttgtaagagttttgctatgcagaacttgtgactataatcatctcattgttttgttttgtttttgtttccttggatttgttctgaatatgtcatcaagtcagtcagtctatttatatatttggtttgttgattatttc

SEQ ID NO: 89585 - protein, 204 aa, Arabidopsis thaliana
  peptide (1)..(204): Ceres Seq. ID no. 12719657
  misc_feature (32)..(204): Homolog of NCBI NO: 17979253 NR Description: At2g37060/T2N18.18 [Arabidopsis thaliana]
  misc_feature (32)..(191): Homolog of NCBI NO: 25408527 NR Description: probable CCAAT-box binding trancription factor
  misc_feature (32)..(192): Homolog of NCBI NO: 15231796 NR Description: transcription factor NF-Y, CCAAT-binding - like protein id: At3g53340.1 [Arabidopsis thaliana]
  misc_feature (32)..(151): Homolog of NCBI NO: 30687025 NR Description: CCAAT-box binding trancription factor -related
  misc_feature (32)..(195): Homolog of NCBI NO: 22380 NR Description: CAAT-box DNA binding protein subunit B (NF-YB)
  misc_feature (32)..(195): Homolog of NCBI NO: 115840 NR Description: CCAAT-BINDING TRANSCRIPTION FACTOR SUBUNIT A
  misc_feature (37)..(195): Homolog of NCBI NO: 30409461 NR Description: NF-YB [Oryza sativa (japonica cultivar-group)]
  misc_feature (41)..(188): Homolog of NCBI NO: 30409459 NR Description: NF-YB [Oryza sativa (japonica cultivar-group)]
  misc_feature (32)..(177): Homolog of NCBI NO: 18404885 NR Description: putative CCAAT-binding transcription factor protein id: At2g38880.1, supported by cDNA: 7805. [Arabidopsis >gi|2398527|emb|CAA74051.1| Transcription factor [Arabidopsis
  misc_feature (44)..(188): Homolog of NCBI NO: 34908028 NR Description: putative CAAT-box DNA binding protein [Oryza
LLSISLPLCLLSSSNQQTPLCFTPALFRILLMAESQAKSPGGCGSHESGGDQSPRSLHVREQDRFLPIANISRIMKRGLPANGKIAKDAKEIVQECVSEFISFVTSEASDKCQREKRKTINGDDLLWAMATLGFEDYMEPLKVYLMRYREMEGDTKGSAKGGDPNAKKDGQSSQNGQFSQLAHQGPYGNSQAQQHMMVPMPGTD

SEQ ID NO: 89586 - protein, 173 aa, Arabidopsis thaliana
  peptide (1)..(173): Ceres Seq. ID no. 12719658
  misc_feature (1)..(173): Homolog of NCBI NO: 17979253 NR Description: At2g37060/T2N18.18 [Arabidopsis thaliana]
  misc_feature (1)..(160): Homolog of NCBI NO: 25408527 NR Description: probable CCAAT-box binding trancription factor
  misc_feature (1)..(161): Homolog of NCBI NO: 15231796 NR Description: transcription factor NF-Y, CCAAT-binding - like protein id: At3g53340.1 [Arabidopsis thaliana]
  misc_feature (1)..(120): Homolog of NCBI NO: 30687025 NR Description: CCAAT-box binding trancription factor -related
  misc_feature (1)..(164): Homolog of NCBI NO: 22380 NR Description: CAAT-box DNA binding protein subunit B (NF-YB)
  misc_feature (1)..(164): Homolog of NCBI NO: 115840 NR Description: CCAAT-BINDING TRANSCRIPTION FACTOR SUBUNIT A
  misc_feature (6)..(164): Homolog of NCBI NO: 30409461 NR Description: NF-YB [Oryza sativa (japonica cultivar-group)]
  misc_feature (10)..(157): Homolog of NCBI NO: 30409459 NR Description: NF-YB [Oryza sativa (japonica cultivar-group)]
  misc_feature (1)..(146): Homolog of NCBI NO: 18404885 NR Description: putative CCAAT-binding transcription factor protein id: At2g38880.1, supported by cDNA: 7805. [Arabidopsis >gi|2398527|emb|CAA74051.1| Transcription factor [Arabidopsis
  misc_feature (13)..(157): Homolog of NCBI NO: 34908028 NR Description: putative CAAT-box DNA binding protein [Oryza
MAESQAKSPGGCGSHESGGDQSPRSLHVREQDRFLPIANISRIMKRGLPANGKIAKDAKEIVQECVSEFISFVTSEASDKCQREKRKTINGDDLLWAMATLGFEDYMEPLKVYLMRYREMEGDTKGSAKGGDPNAKKDGQSSQNGQFSQLAHQGPYGNSQAQQHMMVPMPGTD

SEQ ID NO: 89587 - protein, 130 aa, Arabidopsis thaliana
  peptide (1)..(130): Ceres Seq. ID no. 12719659
  misc_feature (1)..(130): Homolog of NCBI NO: 17979253 NR Description: At2g37060/T2N18.18 [Arabidopsis thaliana]
  misc_feature (1)..(117): Homolog of NCBI NO: 25408527 NR Description: probable CCAAT-box binding trancription factor
  misc_feature (1)..(118): Homolog of NCBI NO: 15231796 NR Description: transcription factor NF-Y, CCAAT-binding - like protein id: At3g53340.1 [Arabidopsis thaliana]
  misc_feature (1)..(77): Homolog of NCBI NO: 30687025 NR Description: CCAAT-box binding trancription factor -related
  misc_feature (1)..(121): Homolog of NCBI NO: 22380 NR Description: CAAT-box DNA binding protein subunit B (NF-YB)
  misc_feature (1)..(121): Homolog of NCBI NO: 115840 NR Description: CCAAT-BINDING TRANSCRIPTION FACTOR SUBUNIT A
  misc_feature (1)..(121): Homolog of NCBI NO: 30409461 NR Description: NF-YB [Oryza sativa (japonica cultivar-group)]
  misc_feature (1)..(114): Homolog of NCBI NO: 30409459 NR Description: NF-YB [Oryza sativa (japonica cultivar-group)]
  misc_feature (1)..(103): Homolog of NCBI NO: 18404885 NR Description: putative CCAAT-binding transcription factor protein id: At2g38880.1, supported by cDNA: 7805. [Arabidopsis >gi|2398527|emb|CAA74051.1| Transcription factor [Arabidopsis
  misc_feature (1)..(114): Homolog of NCBI NO: 34908028 NR Description: putative CAAT-box DNA binding protein [Oryza
MKRGLPANGKIAKDAKEIVQECVSEFISFVTSEASDKCQREKRKTINGDDLLWAMATLGFEDYMEPLKVYLMRYREMEGDTKGSAKGGDPNAKKDGQSSQNGQFSQLAHQGPYGNSQAQQHMMVPMPGTD

SEQ ID NO: 89588 - DNA, 1056 bp, Arabidopsis thaliana
  misc_feature (1)..(1056): Ceres Seq. ID no. 12719664
  misc_feature: MA Experiment ID: 20000184 Result: Down-regulated in Transcription
  misc_feature: MA Experiment 20000184 PARAMETER Experiment Name: At_Shoots__P Parameter: Age (day) Value: 7
  misc_feature: MA Experiment 20000184 PARAMETER Experiment Name: At_Shoots__P Parameter: Tissue Value: Shoots vs. Whole Plant
  misc_feature: MA Experiment ID: 20000264 Result: Down-regulated in Transcription
  misc_feature: MA Experiment 20000264 PARAMETER Experiment Name: At_Open_Flower_P Parameter: Age (day) Value: 21
  misc_feature: MA Experiment 20000264 PARAMETER Experiment Name: At_Open_Flower_P Parameter: Plant Line Value: WS
  misc_feature: MA Experiment 20000264 PARAMETER Experiment Name: At_Open_Flower_P Parameter: Tissue Value: Open Flower vs. Whole Plant
  misc_feature: MA Experiment ID: 20000438 Result: Down-regulated in Transcription
  misc_feature: MA Experiment 20000438 PARAMETER Experiment Name: At_Shoots__P Parameter: Age (day) Value: 14
  misc_feature: MA Experiment 20000438 PARAMETER Experiment Name: At_Shoots__P Parameter: Tissue Value: Shoots vs. Whole Plant
  misc_feature: MA Experiment ID: 20000794 Result: Down-regulated in Transcription
  misc_feature: MA Experiment 20000794 PARAMETER Experiment Name: At_Petals_P Parameter: Age (day) Value: 23-25 days
  misc_feature: MA Experiment 20000794 PARAMETER Experiment Name: At_Petals_P Parameter: Plant Line Value: WS
  misc_feature: MA Experiment 20000794 PARAMETER Experiment Name: At_Petals_P Parameter: Tissue Value: Petals vs. Whole plant
  misc_feature: MA Experiment ID: 20001556 Result: Down-regulated in Transcription
  misc_feature: MA Experiment 20001556 PARAMETER Experiment Name: At_Drought_Soil_Dry_P Parameter: Age (day) Value: 26
  misc_feature: MA Experiment 20001556 PARAMETER Experiment Name: At_Drought_Soil_Dry_P Parameter: Organism Value: A. thaliana
  misc_feature: MA Experiment 20001556 PARAMETER Experiment Name: At_Drought_Soil_Dry_P Parameter: Plant Line Value: WS
  misc_feature: MA Experiment 20001556 PARAMETER Experiment Name: At_Drought_Soil_Dry_P Parameter: Post Timepoint (hr) Value: None
  misc_feature: MA Experiment 20001556 PARAMETER Experiment Name: At_Drought_Soil_Dry_P Parameter: Post-Treatment Value: None
  misc_feature: MA Experiment 20001556 PARAMETER Experiment Name: At_Drought_Soil_Dry_P Parameter: Timepoint (day) Value: 12
  misc_feature: MA Experiment 20001556 PARAMETER Experiment Name: At_Drought_Soil_Dry_P Parameter: Treatment Value: Drought vs. No Drought
  misc_feature: MA Experiment ID: 20001557 Result: Down-regulated in Transcription
  misc_feature: MA Experiment 20001557 PARAMETER Experiment Name: At_Drought_Soil_Dry_P Parameter: Age (day) Value: 27
  misc_feature: MA Experiment 20001557 PARAMETER Experiment Name: At_Drought_Soil_Dry_P Parameter: Organism Value: A. thaliana
  misc_feature: MA Experiment 20001557 PARAMETER Experiment Name: At_Drought_Soil_Dry_P Parameter: Plant Line Value: WS
  misc_feature: MA Experiment 20001557 PARAMETER Experiment Name: At_Drought_Soil_Dry_P Parameter: Post Timepoint (hr) Value: 3
  misc_feature: MA Experiment 20001557 PARAMETER Experiment Name: At_Drought_Soil_Dry_P Parameter: Post-Treatment Value: Re-Water vs. No Drought
  misc_feature: MA Experiment 20001557 PARAMETER Experiment Name: At_Drought_Soil_Dry_P Parameter: Timepoint (day) Value: 13
  misc_feature: MA Experiment 20001557 PARAMETER Experiment Name: At_Drought_Soil_Dry_P Parameter: Treatment Value: Drought vs. No Drought
  misc_feature: MA Experiment ID: 20001558 Result: Down-regulated in Transcription
  misc_feature: MA Experiment 20001558 PARAMETER Experiment Name: At_Drought_Soil_Dry_P Parameter: Age (day) Value: 27
  misc_feature: MA Experiment 20001558 PARAMETER Experiment Name: At_Drought_Soil_Dry_P Parameter: Organism Value: A. thaliana
  misc_feature: MA Experiment 20001558 PARAMETER Experiment Name: At_Drought_Soil_Dry_P Parameter: Plant Line Value: WS
  misc_feature: MA Experiment 20001558 PARAMETER Experiment Name: At_Drought_Soil_Dry_P Parameter: Post Timepoint (hr) Value: 6
  misc_feature: MA Experiment 20001558 PARAMETER Experiment Name: At_Drought_Soil_Dry_P Parameter: Post-Treatment Value: Re-Water vs. No Drought
  misc_feature: MA Experiment 20001558 PARAMETER Experiment Name: At_Drought_Soil_Dry_P Parameter: Timepoint (day) Value: 13
  misc_feature: MA Experiment 20001558 PARAMETER Experiment Name: At_Drought_Soil_Dry_P Parameter: Treatment Value: Drought vs. No Drought
  misc_feature: MA Experiment ID: 20001773 Result: Up-regulated in Transcription
  misc_feature: MA Experiment 20001773 PARAMETER Experiment Name: At_Far-red-enriched-adult_P Parameter: Age (day) Value: 30
  misc_feature: MA Experiment 20001773 PARAMETER Experiment Name: At_Far-red-enriched-adult_P Parameter: Light Value: Far-red enriched vs. White
  misc_feature: MA Experiment 20001773 PARAMETER Experiment Name: At_Far-red-enriched-adult_P Parameter: Organism Value: A. thaliana
  misc_feature: MA Experiment 20001773 PARAMETER Experiment Name: At_Far-red-enriched-adult_P Parameter: Plant Line Value: Columbia
  misc_feature: MA Experiment 20001773 PARAMETER Experiment Name: At_Far-red-enriched-adult_P Parameter: Timepoint (hr) Value: 48
  misc_feature: MA Experiment 20001773 PARAMETER Experiment Name: At_Far-red-enriched-adult_P Parameter: Tissue Value: Aerial
atgggatctctagagagatcaaagaagaaagctcaagtatggaagaaagctgtgatccatttctctctatgttttgtaatgggtttcttcactggcttcgctcctgctggtaaggcctcatttttctctaatttcgaaacgacttcttatacttctacaaaatctccgattcctccccaaccttttgaaaacgctacatacacacaacattccctcctcaatagaaccttgatcaattcccaaagccaagctccagctcccgcagagtcgcgagaagctgaaggagaaacaagatctctctccgagaaagaagatgagaatcaagtaaaagtgacaccaagaggactagtgattgttgtaactccaataataactaaagatcgctacaaaaacgttcttcttaggagaatggccaataccttgaggctagttccacctcccttattgtggatagtcgtggaaaaacactcggatggcgaagaaaaatcttcgtctacaatgttaagaaagaccggtatcatgtatagacgtatagtcttcaaggaagatttcacaagcttagaatcagagcttgatcatcaaaggaatctagctttgaggcacattgaacatcacaaattaagcggaatagttcattttgcgggactaaacaacatatatgatcttgattttttcgtcaagatcagagatatcgaggtatttggtacttggccaatggcattgttatcggctaataggaaacgagtggtagtagaagggcctgtttgtgaatcttcacaagtattggggtggcatttgagaaaaattaataacgagacagagacaaagcctccgattcatatatcaagcttcgctttcaatagttccatactttgggaccctgagagatggggtcgtccttcttctgttgaaggcaccaaacaggattcgataaaatatgtgaagcaagtagttttggaggacgatacaaagttgaagggacttccggcacaagattgttccaagattatgctttggcgtctcaaatttcccacaagaacacgtttaagcacctga

SEQ ID NO: 89589 - protein, 351 aa, Arabidopsis thaliana
  peptide (1)..(351): Ceres Seq. ID no. 12719665
  misc_feature (137)..(351): Pfam Name: Glycosyltransferase family 43 Pfam Description: Glycosyltransferase family 43
  misc_feature (1)..(351): Homolog of NCBI NO: 15228084 NR Description: unknown protein; protein id: At2g37090.1
  misc_feature (1)..(344): Homolog of NCBI NO: 33771692 NR Description: glycuronosyltransferase-like protein [Gossypium
  misc_feature (34)..(344): Homolog of NCBI NO: 16973326 NR Description: hypothetical protein [Gossypium hirsutum]
  misc_feature (5)..(276): Homolog of NCBI NO: 32879543 NR Description: beta3-glucuronyltransferase [Zea mays]
  misc_feature (279)..(340): Homolog of NCBI NO: 32879543 NR Description: beta3-glucuronyltransferase [Zea mays]
  misc_feature (116)..(273): Homolog of NCBI NO: 32968187 NR Description: beta3-glucuronyltransferase [Triticum aestivum]
  misc_feature (279)..(345): Homolog of NCBI NO: 32968187 NR Description: beta3-glucuronyltransferase [Triticum aestivum]
  misc_feature (91)..(273): Homolog of NCBI NO: 32968174 NR Description: beta3-glucuronyltransferase [Hordeum vulgare]
  misc_feature (279)..(344): Homolog of NCBI NO: 32968174 NR Description: beta3-glucuronyltransferase [Hordeum vulgare]
  misc_feature (100)..(341): Homolog of NCBI NO: 5668771 NR Description: Contains similarity to gb|D88035 glycoprotein UDP- glucuronyltransferase from Rattus norvegicus. [Arabidopsis
MGSLERSKKKAQVWKKAVIHFSLCFVMGFFTGFAPAGKASFFSNFETTSYTSTKSPIPPQPFENATYTQHSLLNRTLINSQSQAPAPAESREAEGETRSLSEKEDENQVKVTPRGLVIVVTPIITKDRYKNVLLRRMANTLRLVPPPLLWIVVEKHSDGEEKSSSTMLRKTGIMYRRIVFKEDFTSLESELDHQRNLALRHIEHHKLSGIVHFAGLNNIYDLDFFVKIRDIEVFGTWPMALLSANRKRVVVEGPVCESSQVLGWHLRKINNETETKPPIHISSFAFNSSILWDPERWGRPSSVEGTKQDSIKYVKQVVLEDDTKLKGLPAQDCSKIMLWRLKFPTRTRLST

SEQ ID NO: 89590 - protein, 325 aa, Arabidopsis thaliana
  peptide (1)..(325): Ceres Seq. ID no. 12719666
  misc_feature (111)..(325): Pfam Name: Glycosyltransferase family 43 Pfam Description: Glycosyltransferase family 43
  misc_feature (1)..(325): Homolog of NCBI NO: 15228084 NR Description: unknown protein; protein id: At2g37090.1
  misc_feature (1)..(318): Homolog of NCBI NO: 33771692 NR Description: glycuronosyltransferase-like protein [Gossypium
  misc_feature (8)..(318): Homolog of NCBI NO: 16973326 NR Description: hypothetical protein [Gossypium hirsutum]
  misc_feature (1)..(250): Homolog of NCBI NO: 32879543 NR Description: beta3-glucuronyltransferase [Zea mays]
  misc_feature (253)..(314): Homolog of NCBI NO: 32879543 NR Description: beta3-glucuronyltransferase [Zea mays]
  misc_feature (90)..(247): Homolog of NCBI NO: 32968187 NR Description: beta3-glucuronyltransferase [Triticum aestivum]
  misc_feature (253)..(319): Homolog of NCBI NO: 32968187 NR Description: beta3-glucuronyltransferase [Triticum aestivum]
  misc_feature (65)..(247): Homolog of NCBI NO: 32968174 NR Description: beta3-glucuronyltransferase [Hordeum vulgare]
  misc_feature (253)..(318): Homolog of NCBI NO: 32968174 NR Description: beta3-glucuronyltransferase [Hordeum vulgare]
  misc_feature (74)..(315): Homolog of NCBI NO: 5668771 NR Description: Contains similarity to gb|D88035 glycoprotein UDP- glucuronyltransferase from Rattus norvegicus. [Arabidopsis
MGFFTGFAPAGKASFFSNFETTSYTSTKSPIPPQPFENATYTQHSLLNRTLINSQSQAPAPAESREAEGETRSLSEKEDENQVKVTPRGLVIVVTPIITKDRYKNVLLRRMANTLRLVPPPLLWIVVEKHSDGEEKSSSTMLRKTGIMYRRIVFKEDFTSLESELDHQRNLALRHIEHHKLSGIVHFAGLNNIYDLDFFVKIRDIEVFGTWPMALLSANRKRVVVEGPVCESSQVLGWHLRKINNETETKPPIHISSFAFNSSILWDPERWGRPSSVEGTKQDSIKYVKQVVLEDDTKLKGLPAQDCSKIMLWRLKFPTRTRLST

SEQ ID NO: 89591 - protein, 215 aa, Arabidopsis thaliana
  peptide (1)..(215): Ceres Seq. ID no. 12719667
  misc_feature (1)..(215): Pfam Name: Glycosyltransferase family 43 Pfam Description: Glycosyltransferase family 43
  misc_feature (1)..(215): Homolog of NCBI NO: 15228084 NR Description: unknown protein; protein id: At2g37090.1
  misc_feature (1)..(208): Homolog of NCBI NO: 33771692 NR Description: glycuronosyltransferase-like protein [Gossypium
  misc_feature (1)..(208): Homolog of NCBI NO: 16973326 NR Description: hypothetical protein [Gossypium hirsutum]
  misc_feature (1)..(140): Homolog of NCBI NO: 32879543 NR Description: beta3-glucuronyltransferase [Zea mays]
  misc_feature (143)..(204): Homolog of NCBI NO: 32879543 NR Description: beta3-glucuronyltransferase [Zea mays]
  misc_feature (1)..(137): Homolog of NCBI NO: 32968187 NR Description: beta3-glucuronyltransferase [Triticum aestivum]
  misc_feature (143)..(209): Homolog of NCBI NO: 32968187 NR Description: beta3-glucuronyltransferase [Triticum aestivum]
  misc_feature (1)..(137): Homolog of NCBI NO: 32968174 NR Description: beta3-glucuronyltransferase [Hordeum vulgare]
  misc_feature (143)..(208): Homolog of NCBI NO: 32968174 NR Description: beta3-glucuronyltransferase [Hordeum vulgare]
  misc_feature (1)..(205): Homolog of NCBI NO: 5668771 NR Description: Contains similarity to gb|D88035 glycoprotein UDP- glucuronyltransferase from Rattus norvegicus. [Arabidopsis
MANTLRLVPPPLLWIVVEKHSDGEEKSSSTMLRKTGIMYRRIVFKEDFTSLESELDHQRNLALRHIEHHKLSGIVHFAGLNNIYDLDFFVKIRDIEVFGTWPMALLSANRKRVVVEGPVCESSQVLGWHLRKINNETETKPPIHISSFAFNSSILWDPERWGRPSSVEGTKQDSIKYVKQVVLEDDTKLKGLPAQDCSKIMLWRLKFPTRTRLST

SEQ ID NO: 89592 - DNA, 1958 bp, Arabidopsis thaliana
  misc_feature (1)..(1958): Ceres Seq. ID no. 12719672
  misc_feature: MA Experiment ID: 20000437 Result: Up-regulated in Transcription
  misc_feature: MA Experiment 20000437 PARAMETER Experiment Name: At_Drought_P Parameter: Age (day) Value: 8
  misc_feature: MA Experiment 20000437 PARAMETER Experiment Name: At_Drought_P Parameter: Organism Value: A. thaliana
  misc_feature: MA Experiment 20000437 PARAMETER Experiment Name: At_Drought_P Parameter: Plant Line Value: WS
  misc_feature: MA Experiment 20000437 PARAMETER Experiment Name: At_Drought_P Parameter: Timepoint (hr) Value: 24
  misc_feature: MA Experiment 20000437 PARAMETER Experiment Name: At_Drought_P Parameter: Tissue Value: Whole Plant
  misc_feature: MA Experiment 20000437 PARAMETER Experiment Name: At_Drought_P Parameter: Treatment Value: Drought vs. No Drought
  misc_feature: MA Experiment ID: 20000794 Result: Up-regulated in Transcription
  misc_feature: MA Experiment 20000794 PARAMETER Experiment Name: At_Petals_P Parameter: Age (day) Value: 23-25 days
  misc_feature: MA Experiment 20000794 PARAMETER Experiment Name: At_Petals_P Parameter: Plant Line Value: WS
  misc_feature: MA Experiment 20000794 PARAMETER Experiment Name: At_Petals_P Parameter: Tissue Value: Petals vs. Whole plant
  misc_feature: MA Experiment ID: 20001757 Result: Down-regulated in Transcription
  misc_feature: MA Experiment 20001757 PARAMETER Experiment Name: At_50mM_NH4NO3_L-to-H_P Parameter: Timepoint (hr) Value: 6
  misc_feature: MA Experiment 20001757 PARAMETER Experiment Name: At_50mM_NH4NO3_L-to-H_P Parameter: Tissue Value: Leaf
  misc_feature: MA Experiment 20001757 PARAMETER Experiment Name: At_50mM_NH4NO3_L-to-H_P Parameter: Treatment Value: 50mM NH4NO3 vs 100mM Mannitol
  misc_feature: MA Experiment ID: 20001905 Result: Up-regulated in Transcription
  misc_feature: MA Experiment 20001905 PARAMETER Experiment Name: At_Drought_Reproduction_P Parameter: Age (day) Value: 40
  misc_feature: MA Experiment 20001905 PARAMETER Experiment Name: At_Drought_Reproduction_P Parameter: Organism Value: A. thaliana
  misc_feature: MA Experiment 20001905 PARAMETER Experiment Name: At_Drought_Reproduction_P Parameter: Plant Line Value: WS
  misc_feature: MA Experiment 20001905 PARAMETER Experiment Name: At_Drought_Reproduction_P Parameter: Timepoint (day) Value: 10
  misc_feature: MA Experiment 20001905 PARAMETER Experiment Name: At_Drought_Reproduction_P Parameter: Tissue Value: Rosettes
  misc_feature: MA Experiment 20001905 PARAMETER Experiment Name: At_Drought_Reproduction_P Parameter: Treatment Value: Drought vs. No Drought
  misc_feature: MA Experiment ID: 20001911 Result: Up-regulated in Transcription
  misc_feature: MA Experiment 20001911 PARAMETER Experiment Name: At_Drought_Reproduction_P Parameter: Age (day) Value: 40
  misc_feature: MA Experiment 20001911 PARAMETER Experiment Name: At_Drought_Reproduction_P Parameter: Organism Value: A. thaliana
  misc_feature: MA Experiment 20001911 PARAMETER Experiment Name: At_Drought_Reproduction_P Parameter: Plant Line Value: WS
  misc_feature: MA Experiment 20001911 PARAMETER Experiment Name: At_Drought_Reproduction_P Parameter: Timepoint (day) Value: 10
  misc_feature: MA Experiment 20001911 PARAMETER Experiment Name: At_Drought_Reproduction_P Parameter: Tissue Value: Flowers
  misc_feature: MA Experiment 20001911 PARAMETER Experiment Name: At_Drought_Reproduction_P Parameter: Treatment Value: Drought vs. No Drought
atcaccaaaaaagaaagcaatttgtcttcaaaacatatttctctctctaaaacctctttttcataaaaggttgcgtcatctatacgaatccatacgtctctttgcttttctccgatcggtcttcttttctcatcgccggaacgctttggtttaatggggcacagacattttcttggttcatcccagttttttgatgatgaacatgatcaaggctggaatcatacacacccagaacatccatattcgagtcaagcaacatctgggaccagtgagaacagatcacatgtttatccagcagaaaacatgttgaatgaaggaatgccagtgtcttctcattggaactcttctccaggaccaaatgcttatactgactcaggtcatagtgtggagagaccacactacaatccgggggtttcggggccgtcccatgatccttccgtgaattcaacagttccaactttctctgctccacatgagaattatgtgacatttgcatcttcttcaagctacaacagccagacatggtcaaatgctagttatgttgatcatcaatctatggaaagtgtgagaggagcacaaaagagaaaacgaccatgtccttcttccatctatgaaatgggtagttcaagccaatatcacggtgacagaactcctgcagacactcatttcccctcggaattgcacttgggaaaatcaataacgcatgatcatgaccctcattacatgccatggcttatgaacccaacttacagaagtaataatctctcgatcaggggagagagctcttcaaggaatgtccggagtcgtcctacacttgattcagagaccagcttaggtagaaataatttgccaagaagcttgagccttgattctcattctacacaccaccacagtgttgatcattatggctcaggtcaatttcctggtcagacatctcacggaaataaagactggaactgtgctagattgtccccagttcttagagatataaatggctttagtccagagacaaataatttccttcctgcaagaagtgttgtcaacagcttatctgttaatacttccggctatcatcaccatgagcttaccggaaacagaaaccctacagtttcccacggggttcctggaacttcaacactatctacaagcagcagccgcttctctcataggtcaacatccacctatagatcttcttcacacggttcgcgatcgggacatgtagcatcttcttctggagacaggtctcatttggtcactgagacttatccgtctaggcatttaaggccaccaccacacatttcatggcgtagcggtgatcggccagggagacgcagaagttcctatgagaggtttcagcctcctttcgatgaagttgctctccacgaacggttttcatctgaggaattcatggttgaagatcgccaaccacaatactacggatccagaaacatgcttgatcaccacagagacatgaggcttgacatcgataacatgagctatgaggaactccttgatcttggagaaaggattgggagtgtcaacactggtctatccgacagcgcaatctccagttgcttgttagcaacaatgtattatccatcatatcaaacagaggagcaaagaaaatgtgcaatctgcctggaggagtacaaggaaaaagaagagttaggggaagttaaggggtgtggtcatgactaccatgggaggtgcatcaagaaatggttgtctatgaagaactcttgccctatttgcaaatcccctgctttacctgatgcttctaagaactcatcataaattataggttatcttttatgtgtgcatgttatattcatttgtctttcgaaaggaagaaaaatatgtgacagaatataacattaagttttcttagtgattaatagttgtaaatagaagaaagtccaggatctttctcaagggttaatatatatgttaattattgg

SEQ ID NO: 89593 - protein, 546 aa, Arabidopsis thaliana
  peptide (1)..(546): Ceres Seq. ID no. 12719673
  misc_feature (492)..(533): Pfam Name: Zinc finger, C3HC4 type (RING finger) Pfam Description: Zinc finger, C3HC4 type (RING finger)
  misc_feature (1)..(546): Homolog of NCBI NO: 30687050 NR Description: zinc finger (C3HC4-type RING finger) protein
  misc_feature (40)..(455): Homolog of NCBI NO: 25408534 NR Description: probable protein with C-terminal RING finger
  misc_feature (506)..(546): Homolog of NCBI NO: 25408534 NR Description: probable protein with C-terminal RING finger
  misc_feature (1)..(544): Homolog of NCBI NO: 1086225 NR Description: RING-finger protein - Lotus japonicus
  misc_feature (85)..(544): Homolog of NCBI NO: 4240031 NR Description: DNA binding zinc finger protein (Pspzf) [Pisum
MGHRHFLGSSQFFDDEHDQGWNHTHPEHPYSSQATSGTSENRSHVYPAENMLNEGMPVSSHWNSSPGPNAYTDSGHSVERPHYNPGVSGPSHDPSVNSTVPTFSAPHENYVTFASSSSYNSQTWSNASYVDHQSMESVRGAQKRKRPCPSSIYEMGSSSQYHGDRTPADTHFPSELHLGKSITHDHDPHYMPWLMNPTYRSNNLSIRGESSSRNVRSRPTLDSETSLGRNNLPRSLSLDSHSTHHHSVDHYGSGQFPGQTSHGNKDWNCARLSPVLRDINGFSPETNNFLPARSVVNSLSVNTSGYHHHELTGNRNPTVSHGVPGTSTLSTSSSRFSHRSTSTYRSSSHGSRSGHVASSSGDRSHLVTETYPSRHLRPPPHISWRSGDRPGRRRSSYERFQPPFDEVALHERFSSEEFMVEDRQPQYYGSRNMLDHHRDMRLDIDNMSYEELLDLGERIGSVNTGLSDSAISSCLLATMYYPSYQTEEQRKCAICLEEYKEKEELGEVKGCGHDYHGRCIKKWLSMKNSCPICKSPALPDASKNSS

SEQ ID NO: 89594 - protein, 496 aa, Arabidopsis thaliana
  peptide (1)..(496): Ceres Seq. ID no. 12719674
  misc_feature (442)..(483): Pfam Name: Zinc finger, C3HC4 type (RING finger) Pfam Description: Zinc finger, C3HC4 type (RING finger)
  misc_feature (1)..(496): Homolog of NCBI NO: 30687050 NR Description: zinc finger (C3HC4-type RING finger) protein
  misc_feature (1)..(405): Homolog of NCBI NO: 25408534 NR Description: probable protein with C-terminal RING finger
  misc_feature (456)..(496): Homolog of NCBI NO: 25408534 NR Description: probable protein with C-terminal RING finger
  misc_feature (1)..(494): Homolog of NCBI NO: 1086225 NR Description: RING-finger protein - Lotus japonicus
  misc_feature (35)..(494): Homolog of NCBI NO: 4240031 NR Description: DNA binding zinc finger protein (Pspzf) [Pisum
MLNEGMPVSSHWNSSPGPNAYTDSGHSVERPHYNPGVSGPSHDPSVNSTVPTFSAPHENYVTFASSSSYNSQTWSNASYVDHQSMESVRGAQKRKRPCPSSIYEMGSSSQYHGDRTPADTHFPSELHLGKSITHDHDPHYMPWLMNPTYRSNNLSIRGESSSRNVRSRPTLDSETSLGRNNLPRSLSLDSHSTHHHSVDHYGSGQFPGQTSHGNKDWNCARLSPVLRDINGFSPETNNFLPARSVVNSLSVNTSGYHHHELTGNRNPTVSHGVPGTSTLSTSSSRFSHRSTSTYRSSSHGSRSGHVASSSGDRSHLVTETYPSRHLRPPPHISWRSGDRPGRRRSSYERFQPPFDEVALHERFSSEEFMVEDRQPQYYGSRNMLDHHRDMRLDIDNMSYEELLDLGERIGSVNTGLSDSAISSCLLATMYYPSYQTEEQRKCAICLEEYKEKEELGEVKGCGHDYHGRCIKKWLSMKNSCPICKSPALPDASKNSS

SEQ ID NO: 89595 - protein, 491 aa, Arabidopsis thaliana
  peptide (1)..(491): Ceres Seq. ID no. 12719675
  misc_feature (437)..(478): Pfam Name: Zinc finger, C3HC4 type (RING finger) Pfam Description: Zinc finger, C3HC4 type (RING finger)
  misc_feature (1)..(491): Homolog of NCBI NO: 30687050 NR Description: zinc finger (C3HC4-type RING finger) protein
  misc_feature (1)..(400): Homolog of NCBI NO: 25408534 NR Description: probable protein with C-terminal RING finger
  misc_feature (451)..(491): Homolog of NCBI NO: 25408534 NR Description: probable protein with C-terminal RING finger
  misc_feature (1)..(489): Homolog of NCBI NO: 1086225 NR Description: RING-finger protein - Lotus japonicus
  misc_feature (30)..(489): Homolog of NCBI NO: 4240031 NR Description: DNA binding zinc finger protein (Pspzf) [Pisum
MPVSSHWNSSPGPNAYTDSGHSVERPHYNPGVSGPSHDPSVNSTVPTFSAPHENYVTFASSSSYNSQTWSNASYVDHQSMESVRGAQKRKRPCPSSIYEMGSSSQYHGDRTPADTHFPSELHLGKSITHDHDPHYMPWLMNPTYRSNNLSIRGESSSRNVRSRPTLDSETSLGRNNLPRSLSLDSHSTHHHSVDHYGSGQFPGQTSHGNKDWNCARLSPVLRDINGFSPETNNFLPARSVVNSLSVNTSGYHHHELTGNRNPTVSHGVPGTSTLSTSSSRFSHRSTSTYRSSSHGSRSGHVASSSGDRSHLVTETYPSRHLRPPPHISWRSGDRPGRRRSSYERFQPPFDEVALHERFSSEEFMVEDRQPQYYGSRNMLDHHRDMRLDIDNMSYEELLDLGERIGSVNTGLSDSAISSCLLATMYYPSYQTEEQRKCAICLEEYKEKEELGEVKGCGHDYHGRCIKKWLSMKNSCPICKSPALPDASKNSS

SEQ ID NO: 89596 - DNA, 1974 bp, Arabidopsis thaliana
  misc_feature (1)..(1974): Ceres Seq. ID no. 12719680
  misc_feature: MA Experiment ID: 20000180 Result: Down-regulated in Transcription
  misc_feature: MA Experiment 20000180 PARAMETER Experiment Name: At_Germinating_Seeds_P Parameter: Age (hr) Value: 24 vs. 0
  misc_feature: MA Experiment 20000180 PARAMETER Experiment Name: At_Germinating_Seeds_P Parameter: Tissue Value: Germinating Seeds
  misc_feature: MA Experiment ID: 20001247 Result: Down-regulated in Transcription
  misc_feature: MA Experiment 20001247 PARAMETER Experiment Name: At_Far-red-induction_P Parameter: Age (day) Value: 7
  misc_feature: MA Experiment 20001247 PARAMETER Experiment Name: At_Far-red-induction_P Parameter: Light Value: Far-red vs. White
  misc_feature: MA Experiment 20001247 PARAMETER Experiment Name: At_Far-red-induction_P Parameter: Organism Value: A. thaliana
  misc_feature: MA Experiment 20001247 PARAMETER Experiment Name: At_Far-red-induction_P Parameter: Plant Line Value: Columbia
  misc_feature: MA Experiment 20001247 PARAMETER Experiment Name: At_Far-red-induction_P Parameter: Timepoint (hr) Value: 1
  misc_feature: MA Experiment 20001247 PARAMETER Experiment Name: At_Far-red-induction_P Parameter: Tissue Value: Whole Plant
  misc_feature: MA Experiment ID: 20001451 Result: Down-regulated in Transcription
  misc_feature: MA Experiment 20001451 PARAMETER Experiment Name: At_Far-red-induction_P Parameter: Age (day) Value: 7
  misc_feature: MA Experiment 20001451 PARAMETER Experiment Name: At_Far-red-induction_P Parameter: Light Value: Far-red vs. White
  misc_feature: MA Experiment 20001451 PARAMETER Experiment Name: At_Far-red-induction_P Parameter: Organism Value: A. thaliana
  misc_feature: MA Experiment 20001451 PARAMETER Experiment Name: At_Far-red-induction_P Parameter: Plant Line Value: Columbia
  misc_feature: MA Experiment 20001451 PARAMETER Experiment Name: At_Far-red-induction_P Parameter: Timepoint (hr) Value: 24
  misc_feature: MA Experiment 20001451 PARAMETER Experiment Name: At_Far-red-induction_P Parameter: Tissue Value: Whole Plant
atgaagttgggattcgaaattcaacgagccttgcaaggcttgctaaacaaggcggcggtcgacggcggtgcgtacggtcacctcatccagcacttcacccgtcaccgacttcctctccacgtgcttcagcttcacgcgcgtattgtcgtcttctccatcaagccggacaacttcctcgcgtcaaagctcatcagtttttacactaggcaggatcgtttccgccaagcactccatgtgttcgacgaaattaccgttagaaatgccttctcttacaacgcacttctcatcgcttatacttcgcgtgagatgtatttcgatgctttctcgttgttcttgtcctggattggatcctcttgttactcttccgatgctgccagaccggattctattagcatctcttgtgtgttgaaggcactgtcaggctgtgatgatttctggttgggttcattggctcgacaagttcatgggtttgttatacgaggtggatttgattcagatgtcttcgtgggcaatgggatgataacgtactatacaaagtgtgataacatcgagtctgcgaggaaagtgtttgatgaaatgtctgagagagatgttgtttcgtggaattctatgatttcagggtattctcaaagtgggtcttttgaggactgtaagaagatgtataaagcgatgttagcttgctctgattttaagcctaatggagtcactgtgataagcgtcttccaggcgtgcggacagtcaagcgatcttattttcgggttggaagttcacaagaagatgattgaaaatcatattcagatggatttatccttgtgtaatgctgtgattggtttttatgctaaatgtggtagcttggattatgcaagagcattgtttgatgagatgagtgagaaagattcggttacatacggagctataatttctggatatatggctcatggtcttgtcaaggaagcaatggctttgtttagtgaaatggaaagcattggtctgagtacgtggaatgctatgatttcgggtcttatgcagaataaccatcatgaggaggttataaactcatttagggagatgataagatgtggctcgaggccaaacacggtgaccctttcgagccttcttccttcgttgacatatagttcaaatctgaaagggggtaaggaaatccacgcttttgccatccgtaacggcgctgacaacaatatatatgtcaccacttccattatagataactatgctaaattaggatttctgctaggagctcaaagagtttttgataactgtaaagataggagcttgattgcttggacggcaattataacagcatatgctgttcatggggactctgattctgcttgtagtctttttgaccaaatgcagtgtcttggaactaagccagacgatgtcacactaacagctgttctttcagcttttgcgcactcaggggattcagacatggcgcagcatatatttgattctatgttaactaagtatgacattgagcctggagttgagcactatgcttgtatggtaagtgttcttagccgggctggaaaactttcggatgcaatggaattcatttctaagatgccaattgatccaattgctaaagtttggggtgcattgttgaacggagcctctgttcttggcgatttagagattgctaggttcgcttgtgatcggttgtttgagatggaacctgaaaacacagggaactacactatcatggcgaatttgtacactcaagcagggagatgggaagaagctgaaatggtaaggaataagatgaaaagaatcggattgaagaaaatccccggcaccagctggatcgaaactgagaaaggattacgtagtttcatagcgaaagacagttcgtgtgagagaagcaaagagatgtatgagataatagagggtttggttgagtcaatgagcgacaaagagtatatcaggaaacaagagcttgatgaagcttactga

SEQ ID NO: 89597 - protein, 657 aa, Arabidopsis thaliana
  peptide (1)..(657): Ceres Seq. ID no. 12719681
  misc_feature (332)..(366): Pfam Name: PPR repeat Pfam Description: PPR repeat
  misc_feature (11)..(608): Homolog of NCBI NO: 24796822 NR Description: putative PPR repeat containing protein [Oryza
  misc_feature (43)..(647): Homolog of NCBI NO: 15227619 NR Description: hypothetical protein; protein id: At2g29760.1
  misc_feature (50)..(646): Homolog of NCBI NO: 15225445 NR Description: hypothetical protein; protein id: At2g13600.1
  misc_feature (21)..(113): Homolog of NCBI NO: 15225445 NR Description: hypothetical protein; protein id: At2g13600.1
  misc_feature (28)..(642): Homolog of NCBI NO: 15227199 NR Description: hypothetical protein; protein id: At2g22410.1, by cDNA: gi_18086348 [Arabidopsis thaliana]
  misc_feature (301)..(639): Homolog of NCBI NO: 18483237 NR Description: putative vegetative storage protein [Sorghum
  misc_feature (76)..(326): Homolog of NCBI NO: 18483237 NR Description: putative vegetative storage protein [Sorghum
  misc_feature (45)..(648): Homolog of NCBI NO: 15237421 NR Description: putative protein; protein id: At5g16860.1
  misc_feature (42)..(645): Homolog of NCBI NO: 9279687 NR Description: gb|AAC35225.1~gene_id:MWI23.6~strong similarity
  misc_feature (42)..(645): Homolog of NCBI NO: 15228829 NR Description: hypothetical protein; protein id: At3g22690.1
MKLGFEIQRALQGLLNKAAVDGGAYGHLIQHFTRHRLPLHVLQLHARIVVFSIKPDNFLASKLISFYTRQDRFRQALHVFDEITVRNAFSYNALLIAYTSREMYFDAFSLFLSWIGSSCYSSDAARPDSISISCVLKALSGCDDFWLGSLARQVHGFVIRGGFDSDVFVGNGMITYYTKCDNIESARKVFDEMSERDVVSWNSMISGYSQSGSFEDCKKMYKAMLACSDFKPNGVTVISVFQACGQSSDLIFGLEVHKKMIENHIQMDLSLCNAVIGFYAKCGSLDYARALFDEMSEKDSVTYGAIISGYMAHGLVKEAMALFSEMESIGLSTWNAMISGLMQNNHHEEVINSFREMIRCGSRPNTVTLSSLLPSLTYSSNLKGGKEIHAFAIRNGADNNIYVTTSIIDNYAKLGFLLGAQRVFDNCKDRSLIAWTAIITAYAVHGDSDSACSLFDQMQCLGTKPDDVTLTAVLSAFAHSGDSDMAQHIFDSMLTKYDIEPGVEHYACMVSVLSRAGKLSDAMEFISKMPIDPIAKVWGALLNGASVLGDLEIARFACDRLFEMEPENTGNYTIMANLYTQAGRWEEAEMVRNKMKRIGLKKIPGTSWIETEKGLRSFIAKDSSCERSKEMYEIIEGLVESMSDKEYIRKQELDEAY

SEQ ID NO: 89598 - protein, 555 aa, Arabidopsis thaliana
  peptide (1)..(555): Ceres Seq. ID no. 12719682
  misc_feature (230)..(264): Pfam Name: PPR repeat Pfam Description: PPR repeat
  misc_feature (1)..(506): Homolog of NCBI NO: 24796822 NR Description: putative PPR repeat containing protein [Oryza
  misc_feature (1)..(545): Homolog of NCBI NO: 15227619 NR Description: hypothetical protein; protein id: At2g29760.1
  misc_feature (1)..(544): Homolog of NCBI NO: 15225445 NR Description: hypothetical protein; protein id: At2g13600.1
  misc_feature (1)..(11): Homolog of NCBI NO: 15225445 NR Description: hypothetical protein; protein id: At2g13600.1
  misc_feature (1)..(540): Homolog of NCBI NO: 15227199 NR Description: hypothetical protein; protein id: At2g22410.1, by cDNA: gi_18086348 [Arabidopsis thaliana]
  misc_feature (199)..(537): Homolog of NCBI NO: 18483237 NR Description: putative vegetative storage protein [Sorghum
  misc_feature (1)..(224): Homolog of NCBI NO: 18483237 NR Description: putative vegetative storage protein [Sorghum
  misc_feature (1)..(546): Homolog of NCBI NO: 15237421 NR Description: putative protein; protein id: At5g16860.1
  misc_feature (1)..(543): Homolog of NCBI NO: 9279687 NR Description: gb|AAC35225.1~gene_id:MWI23.6~strong similarity
  misc_feature (1)..(543): Homolog of NCBI NO: 15228829 NR Description: hypothetical protein; protein id: At3g22690.1
MYFDAFSLFLSWIGSSCYSSDAARPDSISISCVLKALSGCDDFWLGSLARQVHGFVIRGGFDSDVFVGNGMITYYTKCDNIESARKVFDEMSERDVVSWNSMISGYSQSGSFEDCKKMYKAMLACSDFKPNGVTVISVFQACGQSSDLIFGLEVHKKMIENHIQMDLSLCNAVIGFYAKCGSLDYARALFDEMSEKDSVTYGAIISGYMAHGLVKEAMALFSEMESIGLSTWNAMISGLMQNNHHEEVINSFREMIRCGSRPNTVTLSSLLPSLTYSSNLKGGKEIHAFAIRNGADNNIYVTTSIIDNYAKLGFLLGAQRVFDNCKDRSLIAWTAIITAYAVHGDSDSACSLFDQMQCLGTKPDDVTLTAVLSAFAHSGDSDMAQHIFDSMLTKYDIEPGVEHYACMVSVLSRAGKLSDAMEFISKMPIDPIAKVWGALLNGASVLGDLEIARFACDRLFEMEPENTGNYTIMANLYTQAGRWEEAEMVRNKMKRIGLKKIPGTSWIETEKGLRSFIAKDSSCERSKEMYEIIEGLVESMSDKEYIRKQELDEAY

SEQ ID NO: 89599 - protein, 485 aa, Arabidopsis thaliana
  peptide (1)..(485): Ceres Seq. ID no. 12719683
  misc_feature (160)..(194): Pfam Name: PPR repeat Pfam Description: PPR repeat
  misc_feature (1)..(436): Homolog of NCBI NO: 24796822 NR Description: putative PPR repeat containing protein [Oryza
  misc_feature (1)..(475): Homolog of NCBI NO: 15227619 NR Description: hypothetical protein; protein id: At2g29760.1
  misc_feature (1)..(474): Homolog of NCBI NO: 15225445 NR Description: hypothetical protein; protein id: At2g13600.1
  misc_feature (1)..(470): Homolog of NCBI NO: 15227199 NR Description: hypothetical protein; protein id: At2g22410.1, by cDNA: gi_18086348 [Arabidopsis thaliana]
  misc_feature (129)..(467): Homolog of NCBI NO: 18483237 NR Description: putative vegetative storage protein [Sorghum
  misc_feature (1)..(154): Homolog of NCBI NO: 18483237 NR Description: putative vegetative storage protein [Sorghum
  misc_feature (1)..(476): Homolog of NCBI NO: 15237421 NR Description: putative protein; protein id: At5g16860.1
  misc_feature (1)..(473): Homolog of NCBI NO: 9279687 NR Description: gb|AAC35225.1~gene_id:MWI23.6~strong similarity
  misc_feature (1)..(473): Homolog of NCBI NO: 15228829 NR Description: hypothetical protein; protein id: At3g22690.1
  misc_feature (1)..(471): Homolog of NCBI NO: 21740490 NR Description: OSJNBa0006B20.5 [Oryza sativa (japonica
MITYYTKCDNIESARKVFDEMSERDVVSWNSMISGYSQSGSFEDCKKMYKAMLACSDFKPNGVTVISVFQACGQSSDLIFGLEVHKKMIENHIQMDLSLCNAVIGFYAKCGSLDYARALFDEMSEKDSVTYGAIISGYMAHGLVKEAMALFSEMESIGLSTWNAMISGLMQNNHHEEVINSFREMIRCGSRPNTVTLSSLLPSLTYSSNLKGGKEIHAFAIRNGADNNIYVTTSIIDNYAKLGFLLGAQRVFDNCKDRSLIAWTAIITAYAVHGDSDSACSLFDQMQCLGTKPDDVTLTAVLSAFAHSGDSDMAQHIFDSMLTKYDIEPGVEHYACMVSVLSRAGKLSDAMEFISKMPIDPIAKVWGALLNGASVLGDLEIARFACDRLFEMEPENTGNYTIMANLYTQAGRWEEAEMVRNKMKRIGLKKIPGTSWIETEKGLRSFIAKDSSCERSKEMYEIIEGLVESMSDKEYIRKQELDEAY

SEQ ID NO: 89600 - DNA, 888 bp, Arabidopsis thaliana
  misc_feature (1)..(888): Ceres Seq. ID no. 12719684
  misc_feature: MA Experiment ID: 20000184 Result: Up-regulated in Transcription
  misc_feature: MA Experiment 20000184 PARAMETER Experiment Name: At_Shoots__P Parameter: Age (day) Value: 7
  misc_feature: MA Experiment 20000184 PARAMETER Experiment Name: At_Shoots__P Parameter: Tissue Value: Shoots vs. Whole Plant
  misc_feature: MA Experiment ID: 20000235 Result: Down-regulated in Transcription
  misc_feature: MA Experiment 20000235 PARAMETER Experiment Name: At_Siliques_P Parameter: Age (day) Value: 21
  misc_feature: MA Experiment 20000235 PARAMETER Experiment Name: At_Siliques_P Parameter: Organism Value: A. thaliana
  misc_feature: MA Experiment 20000235 PARAMETER Experiment Name: At_Siliques_P Parameter: Plant Line Value: WS
  misc_feature: MA Experiment 20000235 PARAMETER Experiment Name: At_Siliques_P Parameter: Tissue Value: 5-10mm Siliques vs. Whole Plant
  misc_feature: MA Experiment ID: 20000264 Result: Down-regulated in Transcription
  misc_feature: MA Experiment 20000264 PARAMETER Experiment Name: At_Open_Flower_P Parameter: Age (day) Value: 21
  misc_feature: MA Experiment 20000264 PARAMETER Experiment Name: At_Open_Flower_P Parameter: Plant Line Value: WS
  misc_feature: MA Experiment 20000264 PARAMETER Experiment Name: At_Open_Flower_P Parameter: Tissue Value: Open Flower vs. Whole Plant
  misc_feature: MA Experiment ID: 20000265 Result: Down-regulated in Transcription
  misc_feature: MA Experiment 20000265 PARAMETER Experiment Name: At_Open_Flower_P Parameter: Age (day) Value: 21
  misc_feature: MA Experiment 20000265 PARAMETER Experiment Name: At_Open_Flower_P Parameter: Plant Line Value: WS
  misc_feature: MA Experiment 20000265 PARAMETER Experiment Name: At_Open_Flower_P Parameter: Tissue Value: Closed Flower vs. Whole Plant
  misc_feature: MA Experiment ID: 20000495 Result: Up-regulated in Transcription
  misc_feature: MA Experiment 20000495 PARAMETER Experiment Name: At_Guard_Cells_P Parameter: Harvest Date Value: 8/2/2002
  misc_feature: MA Experiment 20000495 PARAMETER Experiment Name: At_Guard_Cells_P Parameter: Organism Value: A. thaliana
  misc_feature: MA Experiment 20000495 PARAMETER Experiment Name: At_Guard_Cells_P Parameter: Tissue Value: Guard Cells vs. Leaves
  misc_feature: MA Experiment ID: 20000496 Result: Up-regulated in Transcription
  misc_feature: MA Experiment 20000496 PARAMETER Experiment Name: At_Guard_Cells_P Parameter: Harvest Date Value: 7/19/2002
  misc_feature: MA Experiment 20000496 PARAMETER Experiment Name: At_Guard_Cells_P Parameter: Organism Value: Canola
  misc_feature: MA Experiment 20000496 PARAMETER Experiment Name: At_Guard_Cells_P Parameter: Tissue Value: Guard Cells vs. Leaves
  misc_feature: MA Experiment ID: 20001248 Result: Up-regulated in Transcription
  misc_feature: MA Experiment 20001248 PARAMETER Experiment Name: At_Far-red-induction_P Parameter: Age (day) Value: 7
  misc_feature: MA Experiment 20001248 PARAMETER Experiment Name: At_Far-red-induction_P Parameter: Light Value: Far-red vs. White
  misc_feature: MA Experiment 20001248 PARAMETER Experiment Name: At_Far-red-induction_P Parameter: Organism Value: A. thaliana
  misc_feature: MA Experiment 20001248 PARAMETER Experiment Name: At_Far-red-induction_P Parameter: Plant Line Value: Columbia
  misc_feature: MA Experiment 20001248 PARAMETER Experiment Name: At_Far-red-induction_P Parameter: Timepoint (hr) Value: 4
  misc_feature: MA Experiment 20001248 PARAMETER Experiment Name: At_Far-red-induction_P Parameter: Tissue Value: Whole Plant
  misc_feature: MA Experiment ID: 20001450 Result: Up-regulated in Transcription
  misc_feature: MA Experiment 20001450 PARAMETER Experiment Name: At_Far-red-induction_P Parameter: Age (day) Value: 7
  misc_feature: MA Experiment 20001450 PARAMETER Experiment Name: At_Far-red-induction_P Parameter: Light Value: Far-red vs. White
  misc_feature: MA Experiment 20001450 PARAMETER Experiment Name: At_Far-red-induction_P Parameter: Organism Value: A. thaliana
  misc_feature: MA Experiment 20001450 PARAMETER Experiment Name: At_Far-red-induction_P Parameter: Plant Line Value: Columbia
  misc_feature: MA Experiment 20001450 PARAMETER Experiment Name: At_Far-red-induction_P Parameter: Timepoint (hr) Value: 8
  misc_feature: MA Experiment 20001450 PARAMETER Experiment Name: At_Far-red-induction_P Parameter: Tissue Value: Whole Plant
  misc_feature: MA Experiment ID: 20001451 Result: Up-regulated in Transcription
  misc_feature: MA Experiment 20001451 PARAMETER Experiment Name: At_Far-red-induction_P Parameter: Age (day) Value: 7
  misc_feature: MA Experiment 20001451 PARAMETER Experiment Name: At_Far-red-induction_P Parameter: Light Value: Far-red vs. White
  misc_feature: MA Experiment 20001451 PARAMETER Experiment Name: At_Far-red-induction_P Parameter: Organism Value: A. thaliana
  misc_feature: MA Experiment 20001451 PARAMETER Experiment Name: At_Far-red-induction_P Parameter: Plant Line Value: Columbia
  misc_feature: MA Experiment 20001451 PARAMETER Experiment Name: At_Far-red-induction_P Parameter: Timepoint (hr) Value: 24
  misc_feature: MA Experiment 20001451 PARAMETER Experiment Name: At_Far-red-induction_P Parameter: Tissue Value: Whole Plant
  misc_feature: MA Experiment ID: 20001905 Result: Down-regulated in Transcription
  misc_feature: MA Experiment 20001905 PARAMETER Experiment Name: At_Drought_Reproduction_P Parameter: Age (day) Value: 40
  misc_feature: MA Experiment 20001905 PARAMETER Experiment Name: At_Drought_Reproduction_P Parameter: Organism Value: A. thaliana
  misc_feature: MA Experiment 20001905 PARAMETER Experiment Name: At_Drought_Reproduction_P Parameter: Plant Line Value: WS
  misc_feature: MA Experiment 20001905 PARAMETER Experiment Name: At_Drought_Reproduction_P Parameter: Timepoint (day) Value: 10
  misc_feature: MA Experiment 20001905 PARAMETER Experiment Name: At_Drought_Reproduction_P Parameter: Tissue Value: Rosettes
  misc_feature: MA Experiment 20001905 PARAMETER Experiment Name: At_Drought_Reproduction_P Parameter: Treatment Value: Drought vs. No Drought
agaagacgacgacaaaacaaaaaagttgcgagagacagagagaaacagagacatggatctgaaatgggatgattttttcaacgattacgaatggctgatcgtgtttctgaaaggtatggtgaagccagcggcggcgctcgtggtggtgcttttggcggtgattctttcatactcgcagaacctatctttggaaggagaaatgatatactctgtttcccgatcgtttcttcaactctctgttatcggatttgttcttcagttcatctttaaccaagagaactcaggctggatcatccttgcgtatctcttcatggtctctgtcgccggttacactgccggacaacgtgcgaggcacgtgccacgtggaaagtacgtggccggattatcgatccttgccgggacttcaattacaatgttcttgctcgtcctcctcaacgtctttcctttcactccgaggtatatgatcccaatcgccggaatgttggtcggaaatgccatgaccgtcaccggagttaccatgaaacagcttcgagatgacatcaaaatgcaactcaacctggtggagacggcattggcactaggagcaacgccaagacaagcgacgttgcaacaggtgaagagagcactagtgatctctctgtctccggttttagatagctgcaaaaccgttggattgatctctctaccaggcgcaatgactggtatgataatgggcggggcgtcgcctctagaagctattcagcttcagatagtagtcatgaacatgatggtaggagcagctacggttagtagcatcacgtctacttatctttgttggccatctttcttcactaaagcttaccagttacaaactcatgtcttctcctcagattgaaacttttataaatc

SEQ ID NO: 89601 - protein, 290 aa, Arabidopsis thaliana
  peptide (1)..(290): Ceres Seq. ID no. 12719685
  misc_feature (35)..(278): Pfam Name: Uncharacterised protein family (UPF0014) Pfam Description: Uncharacterised protein family (UPF0014)
  misc_feature (18)..(290): Homolog of NCBI NO: 15228120 NR Description: unknown protein; protein id: At2g37330.1, by cDNA: gi_18252848 [Arabidopsis thaliana]
  misc_feature (35)..(290): Homolog of NCBI NO: 8099122 NR Description: similar to an Arabidopsis thialiana chromosome
  misc_feature (48)..(283): Homolog of NCBI NO: 20806838 NR Description: predicted permease [Thermoanaerobacter >gi|20515305|gb|AAM23613.1| predicted permease
  misc_feature (43)..(282): Homolog of NCBI NO: 24111874 NR Description: putative metal resistance protein [Shigella
  misc_feature (48)..(282): Homolog of NCBI NO: 22536854 NR Description: membrane protein, putative [Streptococcus
  misc_feature (48)..(282): Homolog of NCBI NO: 25010719 NR Description: Unknown [Streptococcus agalactiae NEM316]
  misc_feature (43)..(282): Homolog of NCBI NO: 15800228 NR Description: putative metal resistance protein [Escherichia O157:H7 EDL933] >gi|15829808|ref|NP_308581.1| putative metal protein [Escherichia coli O157:H7] >gi|16128475|ref|NP_415024.1|
  misc_feature (43)..(282): Homolog of NCBI NO: 33347459 NR Description: putative metal resistance protein [Escherichia K12] >gi|3915949|sp|P77307|YBBM_ECOLI Hypothetical UPF0014
  misc_feature (43)..(282): Homolog of NCBI NO: 16759481 NR Description: putative membrane protein [Salmonella enterica enterica serovar Typhi] >gi|16763883|ref|NP_459498.1| putative family transport protein, metal resistance protein [Salmonella
  misc_feature (43)..(282): Homolog of NCBI NO: 29142747 NR Description: putative membrane protein [Salmonella enterica enterica serovar Typhi Ty2] >gi|29138379|gb|AAO69949.1| putative
EDDDKTKKLRETERNRDMDLKWDDFFNDYEWLIVFLKGMVKPAAALVVVLLAVILSYSQNLSLEGEMIYSVSRSFLQLSVIGFVLQFIFNQENSGWIILAYLFMVSVAGYTAGQRARHVPRGKYVAGLSILAGTSITMFLLVLLNVFPFTPRYMIPIAGMLVGNAMTVTGVTMKQLRDDIKMQLNLVETALALGATPRQATLQQVKRALVISLSPVLDSCKTVGLISLPGAMTGMIMGGASPLEAIQLQIVVMNMMVGAATVSSITSTYLCWPSFFTKAYQLQTHVFSSD

SEQ ID NO: 89602 - protein, 273 aa, Arabidopsis thaliana
  peptide (1)..(273): Ceres Seq. ID no. 12719686
  misc_feature (18)..(261): Pfam Name: Uncharacterised protein family (UPF0014) Pfam Description: Uncharacterised protein family (UPF0014)
  misc_feature (1)..(273): Homolog of NCBI NO: 15228120 NR Description: unknown protein; protein id: At2g37330.1, by cDNA: gi_18252848 [Arabidopsis thaliana]
  misc_feature (18)..(273): Homolog of NCBI NO: 8099122 NR Description: similar to an Arabidopsis thialiana chromosome
  misc_feature (31)..(266): Homolog of NCBI NO: 20806838 NR Description: predicted permease [Thermoanaerobacter >gi|20515305|gb|AAM23613.1| predicted permease
  misc_feature (26)..(265): Homolog of NCBI NO: 24111874 NR Description: putative metal resistance protein [Shigella
  misc_feature (31)..(265): Homolog of NCBI NO: 22536854 NR Description: membrane protein, putative [Streptococcus
  misc_feature (31)..(265): Homolog of NCBI NO: 25010719 NR Description: Unknown [Streptococcus agalactiae NEM316]
  misc_feature (26)..(265): Homolog of NCBI NO: 15800228 NR Description: putative metal resistance protein [Escherichia O157:H7 EDL933] >gi|15829808|ref|NP_308581.1| putative metal protein [Escherichia coli O157:H7] >gi|16128475|ref|NP_415024.1|
  misc_feature (26)..(265): Homolog of NCBI NO: 33347459 NR Description: putative metal resistance protein [Escherichia K12] >gi|3915949|sp|P77307|YBBM_ECOLI Hypothetical UPF0014
  misc_feature (26)..(265): Homolog of NCBI NO: 16759481 NR Description: putative membrane protein [Salmonella enterica enterica serovar Typhi] >gi|16763883|ref|NP_459498.1| putative family transport protein, metal resistance protein [Salmonella
  misc_feature (26)..(265): Homolog of NCBI NO: 29142747 NR Description: putative membrane protein [Salmonella enterica enterica serovar Typhi Ty2] >gi|29138379|gb|AAO69949.1| putative
MDLKWDDFFNDYEWLIVFLKGMVKPAAALVVVLLAVILSYSQNLSLEGEMIYSVSRSFLQLSVIGFVLQFIFNQENSGWIILAYLFMVSVAGYTAGQRARHVPRGKYVAGLSILAGTSITMFLLVLLNVFPFTPRYMIPIAGMLVGNAMTVTGVTMKQLRDDIKMQLNLVETALALGATPRQATLQQVKRALVISLSPVLDSCKTVGLISLPGAMTGMIMGGASPLEAIQLQIVVMNMMVGAATVSSITSTYLCWPSFFTKAYQLQTHVFSSD

SEQ ID NO: 89603 - protein, 252 aa, Arabidopsis thaliana
  peptide (1)..(252): Ceres Seq. ID no. 12719687
  misc_feature (1)..(240): Pfam Name: Uncharacterised protein family (UPF0014) Pfam Description: Uncharacterised protein family (UPF0014)
  misc_feature (1)..(252): Homolog of NCBI NO: 15228120 NR Description: unknown protein; protein id: At2g37330.1, by cDNA: gi_18252848 [Arabidopsis thaliana]
  misc_feature (1)..(252): Homolog of NCBI NO: 8099122 NR Description: similar to an Arabidopsis thialiana chromosome
  misc_feature (10)..(245): Homolog of NCBI NO: 20806838 NR Description: predicted permease [Thermoanaerobacter >gi|20515305|gb|AAM23613.1| predicted permease
  misc_feature (5)..(244): Homolog of NCBI NO: 24111874 NR Description: putative metal resistance protein [Shigella
  misc_feature (10)..(244): Homolog of NCBI NO: 22536854 NR Description: membrane protein, putative [Streptococcus
  misc_feature (10)..(244): Homolog of NCBI NO: 25010719 NR Description: Unknown [Streptococcus agalactiae NEM316]
  misc_feature (5)..(244): Homolog of NCBI NO: 15800228 NR Description: putative metal resistance protein [Escherichia O157:H7 EDL933] >gi|15829808|ref|NP_308581.1| putative metal protein [Escherichia coli O157:H7] >gi|16128475|ref|NP_415024.1|
  misc_feature (5)..(244): Homolog of NCBI NO: 33347459 NR Description: putative metal resistance protein [Escherichia K12] >gi|3915949|sp|P77307|YBBM_ECOLI Hypothetical UPF0014
  misc_feature (5)..(244): Homolog of NCBI NO: 16759481 NR Description: putative membrane protein [Salmonella enterica enterica serovar Typhi] >gi|16763883|ref|NP_459498.1| putative family transport protein, metal resistance protein [Salmonella
  misc_feature (5)..(244): Homolog of NCBI NO: 29142747 NR Description: putative membrane protein [Salmonella enterica enterica serovar Typhi Ty2] >gi|29138379|gb|AAO69949.1| putative
MVKPAAALVVVLLAVILSYSQNLSLEGEMIYSVSRSFLQLSVIGFVLQFIFNQENSGWIILAYLFMVSVAGYTAGQRARHVPRGKYVAGLSILAGTSITMFLLVLLNVFPFTPRYMIPIAGMLVGNAMTVTGVTMKQLRDDIKMQLNLVETALALGATPRQATLQQVKRALVISLSPVLDSCKTVGLISLPGAMTGMIMGGASPLEAIQLQIVVMNMMVGAATVSSITSTYLCWPSFFTKAYQLQTHVFSSD

SEQ ID NO: 89604 - DNA, 966 bp, Arabidopsis thaliana
  misc_feature (1)..(966): Ceres Seq. ID no. 12719692
  misc_feature: MA Experiment ID: 20000184 Result: Up-regulated in Transcription
  misc_feature: MA Experiment 20000184 PARAMETER Experiment Name: At_Shoots__P Parameter: Age (day) Value: 7
  misc_feature: MA Experiment 20000184 PARAMETER Experiment Name: At_Shoots__P Parameter: Tissue Value: Shoots vs. Whole Plant
  misc_feature: MA Experiment ID: 20000438 Result: Up-regulated in Transcription
  misc_feature: MA Experiment 20000438 PARAMETER Experiment Name: At_Shoots__P Parameter: Age (day) Value: 14
  misc_feature: MA Experiment 20000438 PARAMETER Experiment Name: At_Shoots__P Parameter: Tissue Value: Shoots vs. Whole Plant
  misc_feature: MA Experiment ID: 20000794 Result: Up-regulated in Transcription
  misc_feature: MA Experiment 20000794 PARAMETER Experiment Name: At_Petals_P Parameter: Age (day) Value: 23-25 days
  misc_feature: MA Experiment 20000794 PARAMETER Experiment Name: At_Petals_P Parameter: Plant Line Value: WS
  misc_feature: MA Experiment 20000794 PARAMETER Experiment Name: At_Petals_P Parameter: Tissue Value: Petals vs. Whole plant
atggatttgcatgaatcagaatcaagaacacatgttctgtccaccgatggtgatgatggttacatagacatggaagtcaatctctcttcttcttcttcttcttctacttcgtcctcaagcttcttcagcttccccgtcacttcctccccgccgcaaagcagagagttcgagtttcaaatgtgttcctccgccgtagcttccggtgaatcaaccacatctccggctgatgagcttttctacaaaggtcaacttcttcctcttcatctccctcctcgtctcaaaatggtacaaaagcttcttctcgcttcctcctcctccaccgccgcaacggaaactcctatctccccacgcgccgccgcagatgtattgtctccacggagattcagtagctgtgagatcggacaagacgagaattgtttctttgagatttcgacagagctcaagagattcatcgagagcaacgagaatcatcttggaaacagttggagcaaaaagatcaaacattcatccataacacaaaaactcaaagcctcacgcgcttacataaaagctctgttctcaaaacaagcctgttcagattcatcagagatcaatccaagattcaaaattgaaccttctaaagtctcaagaaagaagaacccatttgtgaacagtgagaatcctctgttaattcataggagatctttctctggtgtgatacagagacattctcaagcaaagtgttcaacatcttcttcttcttcttcctctgcgtcttcgttgtcttcttcgttcagttttggatcaaacgggtcgttggatctgcagacactgatgagaagcagcaatgcgagtgataactccattgaaggagcgatcgagcattgtaagcagtcgtttactactaggaagagtaatgtgactgaatctgagctctgttcttcaagaacctctgtttctacttgtggtgaccttgataaagattga

SEQ ID NO: 89605 - protein, 321 aa, Arabidopsis thaliana
  peptide (1)..(321): Ceres Seq. ID no. 12719693
  misc_feature (1)..(321): Homolog of NCBI NO: 15228126 NR Description: unknown protein; protein id: At2g37380.1
  misc_feature (18)..(292): Homolog of NCBI NO: 15225080 NR Description: unknown protein; protein id: At2g39370.1
  misc_feature (32)..(311): Homolog of NCBI NO: 34908072 NR Description: P0506B12.25 [Oryza sativa (japonica
  misc_feature (29)..(317): Homolog of NCBI NO: 28828184 NR Description: similar to Leishmania major. Ppg3 [Dictyostelium
  misc_feature (19)..(122): Homolog of NCBI NO: 8099142 NR Description: hypothetical protein [Oryza sativa]
  misc_feature (15)..(314): Homolog of NCBI NO: 19113482 NR Description: hypothetical serine-rich secreted protein
  misc_feature (27)..(311): Homolog of NCBI NO: 19113482 NR Description: hypothetical serine-rich secreted protein
  misc_feature (48)..(121): Homolog of NCBI NO: 15239627 NR Description: putative protein; protein id: At5g26230.1
MDLHESESRTHVLSTDGDDGYIDMEVNLSSSSSSSTSSSSFFSFPVTSSPPQSREFEFQMCSSAVASGESTTSPADELFYKGQLLPLHLPPRLKMVQKLLLASSSSTAATETPISPRAAADVLSPRRFSSCEIGQDENCFFEISTELKRFIESNENHLGNSWSKKIKHSSITQKLKASRAYIKALFSKQACSDSSEINPRFKIEPSKVSRKKNPFVNSENPLLIHRRSFSGVIQRHSQAKCSTSSSSSSSASSLSSSFSFGSNGSLDLQTLMRSSNASDNSIEGAIEHCKQSFTTRKSNVTESELCSSRTSVSTCGDLDKD

SEQ ID NO: 89606 - protein, 298 aa, Arabidopsis thaliana
  peptide (1)..(298): Ceres Seq. ID no. 12719694
  misc_feature (1)..(298): Homolog of NCBI NO: 15228126 NR Description: unknown protein; protein id: At2g37380.1
  misc_feature (1)..(269): Homolog of NCBI NO: 15225080 NR Description: unknown protein; protein id: At2g39370.1
  misc_feature (9)..(288): Homolog of NCBI NO: 34908072 NR Description: P0506B12.25 [Oryza sativa (japonica
  misc_feature (6)..(294): Homolog of NCBI NO: 28828184 NR Description: similar to Leishmania major. Ppg3 [Dictyostelium
  misc_feature (1)..(99): Homolog of NCBI NO: 8099142 NR Description: hypothetical protein [Oryza sativa]
  misc_feature (1)..(291): Homolog of NCBI NO: 19113482 NR Description: hypothetical serine-rich secreted protein
  misc_feature (4)..(288): Homolog of NCBI NO: 19113482 NR Description: hypothetical serine-rich secreted protein
  misc_feature (25)..(98): Homolog of NCBI NO: 15239627 NR Description: putative protein; protein id: At5g26230.1
MEVNLSSSSSSSTSSSSFFSFPVTSSPPQSREFEFQMCSSAVASGESTTSPADELFYKGQLLPLHLPPRLKMVQKLLLASSSSTAATETPISPRAAADVLSPRRFSSCEIGQDENCFFEISTELKRFIESNENHLGNSWSKKIKHSSITQKLKASRAYIKALFSKQACSDSSEINPRFKIEPSKVSRKKNPFVNSENPLLIHRRSFSGVIQRHSQAKCSTSSSSSSSASSLSSSFSFGSNGSLDLQTLMRSSNASDNSIEGAIEHCKQSFTTRKSNVTESELCSSRTSVSTCGDLDKD

SEQ ID NO: 89607 - protein, 262 aa, Arabidopsis thaliana
  peptide (1)..(262): Ceres Seq. ID no. 12719695
  misc_feature (1)..(262): Homolog of NCBI NO: 15228126 NR Description: unknown protein; protein id: At2g37380.1
  misc_feature (1)..(233): Homolog of NCBI NO: 15225080 NR Description: unknown protein; protein id: At2g39370.1
  misc_feature (1)..(252): Homolog of NCBI NO: 34908072 NR Description: P0506B12.25 [Oryza sativa (japonica
  misc_feature (1)..(258): Homolog of NCBI NO: 28828184 NR Description: similar to Leishmania major. Ppg3 [Dictyostelium
  misc_feature (1)..(63): Homolog of NCBI NO: 8099142 NR Description: hypothetical protein [Oryza sativa]
  misc_feature (1)..(255): Homolog of NCBI NO: 19113482 NR Description: hypothetical serine-rich secreted protein
  misc_feature (1)..(252): Homolog of NCBI NO: 19113482 NR Description: hypothetical serine-rich secreted protein
  misc_feature (1)..(62): Homolog of NCBI NO: 15239627 NR Description: putative protein; protein id: At5g26230.1
MCSSAVASGESTTSPADELFYKGQLLPLHLPPRLKMVQKLLLASSSSTAATETPISPRAAADVLSPRRFSSCEIGQDENCFFEISTELKRFIESNENHLGNSWSKKIKHSSITQKLKASRAYIKALFSKQACSDSSEINPRFKIEPSKVSRKKNPFVNSENPLLIHRRSFSGVIQRHSQAKCSTSSSSSSSASSLSSSFSFGSNGSLDLQTLMRSSNASDNSIEGAIEHCKQSFTTRKSNVTESELCSSRTSVSTCGDLDKD

SEQ ID NO: 89608 - DNA, 3120 bp, Arabidopsis thaliana
  misc_feature (1)..(3120): Ceres Seq. ID no. 12719696
  misc_feature: MA Experiment ID: 20000180 Result: Up-regulated in Transcription
  misc_feature: MA Experiment 20000180 PARAMETER Experiment Name: At_Germinating_Seeds_P Parameter: Age (hr) Value: 24 vs. 0
  misc_feature: MA Experiment 20000180 PARAMETER Experiment Name: At_Germinating_Seeds_P Parameter: Tissue Value: Germinating Seeds
  misc_feature: MA Experiment ID: 20000234 Result: Up-regulated in Transcription
  misc_feature: MA Experiment 20000234 PARAMETER Experiment Name: At_Siliques_P Parameter: Age (day) Value: 21
  misc_feature: MA Experiment 20000234 PARAMETER Experiment Name: At_Siliques_P Parameter: Organism Value: A. thaliana
  misc_feature: MA Experiment 20000234 PARAMETER Experiment Name: At_Siliques_P Parameter: Plant Line Value: WS
  misc_feature: MA Experiment 20000234 PARAMETER Experiment Name: At_Siliques_P Parameter: Tissue Value: Less Than 5mm Siliques vs. Whole Plant
  misc_feature: MA Experiment ID: 20000265 Result: Up-regulated in Transcription
  misc_feature: MA Experiment 20000265 PARAMETER Experiment Name: At_Open_Flower_P Parameter: Age (day) Value: 21
  misc_feature: MA Experiment 20000265 PARAMETER Experiment Name: At_Open_Flower_P Parameter: Plant Line Value: WS
  misc_feature: MA Experiment 20000265 PARAMETER Experiment Name: At_Open_Flower_P Parameter: Tissue Value: Closed Flower vs. Whole Plant
  misc_feature: MA Experiment ID: 20000286 Result: Up-regulated in Transcription
  misc_feature: MA Experiment 20000286 PARAMETER Experiment Name: At_Open_Flower_P Parameter: Age (day) Value: 21
  misc_feature: MA Experiment 20000286 PARAMETER Experiment Name: At_Open_Flower_P Parameter: Plant Line Value: WS
  misc_feature: MA Experiment 20000286 PARAMETER Experiment Name: At_Open_Flower_P Parameter: Tissue Value: Half Open vs. Whole Plant
  misc_feature: MA Experiment ID: 20001451 Result: Down-regulated in Transcription
  misc_feature: MA Experiment 20001451 PARAMETER Experiment Name: At_Far-red-induction_P Parameter: Age (day) Value: 7
  misc_feature: MA Experiment 20001451 PARAMETER Experiment Name: At_Far-red-induction_P Parameter: Light Value: Far-red vs. White
  misc_feature: MA Experiment 20001451 PARAMETER Experiment Name: At_Far-red-induction_P Parameter: Organism Value: A. thaliana
  misc_feature: MA Experiment 20001451 PARAMETER Experiment Name: At_Far-red-induction_P Parameter: Plant Line Value: Columbia
  misc_feature: MA Experiment 20001451 PARAMETER Experiment Name: At_Far-red-induction_P Parameter: Timepoint (hr) Value: 24
  misc_feature: MA Experiment 20001451 PARAMETER Experiment Name: At_Far-red-induction_P Parameter: Tissue Value: Whole Plant
atgtcgtttacgccagaggtggtatcaaggaaaagtggagtaggagtgattccatcacctgcaccgtttctaactcctcgtctcgagagaagacgacctgattctttctctaaccgtctcgatagagataataaagaagtcaatgttcaagtgattctacgatgcaaaccattaagtgaagaagagcagaaatctagtgttcctagagtcatctcttgtaatgaaatgagaagagaagtcaatgttcttcatactattgctaataagcaagtagaccgtcttttcaatttcgacaaggtttttggtcctaagtcacaacaacggtctatatatgatcaagctattgcacctattgttcatgaagtcttggaaggttttagctgtactgtgtttgcttatggacaaacaggaactgggaagacttacactatggaaggtggaatgaggaaaaagggaggggatttacctgcggaggctggggtgattcccagagctgttagacatattttcgatactcttgaggcgcaaaatgctgattacagtatgaaagtaacattcttggagctttacaatgaggaagttacggatttgttagctcaagatgattcctcaagatcttctgaggataagcagaggaagcccatttctttgatggaggatgggaagggttctgtggttttaagaggtcttgaagaagaagttgtgtacagtgctaatgatatatatgctcttcttgaacgaggttcatctaaaaggcgtacagctgatactttgttgaataagagaagtagtcgatctcattcagtgtttactatcactgtccatataaaggaagagtctatgggagatgaagagttaatcaaatgtgggaagcttaaccttgtggatctagcaggatctgagaatatcttacggtcaggagctcgagatggccgtgcacgagaagcaggagagattaacaagagtttgcttacactaggccgtgtgattaatgcccttgtggaacattcttctcatgtaccttacagggatagtaagctgacaaggcttttacgggactctctaggaggaaagacaaaaacttgtatcattgctacaatctctccatctgctcattccctagaggaaactttaagtactttggattatgcctatcgtgccaagaacatcaagaacaaacctgaggcaaaccagaagttatccaaggctgtgttgcttaaagatctttacttggagcttgagagaatgaaagaagatgtaagagcagcaagggataagaatggtgtttacattgcacatgaaagatatacacaagaagaagttgaaaagaaggcgagaattgagaggatagaacagttggagaatgaactaaatctcagtgaaagtgaggtttccaagttctgtgacctttatgagactgagaaagagaagttactggacgttgaaagtgaccttaaggactgcaagagaaacctgcacaatagtaacaaggacttgctagatctcaaagagaattatatccaagttgtttcaaagttaaaggaaaaggaagtcatcgtctccagaatgaaagcttcagagacttctttgatcgaccgtgcaaaggggttacgttgtgatctgcagcatgcgtcaaacgatataaattcgttgttcacaagattggaccaaaaagacaagctggaatccgataaccagagcatgcttctgaaatttggatcacaacttgatcaaaaccttaaagatttgcacagaacagttcttggatcagtctctcagcaacagcaacaattaagaactatggaagaacatacccactcatttcttgctcacaaatatgatgcaacacgcgatctggaatcaagaattgggaaaacatcagacacttatacttcaggaatagcagccttgaaggagttatctgaaatgctacaaaagaaagcctcctctgatctggagaagaagaacacttctatagtatcacaaatagaggctgttgagaaatttctcactacatcagcaacagaggcttctgcagtcgctcaggacatccacaatttacttaatgatcagaagaagctcttagcacttgctgcaagacaacaagagcagggcttggtcagaagcatgagatctgcacaagaaatttccaattcaacttcaaccattttcagtaacatctacaaccaagcccatgacgtggtggaagccattagagcaagccaagcagagaaatcaagacagcttgatgcttttgaaatgaagtttaaggaagaggctgaaagagaggagaaacaagccttaaatgatatcagtctgatattatcaaagttaacttcaaagaaaactgcaatgatttctgatgcatcaagcaatatccgggaacatgacatacaggaagagaagagattgtatgaacaaatgtctggtatgcagcaagtctcgattggtgcaaaggaagaattgtgtgactatctaaagaaagagaaaactcacttcacggaaaacacaatagcttcagctgagtctatcacagtcatggatagttaccttgaagattgcttgggaagggccaatgattctaaaacattgtgggagaccactgaaacaggcataaagaaccttaacacgaagtatcaacaagaacttaatgtcacaatggaggacatggcaaaagaaaatgagaaggtgcaagatgaatttacatccacattttcctcaatggatgctaactttgtctctaggacaaatgaacttcacgcagctgttaatgactcattgatgcaagaccgtgagaacaaagaaacaacagaggctatagtagagacttgcatgaaccaggtcacattattgcaggagaatcatggacaagctgtttcaaacattagaaacaaagcagaacagtctctcataaaagactatcaggttgatcagcacaagaacgaaacaccaaagaaacaatccataaatgtgccaagcctggattcgattgaggagatgaggactttgttttcgcagaatactctcagcgaagaacacacaagtttggagaaaatatcaacaaaacaaggacttggcgaagctaacaacagaactccattcttggaagtaaacaaatga

SEQ ID NO: 89609 - protein, 1039 aa, Arabidopsis thaliana
  peptide (1)..(1039): Ceres Seq. ID no. 12719697
  misc_feature (408)..(970): Pfam Name: Myosin tail Pfam Description: Myosin tail
  misc_feature (9)..(1038): Homolog of NCBI NO: 15186760 NR Description: KRP120-2 [Daucus carota]
  misc_feature (7)..(1031): Homolog of NCBI NO: 15231259 NR Description: kinesin-related protein; protein id: At3g45850.1
  misc_feature (11)..(976): Homolog of NCBI NO: 15226915 NR Description: kinesin-related protein; protein id: At2g28620.1
  misc_feature (442)..(1039): Homolog of NCBI NO: 25408550 NR Description: probable kinesin heavy chain [imported] - thaliana >gi|4056495|gb|AAC98061.1| putative kinesin heavy chain
  misc_feature (44)..(1038): Homolog of NCBI NO: 11132775 NR Description: 125 kDa kinesin-related protein
  misc_feature (37)..(1037): Homolog of NCBI NO: 15227596 NR Description: kinesin-related protein; protein id: At2g36200.1
  misc_feature (18)..(955): Homolog of NCBI NO: 15208453 NR Description: kinesin heavy chain [Zea mays]
  misc_feature (275)..(1038): Homolog of NCBI NO: 15208459 NR Description: kinesin heavy chain [Zea mays]
  misc_feature (18)..(268): Homolog of NCBI NO: 15208459 NR Description: kinesin heavy chain [Zea mays]
  misc_feature (45)..(998): Homolog of NCBI NO: 12055369 NR Description: kinesin-like boursin [Paracentrotus lividus]
MSFTPEVVSRKSGVGVIPSPAPFLTPRLERRRPDSFSNRLDRDNKEVNVQVILRCKPLSEEEQKSSVPRVISCNEMRREVNVLHTIANKQVDRLFNFDKVFGPKSQQRSIYDQAIAPIVHEVLEGFSCTVFAYGQTGTGKTYTMEGGMRKKGGDLPAEAGVIPRAVRHIFDTLEAQNADYSMKVTFLELYNEEVTDLLAQDDSSRSSEDKQRKPISLMEDGKGSVVLRGLEEEVVYSANDIYALLERGSSKRRTADTLLNKRSSRSHSVFTITVHIKEESMGDEELIKCGKLNLVDLAGSENILRSGARDGRAREAGEINKSLLTLGRVINALVEHSSHVPYRDSKLTRLLRDSLGGKTKTCIIATISPSAHSLEETLSTLDYAYRAKNIKNKPEANQKLSKAVLLKDLYLELERMKEDVRAARDKNGVYIAHERYTQEEVEKKARIERIEQLENELNLSESEVSKFCDLYETEKEKLLDVESDLKDCKRNLHNSNKDLLDLKENYIQVVSKLKEKEVIVSRMKASETSLIDRAKGLRCDLQHASNDINSLFTRLDQKDKLESDNQSMLLKFGSQLDQNLKDLHRTVLGSVSQQQQQLRTMEEHTHSFLAHKYDATRDLESRIGKTSDTYTSGIAALKELSEMLQKKASSDLEKKNTSIVSQIEAVEKFLTTSATEASAVAQDIHNLLNDQKKLLALAARQQEQGLVRSMRSAQEISNSTSTIFSNIYNQAHDVVEAIRASQAEKSRQLDAFEMKFKEEAEREEKQALNDISLILSKLTSKKTAMISDASSNIREHDIQEEKRLYEQMSGMQQVSIGAKEELCDYLKKEKTHFTENTIASAESITVMDSYLEDCLGRANDSKTLWETTETGIKNLNTKYQQELNVTMEDMAKENEKVQDEFTSTFSSMDANFVSRTNELHAAVNDSLMQDRENKETTEAIVETCMNQVTLLQENHGQAVSNIRNKAEQSLIKDYQVDQHKNETPKKQSINVPSLDSIEEMRTLFSQNTLSEEHTSLEKISTKQGLGEANNRTPFLEVNK

SEQ ID NO: 89610 - protein, 964 aa, Arabidopsis thaliana
  peptide (1)..(964): Ceres Seq. ID no. 12719698
  misc_feature (333)..(895): Pfam Name: Myosin tail Pfam Description: Myosin tail
  misc_feature (1)..(963): Homolog of NCBI NO: 15186760 NR Description: KRP120-2 [Daucus carota]
  misc_feature (1)..(956): Homolog of NCBI NO: 15231259 NR Description: kinesin-related protein; protein id: At3g45850.1
  misc_feature (1)..(901): Homolog of NCBI NO: 15226915 NR Description: kinesin-related protein; protein id: At2g28620.1
  misc_feature (367)..(964): Homolog of NCBI NO: 25408550 NR Description: probable kinesin heavy chain [imported] - thaliana >gi|4056495|gb|AAC98061.1| putative kinesin heavy chain
  misc_feature (1)..(963): Homolog of NCBI NO: 11132775 NR Description: 125 kDa kinesin-related protein
  misc_feature (1)..(962): Homolog of NCBI NO: 15227596 NR Description: kinesin-related protein; protein id: At2g36200.1
  misc_feature (1)..(880): Homolog of NCBI NO: 15208453 NR Description: kinesin heavy chain [Zea mays]
  misc_feature (200)..(963): Homolog of NCBI NO: 15208459 NR Description: kinesin heavy chain [Zea mays]
  misc_feature (1)..(193): Homolog of NCBI NO: 15208459 NR Description: kinesin heavy chain [Zea mays]
  misc_feature (1)..(923): Homolog of NCBI NO: 12055369 NR Description: kinesin-like boursin [Paracentrotus lividus]
MRREVNVLHTIANKQVDRLFNFDKVFGPKSQQRSIYDQAIAPIVHEVLEGFSCTVFAYGQTGTGKTYTMEGGMRKKGGDLPAEAGVIPRAVRHIFDTLEAQNADYSMKVTFLELYNEEVTDLLAQDDSSRSSEDKQRKPISLMEDGKGSVVLRGLEEEVVYSANDIYALLERGSSKRRTADTLLNKRSSRSHSVFTITVHIKEESMGDEELIKCGKLNLVDLAGSENILRSGARDGRAREAGEINKSLLTLGRVINALVEHSSHVPYRDSKLTRLLRDSLGGKTKTCIIATISPSAHSLEETLSTLDYAYRAKNIKNKPEANQKLSKAVLLKDLYLELERMKEDVRAARDKNGVYIAHERYTQEEVEKKARIERIEQLENELNLSESEVSKFCDLYETEKEKLLDVESDLKDCKRNLHNSNKDLLDLKENYIQVVSKLKEKEVIVSRMKASETSLIDRAKGLRCDLQHASNDINSLFTRLDQKDKLESDNQSMLLKFGSQLDQNLKDLHRTVLGSVSQQQQQLRTMEEHTHSFLAHKYDATRDLESRIGKTSDTYTSGIAALKELSEMLQKKASSDLEKKNTSIVSQIEAVEKFLTTSATEASAVAQDIHNLLNDQKKLLALAARQQEQGLVRSMRSAQEISNSTSTIFSNIYNQAHDVVEAIRASQAEKSRQLDAFEMKFKEEAEREEKQALNDISLILSKLTSKKTAMISDASSNIREHDIQEEKRLYEQMSGMQQVSIGAKEELCDYLKKEKTHFTENTIASAESITVMDSYLEDCLGRANDSKTLWETTETGIKNLNTKYQQELNVTMEDMAKENEKVQDEFTSTFSSMDANFVSRTNELHAAVNDSLMQDRENKETTEAIVETCMNQVTLLQENHGQAVSNIRNKAEQSLIKDYQVDQHKNETPKKQSINVPSLDSIEEMRTLFSQNTLSEEHTSLEKISTKQGLGEANNRTPFLEVNK

SEQ ID NO: 89611 - protein, 896 aa, Arabidopsis thaliana
  peptide (1)..(896): Ceres Seq. ID no. 12719699
  misc_feature (265)..(827): Pfam Name: Myosin tail Pfam Description: Myosin tail
  misc_feature (1)..(895): Homolog of NCBI NO: 15186760 NR Description: KRP120-2 [Daucus carota]
  misc_feature (1)..(888): Homolog of NCBI NO: 15231259 NR Description: kinesin-related protein; protein id: At3g45850.1
  misc_feature (1)..(833): Homolog of NCBI NO: 15226915 NR Description: kinesin-related protein; protein id: At2g28620.1
  misc_feature (299)..(896): Homolog of NCBI NO: 25408550 NR Description: probable kinesin heavy chain [imported] - thaliana >gi|4056495|gb|AAC98061.1| putative kinesin heavy chain
  misc_feature (1)..(895): Homolog of NCBI NO: 11132775 NR Description: 125 kDa kinesin-related protein
  misc_feature (1)..(894): Homolog of NCBI NO: 15227596 NR Description: kinesin-related protein; protein id: At2g36200.1
  misc_feature (1)..(812): Homolog of NCBI NO: 15208453 NR Description: kinesin heavy chain [Zea mays]
  misc_feature (132)..(895): Homolog of NCBI NO: 15208459 NR Description: kinesin heavy chain [Zea mays]
  misc_feature (1)..(125): Homolog of NCBI NO: 15208459 NR Description: kinesin heavy chain [Zea mays]
  misc_feature (1)..(855): Homolog of NCBI NO: 12055369 NR Description: kinesin-like boursin [Paracentrotus lividus]
MEGGMRKKGGDLPAEAGVIPRAVRHIFDTLEAQNADYSMKVTFLELYNEEVTDLLAQDDSSRSSEDKQRKPISLMEDGKGSVVLRGLEEEVVYSANDIYALLERGSSKRRTADTLLNKRSSRSHSVFTITVHIKEESMGDEELIKCGKLNLVDLAGSENILRSGARDGRAREAGEINKSLLTLGRVINALVEHSSHVPYRDSKLTRLLRDSLGGKTKTCIIATISPSAHSLEETLSTLDYAYRAKNIKNKPEANQKLSKAVLLKDLYLELERMKEDVRAARDKNGVYIAHERYTQEEVEKKARIERIEQLENELNLSESEVSKFCDLYETEKEKLLDVESDLKDCKRNLHNSNKDLLDLKENYIQVVSKLKEKEVIVSRMKASETSLIDRAKGLRCDLQHASNDINSLFTRLDQKDKLESDNQSMLLKFGSQLDQNLKDLHRTVLGSVSQQQQQLRTMEEHTHSFLAHKYDATRDLESRIGKTSDTYTSGIAALKELSEMLQKKASSDLEKKNTSIVSQIEAVEKFLTTSATEASAVAQDIHNLLNDQKKLLALAARQQEQGLVRSMRSAQEISNSTSTIFSNIYNQAHDVVEAIRASQAEKSRQLDAFEMKFKEEAEREEKQALNDISLILSKLTSKKTAMISDASSNIREHDIQEEKRLYEQMSGMQQVSIGAKEELCDYLKKEKTHFTENTIASAESITVMDSYLEDCLGRANDSKTLWETTETGIKNLNTKYQQELNVTMEDMAKENEKVQDEFTSTFSSMDANFVSRTNELHAAVNDSLMQDRENKETTEAIVETCMNQVTLLQENHGQAVSNIRNKAEQSLIKDYQVDQHKNETPKKQSINVPSLDSIEEMRTLFSQNTLSEEHTSLEKISTKQGLGEANNRTPFLEVNK

SEQ ID NO: 89612 - DNA, 950 bp, Arabidopsis thaliana
  misc_feature (1)..(950): Ceres Seq. ID no. 12719711
  misc_feature: MA Experiment ID: 20000306 Result: Up-regulated in Transcription
  misc_feature: MA Experiment 20000306 PARAMETER Experiment Name: At_Germinating_Seeds_Sub_P Parameter: Age (hr) Value: 6 vs. 0
  misc_feature: MA Experiment 20000306 PARAMETER Experiment Name: At_Germinating_Seeds_Sub_P Parameter: Organism Value: A. thaliana
  misc_feature: MA Experiment 20000306 PARAMETER Experiment Name: At_Germinating_Seeds_Sub_P Parameter: Plant Line Value: WS
  misc_feature: MA Experiment 20000306 PARAMETER Experiment Name: At_Germinating_Seeds_Sub_P Parameter: Tissue Value: Germinating Seeds
  misc_feature: MA Experiment ID: 20000307 Result: Up-regulated in Transcription
  misc_feature: MA Experiment 20000307 PARAMETER Experiment Name: At_Germinating_Seeds_Sub_P Parameter: Age (hr) Value: 24 vs. 0
  misc_feature: MA Experiment 20000307 PARAMETER Experiment Name: At_Germinating_Seeds_Sub_P Parameter: Organism Value: A. thaliana
  misc_feature: MA Experiment 20000307 PARAMETER Experiment Name: At_Germinating_Seeds_Sub_P Parameter: Plant Line Value: WS
  misc_feature: MA Experiment 20000307 PARAMETER Experiment Name: At_Germinating_Seeds_Sub_P Parameter: Tissue Value: Germinating Seeds
  misc_feature: MA Experiment ID: 20000328 Result: Down-regulated in Transcription
  misc_feature: MA Experiment 20000328 PARAMETER Experiment Name: At_42deg_Heat_Sub_P Parameter: Age (day) Value: 14
  misc_feature: MA Experiment 20000328 PARAMETER Experiment Name: At_42deg_Heat_Sub_P Parameter: Organism Value: A. thaliana
  misc_feature: MA Experiment 20000328 PARAMETER Experiment Name: At_42deg_Heat_Sub_P Parameter: Plant Line Value: WS
  misc_feature: MA Experiment 20000328 PARAMETER Experiment Name: At_42deg_Heat_Sub_P Parameter: Temperature (deg C) Value: 42 vs. 22
  misc_feature: MA Experiment 20000328 PARAMETER Experiment Name: At_42deg_Heat_Sub_P Parameter: Timepoint (hr) Value: 6
  misc_feature: MA Experiment 20000328 PARAMETER Experiment Name: At_42deg_Heat_Sub_P Parameter: Tissue Value: Aerial
  misc_feature: MA Experiment ID: 20000347 Result: Down-regulated in Transcription
  misc_feature: MA Experiment 20000347 PARAMETER Experiment Name: At_2mM_SA_Sub_P Parameter: Age (day) Value: 14
  misc_feature: MA Experiment 20000347 PARAMETER Experiment Name: At_2mM_SA_Sub_P Parameter: Organism Value: A. thaliana
  misc_feature: MA Experiment 20000347 PARAMETER Experiment Name: At_2mM_SA_Sub_P Parameter: Plant Line Value: WS
  misc_feature: MA Experiment 20000347 PARAMETER Experiment Name: At_2mM_SA_Sub_P Parameter: Timepoint (hr) Value: 6
  misc_feature: MA Experiment 20000347 PARAMETER Experiment Name: At_2mM_SA_Sub_P Parameter: Tissue Value: Aerial
  misc_feature: MA Experiment 20000347 PARAMETER Experiment Name: At_2mM_SA_Sub_P Parameter: Treatment Value: 2mM SA vs. No Treatment
atggcatgtatgaagaaggcactaccattcattttaatggtattgttgcaaatagggtatgcaggaatggatattcttacaaaggatgtcctaaacaaaggcatgagcatttacgttctttccgtctaccgtcacggagttgccaccgttgttatggctccgttcgccttctacttcgacaagctcgaaagcgtgaagtttcaaagtatcaggagtgccgctaaggtggttggaacagtaactacagttggaggaatcatggtcatgacacttgtaaaaggtccagctcttgacctcttctggactaaaggaccctctgcacagaacacagttgggaccgatattcatagctccatcaaaggtgcagttttagtcacaattggttgcttcagctatgcatgtttcatgatactacaagcaatcacattgaagacttaccctgcagagctctctctcgcaacatggatatgcctaataggtacaatagagggagtagttgtagcattagtgatggagaaaggaaatcctagcgtgtgggccattggttgggacactaaacttcttacaatcacctatagtgggatagtgtgctcagcgcttggttactacattggaggagtggtgatgaaaaccagaggtcctgtgtttgtaacagctttcaaacctctttgtatgatcgttgtggcgattatgtcgagcatcatctttgatgagcagatgtacctcggaagggctcttggtgctacggtcatatgtgtaggtctataccttgtgatatggggcaaagccaaagattatgaatatcctagcacgccgcaaatagatgatgacttagcacaagcaaccacaagcaagcaaaaagaacaaagaagaacagtgatagaatcagtctaacttaacaatcacggtccaaatgtttagcatggatgagccataacgtataccagctt

SEQ ID NO: 89613 - protein, 297 aa, Arabidopsis thaliana
  peptide (1)..(297): Ceres Seq. ID no. 12719712
  misc_feature (130)..(260): Pfam Name: Integral membrane protein DUF6 Pfam Description: Integral membrane protein DUF6
  misc_feature (1)..(297): Homolog of NCBI NO: 18404429 NR Description: nodulin-like protein; protein id: At2g37450.1,
  misc_feature (13)..(297): Homolog of NCBI NO: 25408555 NR Description: nodulin-like protein [imported] - Arabidopsis
  misc_feature (5)..(280): Homolog of NCBI NO: 15224291 NR Description: nodulin-like protein; protein id: At2g37460.1, by cDNA: 16393., supported by cDNA: gi_14334857, supported by
  misc_feature (5)..(280): Homolog of NCBI NO: 21553757 NR Description: nodulin-like protein [Arabidopsis thaliana]
  misc_feature (61)..(277): Homolog of NCBI NO: 37532392 NR Description: putative nodulin-like protein [Oryza sativa
  misc_feature (13)..(61): Homolog of NCBI NO: 37532392 NR Description: putative nodulin-like protein [Oryza sativa
  misc_feature (5)..(282): Homolog of NCBI NO: 15225480 NR Description: nodulin-like protein; protein id: At2g39510.1
  misc_feature (61)..(265): Homolog of NCBI NO: 34908998 NR Description: nodulin-like protein [Oryza sativa (japonica
  misc_feature (4)..(61): Homolog of NCBI NO: 34908998 NR Description: nodulin-like protein [Oryza sativa (japonica
  misc_feature (7)..(293): Homolog of NCBI NO: 21593603 NR Description: nodulin-like protein [Arabidopsis thaliana]
MACMKKALPFILMVLLQIGYAGMDILTKDVLNKGMSIYVLSVYRHGVATVVMAPFAFYFDKLESVKFQSIRSAAKVVGTVTTVGGIMVMTLVKGPALDLFWTKGPSAQNTVGTDIHSSIKGAVLVTIGCFSYACFMILQAITLKTYPAELSLATWICLIGTIEGVVVALVMEKGNPSVWAIGWDTKLLTITYSGIVCSALGYYIGGVVMKTRGPVFVTAFKPLCMIVVAIMSSIIFDEQMYLGRALGATVICVGLYLVIWGKAKDYEYPSTPQIDDDLAQATTSKQKEQRRTVIESV

SEQ ID NO: 89614 - protein, 294 aa, Arabidopsis thaliana
  peptide (1)..(294): Ceres Seq. ID no. 12719713
  misc_feature (127)..(257): Pfam Name: Integral membrane protein DUF6 Pfam Description: Integral membrane protein DUF6
  misc_feature (1)..(294): Homolog of NCBI NO: 18404429 NR Description: nodulin-like protein; protein id: At2g37450.1,
  misc_feature (10)..(294): Homolog of NCBI NO: 25408555 NR Description: nodulin-like protein [imported] - Arabidopsis
  misc_feature (2)..(277): Homolog of NCBI NO: 15224291 NR Description: nodulin-like protein; protein id: At2g37460.1, by cDNA: 16393., supported by cDNA: gi_14334857, supported by
  misc_feature (2)..(277): Homolog of NCBI NO: 21553757 NR Description: nodulin-like protein [Arabidopsis thaliana]
  misc_feature (58)..(274): Homolog of NCBI NO: 37532392 NR Description: putative nodulin-like protein [Oryza sativa
  misc_feature (10)..(58): Homolog of NCBI NO: 37532392 NR Description: putative nodulin-like protein [Oryza sativa
  misc_feature (2)..(279): Homolog of NCBI NO: 15225480 NR Description: nodulin-like protein; protein id: At2g39510.1
  misc_feature (58)..(262): Homolog of NCBI NO: 34908998 NR Description: nodulin-like protein [Oryza sativa (japonica
  misc_feature (1)..(58): Homolog of NCBI NO: 34908998 NR Description: nodulin-like protein [Oryza sativa (japonica
  misc_feature (4)..(290): Homolog of NCBI NO: 21593603 NR Description: nodulin-like protein [Arabidopsis thaliana]
MKKALPFILMVLLQIGYAGMDILTKDVLNKGMSIYVLSVYRHGVATVVMAPFAFYFDKLESVKFQSIRSAAKVVGTVTTVGGIMVMTLVKGPALDLFWTKGPSAQNTVGTDIHSSIKGAVLVTIGCFSYACFMILQAITLKTYPAELSLATWICLIGTIEGVVVALVMEKGNPSVWAIGWDTKLLTITYSGIVCSALGYYIGGVVMKTRGPVFVTAFKPLCMIVVAIMSSIIFDEQMYLGRALGATVICVGLYLVIWGKAKDYEYPSTPQIDDDLAQATTSKQKEQRRTVIESV

SEQ ID NO: 89615 - protein, 285 aa, Arabidopsis thaliana
  peptide (1)..(285): Ceres Seq. ID no. 12719714
  misc_feature (118)..(248): Pfam Name: Integral membrane protein DUF6 Pfam Description: Integral membrane protein DUF6
  misc_feature (1)..(285): Homolog of NCBI NO: 18404429 NR Description: nodulin-like protein; protein id: At2g37450.1,
  misc_feature (1)..(285): Homolog of NCBI NO: 25408555 NR Description: nodulin-like protein [imported] - Arabidopsis
  misc_feature (1)..(268): Homolog of NCBI NO: 15224291 NR Description: nodulin-like protein; protein id: At2g37460.1, by cDNA: 16393., supported by cDNA: gi_14334857, supported by
  misc_feature (1)..(268): Homolog of NCBI NO: 21553757 NR Description: nodulin-like protein [Arabidopsis thaliana]
  misc_feature (49)..(265): Homolog of NCBI NO: 37532392 NR Description: putative nodulin-like protein [Oryza sativa
  misc_feature (1)..(49): Homolog of NCBI NO: 37532392 NR Description: putative nodulin-like protein [Oryza sativa
  misc_feature (1)..(270): Homolog of NCBI NO: 15225480 NR Description: nodulin-like protein; protein id: At2g39510.1
  misc_feature (49)..(253): Homolog of NCBI NO: 34908998 NR Description: nodulin-like protein [Oryza sativa (japonica
  misc_feature (1)..(49): Homolog of NCBI NO: 34908998 NR Description: nodulin-like protein [Oryza sativa (japonica
  misc_feature (1)..(281): Homolog of NCBI NO: 21593603 NR Description: nodulin-like protein [Arabidopsis thaliana]
MVLLQIGYAGMDILTKDVLNKGMSIYVLSVYRHGVATVVMAPFAFYFDKLESVKFQSIRSAAKVVGTVTTVGGIMVMTLVKGPALDLFWTKGPSAQNTVGTDIHSSIKGAVLVTIGCFSYACFMILQAITLKTYPAELSLATWICLIGTIEGVVVALVMEKGNPSVWAIGWDTKLLTITYSGIVCSALGYYIGGVVMKTRGPVFVTAFKPLCMIVVAIMSSIIFDEQMYLGRALGATVICVGLYLVIWGKAKDYEYPSTPQIDDDLAQATTSKQKEQRRTVIESV

SEQ ID NO: 89616 - DNA, 1896 bp, Arabidopsis thaliana
  misc_feature (1)..(1896): Ceres Seq. ID no. 12719715
  misc_feature: MA Experiment ID: 20000171 Result: Down-regulated in Transcription
  misc_feature: MA Experiment 20000171 PARAMETER Experiment Name: At_42deg_Heat_P Parameter: Age (day) Value: 14
  misc_feature: MA Experiment 20000171 PARAMETER Experiment Name: At_42deg_Heat_P Parameter: Organism Value: A. thaliana
  misc_feature: MA Experiment 20000171 PARAMETER Experiment Name: At_42deg_Heat_P Parameter: Plant Line Value: WS
  misc_feature: MA Experiment 20000171 PARAMETER Experiment Name: At_42deg_Heat_P Parameter: Temperature (deg C) Value: 42 vs. 22
  misc_feature: MA Experiment 20000171 PARAMETER Experiment Name: At_42deg_Heat_P Parameter: Timepoint (hr) Value: 1
  misc_feature: MA Experiment 20000171 PARAMETER Experiment Name: At_42deg_Heat_P Parameter: Tissue Value: Aerial
  misc_feature: MA Experiment ID: 20000438 Result: Up-regulated in Transcription
  misc_feature: MA Experiment 20000438 PARAMETER Experiment Name: At_Shoots__P Parameter: Age (day) Value: 14
  misc_feature: MA Experiment 20000438 PARAMETER Experiment Name: At_Shoots__P Parameter: Tissue Value: Shoots vs. Whole Plant
atatcttcttcaaagtttcgtttttttttggtgtttattagaatctagaagttaacaattggagaatttggaattgggaaaataggggttagatatatctgtaagtggtttggttcttcttagcaagtgtttaactttgggagaggaagatgagaattacaagtgttgttatggttattggctatgagacttgtctctggtgtgagctgagatggtggtagatactttgttttaacgtcttggctatggagaatcatcatccttctactctattgtctatggattcaagtgcttcttctcatgaggagcttgatttggagatgaataacaacaggcaatctctgctctctggccctcctgatatcaatttacctctctcagctgagagaagtcctcctcctccgccgtggaatttagatgcttgtgatattttggatgttgggttaggttcacaagcttatgagactgagaattacatgagtgttgtacctaaggttgggaggaaatgtgctaaacgtgttgatagtatctggggtgcttggtttttcttcagtttctacttcaagcctgcgttaaacgagaaatcaaaggcgaaaatcgtccgggatagtaatgggatatctggttttgacaagtcggatttgaagcttgatgtgtttttagttcagcatgatatggagaatatgtatatgtgggtgtttaaggaaagacctgagaatgcactagggaagatgcagttgaggagttacatgaatggtcattctagacaaggggatcgtttgtttccatttagtgttgagaaagggtttgttaggtctcacagaatgcagaggaaacactacagaggtttgtcgaatccgcagtgcgttcatgggattgagcttgttcctttgccaaacctcacgtgtctagatgaagaagagaggaaaaggtggatggagcttacgggtcgtgatttgaatttcaccattccacctgaagctagtgactttggttcttggagaaaccttcccaacactgactttgagcttgagaggcctacaccttctttgaagaatcctactgcaaaccactctaagaaactactcaatggctcggggctcaatctctcgactcaaccatccaaccattctaatggtgaagcaaccgatttatctccttcgagccacaagaagaggaaggacttgttctcaaatgggattcatgaggaggagtgttgcttaactgtaaacccacaacctcctgttatcgaagctcaccagaatgagctacctacttggtcaaacgagtttactggggccatgaaaaacgtttatggacctgttactgctgcaaaaacgatctatgaggacgaagaaggctacttgatcataatcagccttccttttgtggatttgaacagcgttaaagtctcctggaggaacactctcacacatggaatcataaaagtttcatgcctcagcacatcgcgcgtacctttcataaagagacatgatagaacattcaagttgactgattcagcctctgagcattgcccgccaggtgaatttgtcagagagatcccattatcaaaccgaatcccggaagatgcaaacattgaagcgtattacgatggacctggatcagttcttgagatacttgtcccaaaactaagagctggcccggaagagcacgaggtgcgggtgtgtctccgtcccaacctcggtggaaacgatcttatgctgacttaaaaagagaaacaactgtttagttttcttgtttgtagaagcttattataggagtcatctctcattgatattggccactcatatataggcgttttcactgttttaatgggatttttcacacattgcaatcttgtgtacgttgtgttggaatcaaccctatccatagatt

SEQ ID NO: 89617 - protein, 494 aa, Arabidopsis thaliana
  peptide (1)..(494): Ceres Seq. ID no. 12719716
  misc_feature (1)..(494): Homolog of NCBI NO: 18404463 NR Description: expressed protein; protein id: At2g37570.1, by cDNA: gi_11611668, supported by cDNA: gi_15451173, supported
  misc_feature (1)..(494): Homolog of NCBI NO: 11611667 NR Description: SLT1 protein [Nicotiana tabacum]
  misc_feature (1)..(487): Homolog of NCBI NO: 18413934 NR Description: putative protein; protein id: At5g02480.1, by cDNA: gi_13430449, supported by cDNA: gi_15724273 [Arabidopsis >gi|13430450|gb|AAK25847.1|AF360137_1 unknown protein
  misc_feature (1)..(487): Homolog of NCBI NO: 11280862 NR Description: hypothetical protein T22P11.70 - Arabidopsis >gi|7413637|emb|CAB85985.1| putative protein [Arabidopsis
  misc_feature (1)..(484): Homolog of NCBI NO: 18399669 NR Description: expressed protein; protein id: At3g12570.1, by cDNA: gi_13430761 [Arabidopsis thaliana] gene_id:T16H11.6~pir||T02523~strong similarity to unknown protein
  misc_feature (30)..(494): Homolog of NCBI NO: 34895866 NR Description: P0009G03.13 [Oryza sativa (japonica
  misc_feature (4)..(494): Homolog of NCBI NO: 34908142 NR Description: putative SLT1 protein (ion homeostasis related
MENHHPSTLLSMDSSASSHEELDLEMNNNRQSLLSGPPDINLPLSAERSPPPPPWNLDACDILDVGLGSQAYETENYMSVVPKVGRKCAKRVDSIWGAWFFFSFYFKPALNEKSKAKIVRDSNGISGFDKSDLKLDVFLVQHDMENMYMWVFKERPENALGKMQLRSYMNGHSRQGDRLFPFSVEKGFVRSHRMQRKHYRGLSNPQCVHGIELVPLPNLTCLDEEERKRWMELTGRDLNFTIPPEASDFGSWRNLPNTDFELERPTPSLKNPTANHSKKLLNGSGLNLSTQPSNHSNGEATDLSPSSHKKRKDLFSNGIHEEECCLTVNPQPPVIEAHQNELPTWSNEFTGAMKNVYGPVTAAKTIYEDEEGYLIIISLPFVDLNSVKVSWRNTLTHGIIKVSCLSTSRVPFIKRHDRTFKLTDSASEHCPPGEFVREIPLSNRIPEDANIEAYYDGPGSVLEILVPKLRAGPEEHEVRVCLRPNLGGNDLMLT

SEQ ID NO: 89618 - protein, 483 aa, Arabidopsis thaliana
  peptide (1)..(483): Ceres Seq. ID no. 12719717
  misc_feature (1)..(483): Homolog of NCBI NO: 18404463 NR Description: expressed protein; protein id: At2g37570.1, by cDNA: gi_11611668, supported by cDNA: gi_15451173, supported
  misc_feature (1)..(483): Homolog of NCBI NO: 11611667 NR Description: SLT1 protein [Nicotiana tabacum]
  misc_feature (1)..(476): Homolog of NCBI NO: 18413934 NR Description: putative protein; protein id: At5g02480.1, by cDNA: gi_13430449, supported by cDNA: gi_15724273 [Arabidopsis >gi|13430450|gb|AAK25847.1|AF360137_1 unknown protein
  misc_feature (1)..(476): Homolog of NCBI NO: 11280862 NR Description: hypothetical protein T22P11.70 - Arabidopsis >gi|7413637|emb|CAB85985.1| putative protein [Arabidopsis
  misc_feature (1)..(473): Homolog of NCBI NO: 18399669 NR Description: expressed protein; protein id: At3g12570.1, by cDNA: gi_13430761 [Arabidopsis thaliana] gene_id:T16H11.6~pir||T02523~strong similarity to unknown protein
  misc_feature (19)..(483): Homolog of NCBI NO: 34895866 NR Description: P0009G03.13 [Oryza sativa (japonica
  misc_feature (1)..(483): Homolog of NCBI NO: 34908142 NR Description: putative SLT1 protein (ion homeostasis related
MDSSASSHEELDLEMNNNRQSLLSGPPDINLPLSAERSPPPPPWNLDACDILDVGLGSQAYETENYMSVVPKVGRKCAKRVDSIWGAWFFFSFYFKPALNEKSKAKIVRDSNGISGFDKSDLKLDVFLVQHDMENMYMWVFKERPENALGKMQLRSYMNGHSRQGDRLFPFSVEKGFVRSHRMQRKHYRGLSNPQCVHGIELVPLPNLTCLDEEERKRWMELTGRDLNFTIPPEASDFGSWRNLPNTDFELERPTPSLKNPTANHSKKLLNGSGLNLSTQPSNHSNGEATDLSPSSHKKRKDLFSNGIHEEECCLTVNPQPPVIEAHQNELPTWSNEFTGAMKNVYGPVTAAKTIYEDEEGYLIIISLPFVDLNSVKVSWRNTLTHGIIKVSCLSTSRVPFIKRHDRTFKLTDSASEHCPPGEFVREIPLSNRIPEDANIEAYYDGPGSVLEILVPKLRAGPEEHEVRVCLRPNLGGNDLMLT

SEQ ID NO: 89619 - protein, 469 aa, Arabidopsis thaliana
  peptide (1)..(469): Ceres Seq. ID no. 12719718
  misc_feature (1)..(469): Homolog of NCBI NO: 18404463 NR Description: expressed protein; protein id: At2g37570.1, by cDNA: gi_11611668, supported by cDNA: gi_15451173, supported
  misc_feature (1)..(469): Homolog of NCBI NO: 11611667 NR Description: SLT1 protein [Nicotiana tabacum]
  misc_feature (1)..(462): Homolog of NCBI NO: 18413934 NR Description: putative protein; protein id: At5g02480.1, by cDNA: gi_13430449, supported by cDNA: gi_15724273 [Arabidopsis >gi|13430450|gb|AAK25847.1|AF360137_1 unknown protein
  misc_feature (1)..(462): Homolog of NCBI NO: 11280862 NR Description: hypothetical protein T22P11.70 - Arabidopsis >gi|7413637|emb|CAB85985.1| putative protein [Arabidopsis
  misc_feature (1)..(459): Homolog of NCBI NO: 18399669 NR Description: expressed protein; protein id: At3g12570.1, by cDNA: gi_13430761 [Arabidopsis thaliana] gene_id:T16H11.6~pir||T02523~strong similarity to unknown protein
  misc_feature (5)..(469): Homolog of NCBI NO: 34895866 NR Description: P0009G03.13 [Oryza sativa (japonica
  misc_feature (1)..(469): Homolog of NCBI NO: 34908142 NR Description: putative SLT1 protein (ion homeostasis related
MNNNRQSLLSGPPDINLPLSAERSPPPPPWNLDACDILDVGLGSQAYETENYMSVVPKVGRKCAKRVDSIWGAWFFFSFYFKPALNEKSKAKIVRDSNGISGFDKSDLKLDVFLVQHDMENMYMWVFKERPENALGKMQLRSYMNGHSRQGDRLFPFSVEKGFVRSHRMQRKHYRGLSNPQCVHGIELVPLPNLTCLDEEERKRWMELTGRDLNFTIPPEASDFGSWRNLPNTDFELERPTPSLKNPTANHSKKLLNGSGLNLSTQPSNHSNGEATDLSPSSHKKRKDLFSNGIHEEECCLTVNPQPPVIEAHQNELPTWSNEFTGAMKNVYGPVTAAKTIYEDEEGYLIIISLPFVDLNSVKVSWRNTLTHGIIKVSCLSTSRVPFIKRHDRTFKLTDSASEHCPPGEFVREIPLSNRIPEDANIEAYYDGPGSVLEILVPKLRAGPEEHEVRVCLRPNLGGNDLMLT

SEQ ID NO: 89620 - DNA, 2260 bp, Arabidopsis thaliana
  misc_feature (1)..(2260): Ceres Seq. ID no. 12719727
  misc_feature: MA Experiment ID: 20000171 Result: Down-regulated in Transcription
  misc_feature: MA Experiment 20000171 PARAMETER Experiment Name: At_42deg_Heat_P Parameter: Age (day) Value: 14
  misc_feature: MA Experiment 20000171 PARAMETER Experiment Name: At_42deg_Heat_P Parameter: Organism Value: A. thaliana
  misc_feature: MA Experiment 20000171 PARAMETER Experiment Name: At_42deg_Heat_P Parameter: Plant Line Value: WS
  misc_feature: MA Experiment 20000171 PARAMETER Experiment Name: At_42deg_Heat_P Parameter: Temperature (deg C) Value: 42 vs. 22
  misc_feature: MA Experiment 20000171 PARAMETER Experiment Name: At_42deg_Heat_P Parameter: Timepoint (hr) Value: 1
  misc_feature: MA Experiment 20000171 PARAMETER Experiment Name: At_42deg_Heat_P Parameter: Tissue Value: Aerial
  misc_feature: MA Experiment ID: 20000173 Result: Down-regulated in Transcription
  misc_feature: MA Experiment 20000173 PARAMETER Experiment Name: At_42deg_Heat_P Parameter: Age (day) Value: 14
  misc_feature: MA Experiment 20000173 PARAMETER Experiment Name: At_42deg_Heat_P Parameter: Organism Value: A. thaliana
  misc_feature: MA Experiment 20000173 PARAMETER Experiment Name: At_42deg_Heat_P Parameter: Plant Line Value: WS
  misc_feature: MA Experiment 20000173 PARAMETER Experiment Name: At_42deg_Heat_P Parameter: Temperature (deg C) Value: 42 vs. 22
  misc_feature: MA Experiment 20000173 PARAMETER Experiment Name: At_42deg_Heat_P Parameter: Timepoint (hr) Value: 6
  misc_feature: MA Experiment 20000173 PARAMETER Experiment Name: At_42deg_Heat_P Parameter: Tissue Value: Aerial
  misc_feature: MA Experiment ID: 20000182 Result: Up-regulated in Transcription
  misc_feature: MA Experiment 20000182 PARAMETER Experiment Name: At_2mM_SA_P Parameter: Age (day) Value: 14
  misc_feature: MA Experiment 20000182 PARAMETER Experiment Name: At_2mM_SA_P Parameter: Organism Value: A. thaliana
  misc_feature: MA Experiment 20000182 PARAMETER Experiment Name: At_2mM_SA_P Parameter: Plant Line Value: WS
  misc_feature: MA Experiment 20000182 PARAMETER Experiment Name: At_2mM_SA_P Parameter: Timepoint (hr) Value: 6
  misc_feature: MA Experiment 20000182 PARAMETER Experiment Name: At_2mM_SA_P Parameter: Tissue Value: Aerial
  misc_feature: MA Experiment 20000182 PARAMETER Experiment Name: At_2mM_SA_P Parameter: Treatment Value: 2mM SA vs. No Treatment
  misc_feature: MA Experiment ID: 20000185 Result: Down-regulated in Transcription
  misc_feature: MA Experiment 20000185 PARAMETER Experiment Name: At_Roots__P Parameter: Age (day) Value: 7 vs. 21
  misc_feature: MA Experiment 20000185 PARAMETER Experiment Name: At_Roots__P Parameter: Organism Value: A. thaliana
  misc_feature: MA Experiment 20000185 PARAMETER Experiment Name: At_Roots__P Parameter: Tissue Value: Roots vs. Whole Plant
  misc_feature: MA Experiment ID: 20000213 Result: Up-regulated in Transcription
  misc_feature: MA Experiment 20000213 PARAMETER Experiment Name: At_4deg_Cold_P Parameter: Timepoint (hr) Value: 2
  misc_feature: MA Experiment ID: 20000227 Result: Down-regulated in Transcription
  misc_feature: MA Experiment 20000227 PARAMETER Experiment Name: At_Root-Tips-vs-Tops_P Parameter: Tissue Value: Root Tips vs. Root Tops
  misc_feature: MA Experiment ID: 20000234 Result: Down-regulated in Transcription
  misc_feature: MA Experiment 20000234 PARAMETER Experiment Name: At_Siliques_P Parameter: Age (day) Value: 21
  misc_feature: MA Experiment 20000234 PARAMETER Experiment Name: At_Siliques_P Parameter: Organism Value: A. thaliana
  misc_feature: MA Experiment 20000234 PARAMETER Experiment Name: At_Siliques_P Parameter: Plant Line Value: WS
  misc_feature: MA Experiment 20000234 PARAMETER Experiment Name: At_Siliques_P Parameter: Tissue Value: Less Than 5mm Siliques vs. Whole Plant
  misc_feature: MA Experiment ID: 20000264 Result: Down-regulated in Transcription
  misc_feature: MA Experiment 20000264 PARAMETER Experiment Name: At_Open_Flower_P Parameter: Age (day) Value: 21
  misc_feature: MA Experiment 20000264 PARAMETER Experiment Name: At_Open_Flower_P Parameter: Plant Line Value: WS
  misc_feature: MA Experiment 20000264 PARAMETER Experiment Name: At_Open_Flower_P Parameter: Tissue Value: Open Flower vs. Whole Plant
  misc_feature: MA Experiment ID: 20000265 Result: Down-regulated in Transcription
  misc_feature: MA Experiment 20000265 PARAMETER Experiment Name: At_Open_Flower_P Parameter: Age (day) Value: 21
  misc_feature: MA Experiment 20000265 PARAMETER Experiment Name: At_Open_Flower_P Parameter: Plant Line Value: WS
  misc_feature: MA Experiment 20000265 PARAMETER Experiment Name: At_Open_Flower_P Parameter: Tissue Value: Closed Flower vs. Whole Plant
  misc_feature: MA Experiment ID: 20000286 Result: Down-regulated in Transcription
  misc_feature: MA Experiment 20000286 PARAMETER Experiment Name: At_Open_Flower_P Parameter: Age (day) Value: 21
  misc_feature: MA Experiment 20000286 PARAMETER Experiment Name: At_Open_Flower_P Parameter: Plant Line Value: WS
  misc_feature: MA Experiment 20000286 PARAMETER Experiment Name: At_Open_Flower_P Parameter: Tissue Value: Half Open vs. Whole Plant
  misc_feature: MA Experiment ID: 20000527 Result: Down-regulated in Transcription
  misc_feature: MA Experiment 20000527 PARAMETER Experiment Name: At_10percent_PEG_P Parameter: Age (day) Value: 20
  misc_feature: MA Experiment 20000527 PARAMETER Experiment Name: At_10percent_PEG_P Parameter: Organism Value: A. thaliana
  misc_feature: MA Experiment 20000527 PARAMETER Experiment Name: At_10percent_PEG_P Parameter: Plant Line Value: WS
  misc_feature: MA Experiment 20000527 PARAMETER Experiment Name: At_10percent_PEG_P Parameter: Timepoint (day) Value: 20
  misc_feature: MA Experiment 20000527 PARAMETER Experiment Name: At_10percent_PEG_P Parameter: Tissue Value: Whole Plant
  misc_feature: MA Experiment 20000527 PARAMETER Experiment Name: At_10percent_PEG_P Parameter: Treatment Value: 10percent PEG vs. No Treatment
  misc_feature: MA Experiment ID: 20000573 Result: Down-regulated in Transcription
  misc_feature: MA Experiment 20000573 PARAMETER Experiment Name: At_100uM_ABA_Mutants__P Parameter: Organism Value: A. thaliana
  misc_feature: MA Experiment 20000573 PARAMETER Experiment Name: At_100uM_ABA_Mutants__P Parameter: Plant Line Value: CS22 vs. Ler wt
  misc_feature: MA Experiment 20000573 PARAMETER Experiment Name: At_100uM_ABA_Mutants__P Parameter: Timepoint (hr) Value: N/A
  misc_feature: MA Experiment 20000573 PARAMETER Experiment Name: At_100uM_ABA_Mutants__P Parameter: Tissue Value: Whole Plant
  misc_feature: MA Experiment 20000573 PARAMETER Experiment Name: At_100uM_ABA_Mutants__P Parameter: Treatment Value: None
  misc_feature: MA Experiment ID: 20000574 Result: Down-regulated in Transcription
  misc_feature: MA Experiment 20000574 PARAMETER Experiment Name: At_100uM_ABA_Mutants__P Parameter: Organism Value: A. thaliana
  misc_feature: MA Experiment 20000574 PARAMETER Experiment Name: At_100uM_ABA_Mutants__P Parameter: Plant Line Value: CS23 vs. Ler wt
  misc_feature: MA Experiment 20000574 PARAMETER Experiment Name: At_100uM_ABA_Mutants__P Parameter: Timepoint (hr) Value: N/A
  misc_feature: MA Experiment 20000574 PARAMETER Experiment Name: At_100uM_ABA_Mutants__P Parameter: Tissue Value: Whole Plant
  misc_feature: MA Experiment 20000574 PARAMETER Experiment Name: At_100uM_ABA_Mutants__P Parameter: Treatment Value: None
  misc_feature: MA Experiment ID: 20000709 Result: Down-regulated in Transcription
  misc_feature: MA Experiment 20000709 PARAMETER Experiment Name: At_15mM_NH4NO3_L-to-H_P Parameter: Age (hr) Value: 14
  misc_feature: MA Experiment 20000709 PARAMETER Experiment Name: At_15mM_NH4NO3_L-to-H_P Parameter: Organism Value: A. thaliana
  misc_feature: MA Experiment 20000709 PARAMETER Experiment Name: At_15mM_NH4NO3_L-to-H_P Parameter: Plant Line Value: WS
  misc_feature: MA Experiment 20000709 PARAMETER Experiment Name: At_15mM_NH4NO3_L-to-H_P Parameter: Timepoint (hr) Value: 4
  misc_feature: MA Experiment 20000709 PARAMETER Experiment Name: At_15mM_NH4NO3_L-to-H_P Parameter: Tissue Value: Aerial
  misc_feature: MA Experiment 20000709 PARAMETER Experiment Name: At_15mM_NH4NO3_L-to-H_P Parameter: Treatment Value: 15mM NH4NO3 vs. 30mM Mannitol
  misc_feature: MA Experiment ID: 20000794 Result: Down-regulated in Transcription
  misc_feature: MA Experiment 20000794 PARAMETER Experiment Name: At_Petals_P Parameter: Age (day) Value: 23-25 days
  misc_feature: MA Experiment 20000794 PARAMETER Experiment Name: At_Petals_P Parameter: Plant Line Value: WS
  misc_feature: MA Experiment 20000794 PARAMETER Experiment Name: At_Petals_P Parameter: Tissue Value: Petals vs. Whole plant
  misc_feature: MA Experiment ID: 20001248 Result: Down-regulated in Transcription
  misc_feature: MA Experiment 20001248 PARAMETER Experiment Name: At_Far-red-induction_P Parameter: Age (day) Value: 7
  misc_feature: MA Experiment 20001248 PARAMETER Experiment Name: At_Far-red-induction_P Parameter: Light Value: Far-red vs. White
  misc_feature: MA Experiment 20001248 PARAMETER Experiment Name: At_Far-red-induction_P Parameter: Organism Value: A. thaliana
  misc_feature: MA Experiment 20001248 PARAMETER Experiment Name: At_Far-red-induction_P Parameter: Plant Line Value: Columbia
  misc_feature: MA Experiment 20001248 PARAMETER Experiment Name: At_Far-red-induction_P Parameter: Timepoint (hr) Value: 4
  misc_feature: MA Experiment 20001248 PARAMETER Experiment Name: At_Far-red-induction_P Parameter: Tissue Value: Whole Plant
  misc_feature: MA Experiment ID: 20001555 Result: Down-regulated in Transcription
  misc_feature: MA Experiment 20001555 PARAMETER Experiment Name: At_Drought_Soil_Dry_P Parameter: Age (day) Value: 24
  misc_feature: MA Experiment 20001555 PARAMETER Experiment Name: At_Drought_Soil_Dry_P Parameter: Organism Value: A. thaliana
  misc_feature: MA Experiment 20001555 PARAMETER Experiment Name: At_Drought_Soil_Dry_P Parameter: Plant Line Value: WS
  misc_feature: MA Experiment 20001555 PARAMETER Experiment Name: At_Drought_Soil_Dry_P Parameter: Post Timepoint (hr) Value: None
  misc_feature: MA Experiment 20001555 PARAMETER Experiment Name: At_Drought_Soil_Dry_P Parameter: Post-Treatment Value: None
  misc_feature: MA Experiment 20001555 PARAMETER Experiment Name: At_Drought_Soil_Dry_P Parameter: Timepoint (day) Value: 10
  misc_feature: MA Experiment 20001555 PARAMETER Experiment Name: At_Drought_Soil_Dry_P Parameter: Treatment Value: Drought vs. No Drought
  misc_feature: MA Experiment ID: 20001556 Result: Down-regulated in Transcription
  misc_feature: MA Experiment 20001556 PARAMETER Experiment Name: At_Drought_Soil_Dry_P Parameter: Age (day) Value: 26
  misc_feature: MA Experiment 20001556 PARAMETER Experiment Name: At_Drought_Soil_Dry_P Parameter: Organism Value: A. thaliana
  misc_feature: MA Experiment 20001556 PARAMETER Experiment Name: At_Drought_Soil_Dry_P Parameter: Plant Line Value: WS
  misc_feature: MA Experiment 20001556 PARAMETER Experiment Name: At_Drought_Soil_Dry_P Parameter: Post Timepoint (hr) Value: None
  misc_feature: MA Experiment 20001556 PARAMETER Experiment Name: At_Drought_Soil_Dry_P Parameter: Post-Treatment Value: None
  misc_feature: MA Experiment 20001556 PARAMETER Experiment Name: At_Drought_Soil_Dry_P Parameter: Timepoint (day) Value: 12
  misc_feature: MA Experiment 20001556 PARAMETER Experiment Name: At_Drought_Soil_Dry_P Parameter: Treatment Value: Drought vs. No Drought
  misc_feature: MA Experiment ID: 20001557 Result: Down-regulated in Transcription
  misc_feature: MA Experiment 20001557 PARAMETER Experiment Name: At_Drought_Soil_Dry_P Parameter: Age (day) Value: 27
  misc_feature: MA Experiment 20001557 PARAMETER Experiment Name: At_Drought_Soil_Dry_P Parameter: Organism Value: A. thaliana
  misc_feature: MA Experiment 20001557 PARAMETER Experiment Name: At_Drought_Soil_Dry_P Parameter: Plant Line Value: WS
  misc_feature: MA Experiment 20001557 PARAMETER Experiment Name: At_Drought_Soil_Dry_P Parameter: Post Timepoint (hr) Value: 3
  misc_feature: MA Experiment 20001557 PARAMETER Experiment Name: At_Drought_Soil_Dry_P Parameter: Post-Treatment Value: Re-Water vs. No Drought
  misc_feature: MA Experiment 20001557 PARAMETER Experiment Name: At_Drought_Soil_Dry_P Parameter: Timepoint (day) Value: 13
  misc_feature: MA Experiment 20001557 PARAMETER Experiment Name: At_Drought_Soil_Dry_P Parameter: Treatment Value: Drought vs. No Drought
  misc_feature: MA Experiment ID: 20001558 Result: Down-regulated in Transcription
  misc_feature: MA Experiment 20001558 PARAMETER Experiment Name: At_Drought_Soil_Dry_P Parameter: Age (day) Value: 27
  misc_feature: MA Experiment 20001558 PARAMETER Experiment Name: At_Drought_Soil_Dry_P Parameter: Organism Value: A. thaliana
  misc_feature: MA Experiment 20001558 PARAMETER Experiment Name: At_Drought_Soil_Dry_P Parameter: Plant Line Value: WS
  misc_feature: MA Experiment 20001558 PARAMETER Experiment Name: At_Drought_Soil_Dry_P Parameter: Post Timepoint (hr) Value: 6
  misc_feature: MA Experiment 20001558 PARAMETER Experiment Name: At_Drought_Soil_Dry_P Parameter: Post-Treatment Value: Re-Water vs. No Drought
  misc_feature: MA Experiment 20001558 PARAMETER Experiment Name: At_Drought_Soil_Dry_P Parameter: Timepoint (day) Value: 13
  misc_feature: MA Experiment 20001558 PARAMETER Experiment Name: At_Drought_Soil_Dry_P Parameter: Treatment Value: Drought vs. No Drought
  misc_feature: MA Experiment ID: 20001560 Result: Down-regulated in Transcription
  misc_feature: MA Experiment 20001560 PARAMETER Experiment Name: At_Drought_Soil_Dry_P Parameter: Age (day) Value: 28
  misc_feature: MA Experiment 20001560 PARAMETER Experiment Name: At_Drought_Soil_Dry_P Parameter: Organism Value: A. thaliana
  misc_feature: MA Experiment 20001560 PARAMETER Experiment Name: At_Drought_Soil_Dry_P Parameter: Plant Line Value: WS
  misc_feature: MA Experiment 20001560 PARAMETER Experiment Name: At_Drought_Soil_Dry_P Parameter: Post Timepoint (hr) Value: None
  misc_feature: MA Experiment 20001560 PARAMETER Experiment Name: At_Drought_Soil_Dry_P Parameter: Post-Treatment Value: None
  misc_feature: MA Experiment 20001560 PARAMETER Experiment Name: At_Drought_Soil_Dry_P Parameter: Timepoint (day) Value: 14
  misc_feature: MA Experiment 20001560 PARAMETER Experiment Name: At_Drought_Soil_Dry_P Parameter: Treatment Value: Drought vs. No Drought
  misc_feature: MA Experiment ID: 20001904 Result: Down-regulated in Transcription
  misc_feature: MA Experiment 20001904 PARAMETER Experiment Name: At_Drought_Reproduction_P Parameter: Age (day) Value: 37
  misc_feature: MA Experiment 20001904 PARAMETER Experiment Name: At_Drought_Reproduction_P Parameter: Organism Value: A. thaliana
  misc_feature: MA Experiment 20001904 PARAMETER Experiment Name: At_Drought_Reproduction_P Parameter: Plant Line Value: WS
  misc_feature: MA Experiment 20001904 PARAMETER Experiment Name: At_Drought_Reproduction_P Parameter: Timepoint (day) Value: 7
  misc_feature: MA Experiment 20001904 PARAMETER Experiment Name: At_Drought_Reproduction_P Parameter: Tissue Value: Rosettes
  misc_feature: MA Experiment 20001904 PARAMETER Experiment Name: At_Drought_Reproduction_P Parameter: Treatment Value: Drought vs. No Drought
  misc_feature: MA Experiment ID: 20001905 Result: Down-regulated in Transcription
  misc_feature: MA Experiment 20001905 PARAMETER Experiment Name: At_Drought_Reproduction_P Parameter: Age (day) Value: 40
  misc_feature: MA Experiment 20001905 PARAMETER Experiment Name: At_Drought_Reproduction_P Parameter: Organism Value: A. thaliana
  misc_feature: MA Experiment 20001905 PARAMETER Experiment Name: At_Drought_Reproduction_P Parameter: Plant Line Value: WS
  misc_feature: MA Experiment 20001905 PARAMETER Experiment Name: At_Drought_Reproduction_P Parameter: Timepoint (day) Value: 10
  misc_feature: MA Experiment 20001905 PARAMETER Experiment Name: At_Drought_Reproduction_P Parameter: Tissue Value: Rosettes
  misc_feature: MA Experiment 20001905 PARAMETER Experiment Name: At_Drought_Reproduction_P Parameter: Treatment Value: Drought vs. No Drought
aaaagaaagaacaacacagagcagagaaaaaaaagaggtagccatgttcttgaagcttttaaccatcttcttcttcttcttcttcaacctcatctttcaatcttcttctcaaagtctcaactttgcttacaacaatggctttaatccaccgacggacttatccatccaagggatcacaaccgtcacacccaacggtctcttgaagctaaccaacacaaccgttcagaaaaccggtcacgccttctataccaaaccgatccggtttaaagattctccaaacggcaccgtttcatccttctcgacatcgttcgtcttcgctattcactctcagatcgcgattctcagcggtcatggcatagctttcgtcgtcgctcctaacgcaagccttccttacggcaacccaagtcaatacataggtctcttcaacctcgcaaacaacggtaatgagacaaatcatgtctttgctgttgaattagatacgatcttgagtacagagttcaatgatacaaacgataatcatgtcggaatcgatatcaatagtttgaagtctgtgcaaagctcgcctgctgggtattgggacgagaaaggtcaattcaagaatctgactttgatcagtcgtaagccgatgcaggtctgggtcgattacgacggacgtacaaataaaatcgatgtgacgatggctccgttcaacgaagataaacctacaagaccgcttgttacggctgttagagatctttcttcggttctactccaagatatgtatgtgggtttctcctctgcgacaggctctgttctgtcggaacattatattctcgggtggagtttcggtttgaacgaaaaggctccacctttagctttatcgagactcccgaagcttcctcgcttcgagcccaagagaatctctgagttctacaagatcggaatgcctttgatttctctgtttttgattttctcgtttattttcctcgtttgttacatcgtgaggaggaggaggaagtttgcggaggagctcgaggaatgggaaaaagagttcgggaagaatcggttcaggttcaaggatttgtactacgcgaccaaagggtttaaggagaagggacttcttggaactggtgggttcgggagtgtttacaaaggtgtgatgcctggtacgaagttggagatcgctgttaaaagagtttcgcatgagtctcgtcaagggatgaaagagtttgtggcggagattgtgagtattggtcggatgagtcataggaatttagttcctctcttgggttattgtcgtaggagaggtgagcttcttttggtgtatgattacatgcctaatggaagcttagacaagtacttgtacaacactccggaggtaacacttaattggaaacagaggattaaggttattctaggtgttgcctctggcttgttctatctccatgaggaatgggaacaagtggtgattcaccgggatgtcaaagctagcaatgtcttgttggacggagagctcaatgggagacttggggatttcggtttggctcggttgtatgatcacggatcggatcctcagaccacgcatgttgttggaacattgggatacttagctcctgaacatactaggacaggacgtgccacgatggctaccgatgtttttgcgtttggggcgttcttactcgaagtcgcatgcggtagacgtcctatcgagttccagcaagagaccgatgagacgttcttgctcgtggattgggttttcgggttgtggaacaagggagacatcttggctgctaaagatccgaatatgggttcggaatgtgatgaaaaagaggtggaaatggttttgaagctaggtctcttgtgctctcactctgacccaagggctagaccaagtatgagacaagtgctacattatctaagaggagatgcaaagttaccagaattgtctccgttggacttgtccggaagtgggatgatgtttggggttcatgacggatttagtgaattaggaatgtcgtattcctcctccgtattcaaagggtttaccggtggatcttccatcgctgattctcaactttctggcgggagatgaatagaatgttttgaagttatataaagtatatgttatttaatggcgatagttatgttttaaatatatttgaacctttttgtgtgttttgcatttcatctgtagagactatttgggcgagatatgggaatgggactatgtatatatacttcagcatatgttgaaaattactgtctaaagaatattatggcc

SEQ ID NO: 89621 - protein, 689 aa, Arabidopsis thaliana
  peptide (1)..(689): Ceres Seq. ID no. 12719728
  misc_feature (15)..(689): Homolog of NCBI NO: 15232332 NR Description: serine/threonine-specific kinase like protein;
  misc_feature (15)..(689): Homolog of NCBI NO: 28416699 NR Description: At3g53810 [Arabidopsis thaliana]
  misc_feature (16)..(689): Homolog of NCBI NO: 18411937 NR Description: contains similarity to a protein kinase domain score: 125.64) and legume lectins alpha domain [Arabidopsis
  misc_feature (15)..(689): Homolog of NCBI NO: 18411935 NR Description: contains similarity to a protein kinase domain pkinase.hmm, score: 166.20) and to legume lectins beta domain lectin_legB.hmm, score: 139.32); protein id: At4g02410.1,
  misc_feature (2)..(689): Homolog of NCBI NO: 34899508 NR Description: putative receptor-like protein kinase [Oryza
  misc_feature (19)..(689): Homolog of NCBI NO: 34395075 NR Description: putative receptor kinase Lecrk [Oryza sativa
  misc_feature (19)..(689): Homolog of NCBI NO: 22093630 NR Description: contains ESTs
  misc_feature (36)..(689): Homolog of NCBI NO: 34393465 NR Description: putative receptor-type protein kinase LRK1 [Oryza
  misc_feature (308)..(689): Homolog of NCBI NO: 34395078 NR Description: putative receptor kinase Lecrk [Oryza sativa
  misc_feature (20)..(292): Homolog of NCBI NO: 34395078 NR Description: putative receptor kinase Lecrk [Oryza sativa
KERTTQSREKKEVAMFLKLLTIFFFFFFNLIFQSSSQSLNFAYNNGFNPPTDLSIQGITTVTPNGLLKLTNTTVQKTGHAFYTKPIRFKDSPNGTVSSFSTSFVFAIHSQIAILSGHGIAFVVAPNASLPYGNPSQYIGLFNLANNGNETNHVFAVELDTILSTEFNDTNDNHVGIDINSLKSVQSSPAGYWDEKGQFKNLTLISRKPMQVWVDYDGRTNKIDVTMAPFNEDKPTRPLVTAVRDLSSVLLQDMYVGFSSATGSVLSEHYILGWSFGLNEKAPPLALSRLPKLPRFEPKRISEFYKIGMPLISLFLIFSFIFLVCYIVRRRRKFAEELEEWEKEFGKNRFRFKDLYYATKGFKEKGLLGTGGFGSVYKGVMPGTKLEIAVKRVSHESRQGMKEFVAEIVSIGRMSHRNLVPLLGYCRRRGELLLVYDYMPNGSLDKYLYNTPEVTLNWKQRIKVILGVASGLFYLHEEWEQVVIHRDVKASNVLLDGELNGRLGDFGLARLYDHGSDPQTTHVVGTLGYLAPEHTRTGRATMATDVFAFGAFLLEVACGRRPIEFQQETDETFLLVDWVFGLWNKGDILAAKDPNMGSECDEKEVEMVLKLGLLCSHSDPRARPSMRQVLHYLRGDAKLPELSPLDLSGSGMMFGVHDGFSELGMSYSSSVFKGFTGGSSIADSQLSGGR

SEQ ID NO: 89622 - protein, 675 aa, Arabidopsis thaliana
  peptide (1)..(675): Ceres Seq. ID no. 12719729
  misc_feature (1)..(675): Homolog of NCBI NO: 15232332 NR Description: serine/threonine-specific kinase like protein;
  misc_feature (1)..(675): Homolog of NCBI NO: 28416699 NR Description: At3g53810 [Arabidopsis thaliana]
  misc_feature (2)..(675): Homolog of NCBI NO: 18411937 NR Description: contains similarity to a protein kinase domain score: 125.64) and legume lectins alpha domain [Arabidopsis
  misc_feature (1)..(675): Homolog of NCBI NO: 18411935 NR Description: contains similarity to a protein kinase domain pkinase.hmm, score: 166.20) and to legume lectins beta domain lectin_legB.hmm, score: 139.32); protein id: At4g02410.1,
  misc_feature (1)..(675): Homolog of NCBI NO: 34899508 NR Description: putative receptor-like protein kinase [Oryza
  misc_feature (5)..(675): Homolog of NCBI NO: 34395075 NR Description: putative receptor kinase Lecrk [Oryza sativa
  misc_feature (5)..(675): Homolog of NCBI NO: 22093630 NR Description: contains ESTs
  misc_feature (22)..(675): Homolog of NCBI NO: 34393465 NR Description: putative receptor-type protein kinase LRK1 [Oryza
  misc_feature (294)..(675): Homolog of NCBI NO: 34395078 NR Description: putative receptor kinase Lecrk [Oryza sativa
  misc_feature (6)..(278): Homolog of NCBI NO: 34395078 NR Description: putative receptor kinase Lecrk [Oryza sativa
MFLKLLTIFFFFFFNLIFQSSSQSLNFAYNNGFNPPTDLSIQGITTVTPNGLLKLTNTTVQKTGHAFYTKPIRFKDSPNGTVSSFSTSFVFAIHSQIAILSGHGIAFVVAPNASLPYGNPSQYIGLFNLANNGNETNHVFAVELDTILSTEFNDTNDNHVGIDINSLKSVQSSPAGYWDEKGQFKNLTLISRKPMQVWVDYDGRTNKIDVTMAPFNEDKPTRPLVTAVRDLSSVLLQDMYVGFSSATGSVLSEHYILGWSFGLNEKAPPLALSRLPKLPRFEPKRISEFYKIGMPLISLFLIFSFIFLVCYIVRRRRKFAEELEEWEKEFGKNRFRFKDLYYATKGFKEKGLLGTGGFGSVYKGVMPGTKLEIAVKRVSHESRQGMKEFVAEIVSIGRMSHRNLVPLLGYCRRRGELLLVYDYMPNGSLDKYLYNTPEVTLNWKQRIKVILGVASGLFYLHEEWEQVVIHRDVKASNVLLDGELNGRLGDFGLARLYDHGSDPQTTHVVGTLGYLAPEHTRTGRATMATDVFAFGAFLLEVACGRRPIEFQQETDETFLLVDWVFGLWNKGDILAAKDPNMGSECDEKEVEMVLKLGLLCSHSDPRARPSMRQVLHYLRGDAKLPELSPLDLSGSGMMFGVHDGFSELGMSYSSSVFKGFTGGSSIADSQLSGGR

SEQ ID NO: 89623 - protein, 481 aa, Arabidopsis thaliana
  peptide (1)..(481): Ceres Seq. ID no. 12719730
  misc_feature (1)..(481): Homolog of NCBI NO: 15232332 NR Description: serine/threonine-specific kinase like protein;
  misc_feature (1)..(481): Homolog of NCBI NO: 28416699 NR Description: At3g53810 [Arabidopsis thaliana]
  misc_feature (1)..(481): Homolog of NCBI NO: 18411937 NR Description: contains similarity to a protein kinase domain score: 125.64) and legume lectins alpha domain [Arabidopsis
  misc_feature (1)..(481): Homolog of NCBI NO: 18411935 NR Description: contains similarity to a protein kinase domain pkinase.hmm, score: 166.20) and to legume lectins beta domain lectin_legB.hmm, score: 139.32); protein id: At4g02410.1,
  misc_feature (1)..(481): Homolog of NCBI NO: 34899508 NR Description: putative receptor-like protein kinase [Oryza
  misc_feature (1)..(481): Homolog of NCBI NO: 34395075 NR Description: putative receptor kinase Lecrk [Oryza sativa
  misc_feature (1)..(481): Homolog of NCBI NO: 22093630 NR Description: contains ESTs
  misc_feature (1)..(481): Homolog of NCBI NO: 34393465 NR Description: putative receptor-type protein kinase LRK1 [Oryza
  misc_feature (100)..(481): Homolog of NCBI NO: 34395078 NR Description: putative receptor kinase Lecrk [Oryza sativa
  misc_feature (1)..(84): Homolog of NCBI NO: 34395078 NR Description: putative receptor kinase Lecrk [Oryza sativa
MQVWVDYDGRTNKIDVTMAPFNEDKPTRPLVTAVRDLSSVLLQDMYVGFSSATGSVLSEHYILGWSFGLNEKAPPLALSRLPKLPRFEPKRISEFYKIGMPLISLFLIFSFIFLVCYIVRRRRKFAEELEEWEKEFGKNRFRFKDLYYATKGFKEKGLLGTGGFGSVYKGVMPGTKLEIAVKRVSHESRQGMKEFVAEIVSIGRMSHRNLVPLLGYCRRRGELLLVYDYMPNGSLDKYLYNTPEVTLNWKQRIKVILGVASGLFYLHEEWEQVVIHRDVKASNVLLDGELNGRLGDFGLARLYDHGSDPQTTHVVGTLGYLAPEHTRTGRATMATDVFAFGAFLLEVACGRRPIEFQQETDETFLLVDWVFGLWNKGDILAAKDPNMGSECDEKEVEMVLKLGLLCSHSDPRARPSMRQVLHYLRGDAKLPELSPLDLSGSGMMFGVHDGFSELGMSYSSSVFKGFTGGSSIADSQLSGGR

SEQ ID NO: 89624 - DNA, 680 bp, Arabidopsis thaliana
  misc_feature (1)..(680): Ceres Seq. ID no. 12719780
  misc_feature: MA Experiment ID: 20000173 Result: Down-regulated in Transcription
  misc_feature: MA Experiment 20000173 PARAMETER Experiment Name: At_42deg_Heat_P Parameter: Age (day) Value: 14
  misc_feature: MA Experiment 20000173 PARAMETER Experiment Name: At_42deg_Heat_P Parameter: Organism Value: A. thaliana
  misc_feature: MA Experiment 20000173 PARAMETER Experiment Name: At_42deg_Heat_P Parameter: Plant Line Value: WS
  misc_feature: MA Experiment 20000173 PARAMETER Experiment Name: At_42deg_Heat_P Parameter: Temperature (deg C) Value: 42 vs. 22
  misc_feature: MA Experiment 20000173 PARAMETER Experiment Name: At_42deg_Heat_P Parameter: Timepoint (hr) Value: 6
  misc_feature: MA Experiment 20000173 PARAMETER Experiment Name: At_42deg_Heat_P Parameter: Tissue Value: Aerial
  misc_feature: MA Experiment ID: 20000180 Result: Up-regulated in Transcription
  misc_feature: MA Experiment 20000180 PARAMETER Experiment Name: At_Germinating_Seeds_P Parameter: Age (hr) Value: 24 vs. 0
  misc_feature: MA Experiment 20000180 PARAMETER Experiment Name: At_Germinating_Seeds_P Parameter: Tissue Value: Germinating Seeds
  misc_feature: MA Experiment ID: 20000182 Result: Down-regulated in Transcription
  misc_feature: MA Experiment 20000182 PARAMETER Experiment Name: At_2mM_SA_P Parameter: Age (day) Value: 14
  misc_feature: MA Experiment 20000182 PARAMETER Experiment Name: At_2mM_SA_P Parameter: Organism Value: A. thaliana
  misc_feature: MA Experiment 20000182 PARAMETER Experiment Name: At_2mM_SA_P Parameter: Plant Line Value: WS
  misc_feature: MA Experiment 20000182 PARAMETER Experiment Name: At_2mM_SA_P Parameter: Timepoint (hr) Value: 6
  misc_feature: MA Experiment 20000182 PARAMETER Experiment Name: At_2mM_SA_P Parameter: Tissue Value: Aerial
  misc_feature: MA Experiment 20000182 PARAMETER Experiment Name: At_2mM_SA_P Parameter: Treatment Value: 2mM SA vs. No Treatment
  misc_feature: MA Experiment ID: 20000185 Result: Down-regulated in Transcription
  misc_feature: MA Experiment 20000185 PARAMETER Experiment Name: At_Roots__P Parameter: Age (day) Value: 7 vs. 21
  misc_feature: MA Experiment 20000185 PARAMETER Experiment Name: At_Roots__P Parameter: Organism Value: A. thaliana
  misc_feature: MA Experiment 20000185 PARAMETER Experiment Name: At_Roots__P Parameter: Tissue Value: Roots vs. Whole Plant
  misc_feature: MA Experiment ID: 20000227 Result: Down-regulated in Transcription
  misc_feature: MA Experiment 20000227 PARAMETER Experiment Name: At_Root-Tips-vs-Tops_P Parameter: Tissue Value: Root Tips vs. Root Tops
  misc_feature: MA Experiment ID: 20000234 Result: Up-regulated in Transcription
  misc_feature: MA Experiment 20000234 PARAMETER Experiment Name: At_Siliques_P Parameter: Age (day) Value: 21
  misc_feature: MA Experiment 20000234 PARAMETER Experiment Name: At_Siliques_P Parameter: Organism Value: A. thaliana
  misc_feature: MA Experiment 20000234 PARAMETER Experiment Name: At_Siliques_P Parameter: Plant Line Value: WS
  misc_feature: MA Experiment 20000234 PARAMETER Experiment Name: At_Siliques_P Parameter: Tissue Value: Less Than 5mm Siliques vs. Whole Plant
  misc_feature: MA Experiment ID: 20000235 Result: Up-regulated in Transcription
  misc_feature: MA Experiment 20000235 PARAMETER Experiment Name: At_Siliques_P Parameter: Age (day) Value: 21
  misc_feature: MA Experiment 20000235 PARAMETER Experiment Name: At_Siliques_P Parameter: Organism Value: A. thaliana
  misc_feature: MA Experiment 20000235 PARAMETER Experiment Name: At_Siliques_P Parameter: Plant Line Value: WS
  misc_feature: MA Experiment 20000235 PARAMETER Experiment Name: At_Siliques_P Parameter: Tissue Value: 5-10mm Siliques vs. Whole Plant
  misc_feature: MA Experiment ID: 20000265 Result: Up-regulated in Transcription
  misc_feature: MA Experiment 20000265 PARAMETER Experiment Name: At_Open_Flower_P Parameter: Age (day) Value: 21
  misc_feature: MA Experiment 20000265 PARAMETER Experiment Name: At_Open_Flower_P Parameter: Plant Line Value: WS
  misc_feature: MA Experiment 20000265 PARAMETER Experiment Name: At_Open_Flower_P Parameter: Tissue Value: Closed Flower vs. Whole Plant
  misc_feature: MA Experiment ID: 20000436 Result: Down-regulated in Transcription
  misc_feature: MA Experiment 20000436 PARAMETER Experiment Name: At_Drought_P Parameter: Age (day) Value: 7
  misc_feature: MA Experiment 20000436 PARAMETER Experiment Name: At_Drought_P Parameter: Organism Value: A. thaliana
  misc_feature: MA Experiment 20000436 PARAMETER Experiment Name: At_Drought_P Parameter: Plant Line Value: WS
  misc_feature: MA Experiment 20000436 PARAMETER Experiment Name: At_Drought_P Parameter: Timepoint (hr) Value: 12
  misc_feature: MA Experiment 20000436 PARAMETER Experiment Name: At_Drought_P Parameter: Tissue Value: Whole Plant
  misc_feature: MA Experiment 20000436 PARAMETER Experiment Name: At_Drought_P Parameter: Treatment Value: Drought vs. No Drought
  misc_feature: MA Experiment ID: 20000439 Result: Down-regulated in Transcription
  misc_feature: MA Experiment 20000439 PARAMETER Experiment Name: At_Roots__P Parameter: Age (day) Value: 14 vs. 21
  misc_feature: MA Experiment 20000439 PARAMETER Experiment Name: At_Roots__P Parameter: Organism Value: A. thaliana
  misc_feature: MA Experiment 20000439 PARAMETER Experiment Name: At_Roots__P Parameter: Tissue Value: Roots vs. Whole Plant
  misc_feature: MA Experiment ID: 20000451 Result: Down-regulated in Transcription
  misc_feature: MA Experiment 20000451 PARAMETER Experiment Name: At_CS6879_Shoots-Roots_P Parameter: Age (day) Value: 14
  misc_feature: MA Experiment 20000451 PARAMETER Experiment Name: At_CS6879_Shoots-Roots_P Parameter: Organism Value: A. thaliana
  misc_feature: MA Experiment 20000451 PARAMETER Experiment Name: At_CS6879_Shoots-Roots_P Parameter: Plant Line Value: CS6879 vs. WS
  misc_feature: MA Experiment 20000451 PARAMETER Experiment Name: At_CS6879_Shoots-Roots_P Parameter: Tissue Value: Roots
  misc_feature: MA Experiment ID: 20000573 Result: Up-regulated in Transcription
  misc_feature: MA Experiment 20000573 PARAMETER Experiment Name: At_100uM_ABA_Mutants__P Parameter: Organism Value: A. thaliana
  misc_feature: MA Experiment 20000573 PARAMETER Experiment Name: At_100uM_ABA_Mutants__P Parameter: Plant Line Value: CS22 vs. Ler wt
  misc_feature: MA Experiment 20000573 PARAMETER Experiment Name: At_100uM_ABA_Mutants__P Parameter: Timepoint (hr) Value: N/A
  misc_feature: MA Experiment 20000573 PARAMETER Experiment Name: At_100uM_ABA_Mutants__P Parameter: Tissue Value: Whole Plant
  misc_feature: MA Experiment 20000573 PARAMETER Experiment Name: At_100uM_ABA_Mutants__P Parameter: Treatment Value: None
  misc_feature: MA Experiment ID: 20000574 Result: Up-regulated in Transcription
  misc_feature: MA Experiment 20000574 PARAMETER Experiment Name: At_100uM_ABA_Mutants__P Parameter: Organism Value: A. thaliana
  misc_feature: MA Experiment 20000574 PARAMETER Experiment Name: At_100uM_ABA_Mutants__P Parameter: Plant Line Value: CS23 vs. Ler wt
  misc_feature: MA Experiment 20000574 PARAMETER Experiment Name: At_100uM_ABA_Mutants__P Parameter: Timepoint (hr) Value: N/A
  misc_feature: MA Experiment 20000574 PARAMETER Experiment Name: At_100uM_ABA_Mutants__P Parameter: Tissue Value: Whole Plant
  misc_feature: MA Experiment 20000574 PARAMETER Experiment Name: At_100uM_ABA_Mutants__P Parameter: Treatment Value: None
  misc_feature: MA Experiment ID: 20001451 Result: Up-regulated in Transcription
  misc_feature: MA Experiment 20001451 PARAMETER Experiment Name: At_Far-red-induction_P Parameter: Age (day) Value: 7
  misc_feature: MA Experiment 20001451 PARAMETER Experiment Name: At_Far-red-induction_P Parameter: Light Value: Far-red vs. White
  misc_feature: MA Experiment 20001451 PARAMETER Experiment Name: At_Far-red-induction_P Parameter: Organism Value: A. thaliana
  misc_feature: MA Experiment 20001451 PARAMETER Experiment Name: At_Far-red-induction_P Parameter: Plant Line Value: Columbia
  misc_feature: MA Experiment 20001451 PARAMETER Experiment Name: At_Far-red-induction_P Parameter: Timepoint (hr) Value: 24
  misc_feature: MA Experiment 20001451 PARAMETER Experiment Name: At_Far-red-induction_P Parameter: Tissue Value: Whole Plant
  misc_feature: MA Experiment ID: 20001757 Result: Up-regulated in Transcription
  misc_feature: MA Experiment 20001757 PARAMETER Experiment Name: At_50mM_NH4NO3_L-to-H_P Parameter: Timepoint (hr) Value: 6
  misc_feature: MA Experiment 20001757 PARAMETER Experiment Name: At_50mM_NH4NO3_L-to-H_P Parameter: Tissue Value: Leaf
  misc_feature: MA Experiment 20001757 PARAMETER Experiment Name: At_50mM_NH4NO3_L-to-H_P Parameter: Treatment Value: 50mM NH4NO3 vs 100mM Mannitol
  misc_feature: MA Experiment ID: 20001906 Result: Down-regulated in Transcription
  misc_feature: MA Experiment 20001906 PARAMETER Experiment Name: At_Drought_Reproduction_P Parameter: Age (day) Value: 35
  misc_feature: MA Experiment 20001906 PARAMETER Experiment Name: At_Drought_Reproduction_P Parameter: Organism Value: A. thaliana
  misc_feature: MA Experiment 20001906 PARAMETER Experiment Name: At_Drought_Reproduction_P Parameter: Plant Line Value: WS
  misc_feature: MA Experiment 20001906 PARAMETER Experiment Name: At_Drought_Reproduction_P Parameter: Timepoint (day) Value: 5
  misc_feature: MA Experiment 20001906 PARAMETER Experiment Name: At_Drought_Reproduction_P Parameter: Tissue Value: Siliques
  misc_feature: MA Experiment 20001906 PARAMETER Experiment Name: At_Drought_Reproduction_P Parameter: Treatment Value: Drought vs. No Drought
caaccttttttgttcctcccaacaggttctctatttctttctctctatgtaaacattttgttaagataatggtttcatacatgaacgtgagtttgtatctattgttcgaaaggtcaatggaagaggaaaagaactgaaaaacccaatttctctaaaccacaacaaagatttggactttctgttaaagaagttagctccgccactcacggcggttttacttgctgtttcacccatctgtttccctccagaatctcttgggcagactttggatatacagagaggagctacattgtttaatagagcttgtatcgggtgtcatgatacaggtggaaacattattcaacctggtgcaacgcttttcacaaaagacctcgaaagaaatggagttgatactgaggaagaaatatatcgtgttacctactttggaaagggaagaatgccgggatttggtgagaaatgcacaccgagaggacaatgtacctttggaccgcggttgcaggacgaagaaatcaagcttctcgctgaatttgtaaagtttcaagctgaccaaggctggccaactgtatctacggactagcgactaggcattcttcgtcttgtgagcgtttttgtaatccaattaatccatagggctgtatctacttacacttataacaattccttctgggaggtttcattgc

SEQ ID NO: 89625 - protein, 71 aa, Arabidopsis thaliana
  peptide (1)..(71): Ceres Seq. ID no. 12719781
MIQVETLFNLVQRFSQKTSKEMELILRKKYIVLPTLEREECRDLVRNAHREDNVPLDRGCRTKKSSFSLNL

SEQ ID NO: 89626 - protein, 50 aa, Arabidopsis thaliana; identical to SEQ ID NO: 28366
  peptide (1)..(50): Ceres Seq. ID no. 12719782

SEQ ID NO: 89627 - protein, 46 aa, Arabidopsis thaliana; identical to SEQ ID NO: 28367
  peptide (1)..(46): Ceres Seq. ID no. 12719783
  misc_feature (1)..(46): Homolog of NCBI NO: 18422509 NR Description: expressed protein; protein id: At5g45040.1, by cDNA: gi_13926304, supported by cDNA: gi_16323249 [Arabidopsis
  misc_feature (1)..(46): Homolog of NCBI NO: 10177496 NR Description: gene_id:K21C13.23~unknown protein [Arabidopsis
  misc_feature (1)..(46): Homolog of NCBI NO: 34899810 NR Description: putative c6 type cytochrome [Oryza sativa
  misc_feature (1)..(46): Homolog of NCBI NO: 34393286 NR Description: cytochrome C6, chloroplast precursor-like protein
  misc_feature (1)..(40): Homolog of NCBI NO: 37521549 NR Description: cytochrome c6 [Gloeobacter violaceus]
  misc_feature (1)..(40): Homolog of NCBI NO: 117923 NR Description: Cytochrome C6 (Soluble cytochrome f) (Cytochrome
  misc_feature (1)..(40): Homolog of NCBI NO: 22652035 NR Description: putative cytochrome c6-2 [Synechococcus sp. PCC
  misc_feature (1)..(40): Homolog of NCBI NO: 20141074 NR Description: Cytochrome C6 precursor (Soluble cytochrome f)
  misc_feature (1)..(40): Homolog of NCBI NO: 23040173 NR Description: hypothetical protein [Trichodesmium erythraeum
  misc_feature (1)..(40): Homolog of NCBI NO: 22298826 NR Description: cytochrome c553 [Thermosynechococcus elongatus >gi|25014058|sp|P56534|CYC6_SYNEL Cytochrome C6 precursor

SEQ ID NO: 89628 - DNA, 1489 bp, Arabidopsis thaliana
  misc_feature (1)..(1489): Ceres Seq. ID no. 12719800
  misc_feature: MA Experiment ID: 20000169 Result: Up-regulated in Transcription
  misc_feature: MA Experiment 20000169 PARAMETER Experiment Name: At_100uM_ABA_P Parameter: Age (day) Value: 14
  misc_feature: MA Experiment 20000169 PARAMETER Experiment Name: At_100uM_ABA_P Parameter: Organism Value: A. thaliana
  misc_feature: MA Experiment 20000169 PARAMETER Experiment Name: At_100uM_ABA_P Parameter: Plant Line Value: WS
  misc_feature: MA Experiment 20000169 PARAMETER Experiment Name: At_100uM_ABA_P Parameter: Timepoint (hr) Value: 6
  misc_feature: MA Experiment 20000169 PARAMETER Experiment Name: At_100uM_ABA_P Parameter: Tissue Value: Aerial
  misc_feature: MA Experiment 20000169 PARAMETER Experiment Name: At_100uM_ABA_P Parameter: Treatment Value: 100uM ABA vs. No Treatment
  misc_feature: MA Experiment ID: 20000171 Result: Down-regulated in Transcription
  misc_feature: MA Experiment 20000171 PARAMETER Experiment Name: At_42deg_Heat_P Parameter: Age (day) Value: 14
  misc_feature: MA Experiment 20000171 PARAMETER Experiment Name: At_42deg_Heat_P Parameter: Organism Value: A. thaliana
  misc_feature: MA Experiment 20000171 PARAMETER Experiment Name: At_42deg_Heat_P Parameter: Plant Line Value: WS
  misc_feature: MA Experiment 20000171 PARAMETER Experiment Name: At_42deg_Heat_P Parameter: Temperature (deg C) Value: 42 vs. 22
  misc_feature: MA Experiment 20000171 PARAMETER Experiment Name: At_42deg_Heat_P Parameter: Timepoint (hr) Value: 1
  misc_feature: MA Experiment 20000171 PARAMETER Experiment Name: At_42deg_Heat_P Parameter: Tissue Value: Aerial
  misc_feature: MA Experiment ID: 20000173 Result: Down-regulated in Transcription
  misc_feature: MA Experiment 20000173 PARAMETER Experiment Name: At_42deg_Heat_P Parameter: Age (day) Value: 14
  misc_feature: MA Experiment 20000173 PARAMETER Experiment Name: At_42deg_Heat_P Parameter: Organism Value: A. thaliana
  misc_feature: MA Experiment 20000173 PARAMETER Experiment Name: At_42deg_Heat_P Parameter: Plant Line Value: WS
  misc_feature: MA Experiment 20000173 PARAMETER Experiment Name: At_42deg_Heat_P Parameter: Temperature (deg C) Value: 42 vs. 22
  misc_feature: MA Experiment 20000173 PARAMETER Experiment Name: At_42deg_Heat_P Parameter: Timepoint (hr) Value: 6
  misc_feature: MA Experiment 20000173 PARAMETER Experiment Name: At_42deg_Heat_P Parameter: Tissue Value: Aerial
  misc_feature: MA Experiment ID: 20000213 Result: Up-regulated in Transcription
  misc_feature: MA Experiment 20000213 PARAMETER Experiment Name: At_4deg_Cold_P Parameter: Timepoint (hr) Value: 2
  misc_feature: MA Experiment ID: 20000227 Result: Up-regulated in Transcription
  misc_feature: MA Experiment 20000227 PARAMETER Experiment Name: At_Root-Tips-vs-Tops_P Parameter: Tissue Value: Root Tips vs. Root Tops
  misc_feature: MA Experiment ID: 20000234 Result: Down-regulated in Transcription
  misc_feature: MA Experiment 20000234 PARAMETER Experiment Name: At_Siliques_P Parameter: Age (day) Value: 21
  misc_feature: MA Experiment 20000234 PARAMETER Experiment Name: At_Siliques_P Parameter: Organism Value: A. thaliana
  misc_feature: MA Experiment 20000234 PARAMETER Experiment Name: At_Siliques_P Parameter: Plant Line Value: WS
  misc_feature: MA Experiment 20000234 PARAMETER Experiment Name: At_Siliques_P Parameter: Tissue Value: Less Than 5mm Siliques vs. Whole Plant
  misc_feature: MA Experiment ID: 20000235 Result: Down-regulated in Transcription
  misc_feature: MA Experiment 20000235 PARAMETER Experiment Name: At_Siliques_P Parameter: Age (day) Value: 21
  misc_feature: MA Experiment 20000235 PARAMETER Experiment Name: At_Siliques_P Parameter: Organism Value: A. thaliana
  misc_feature: MA Experiment 20000235 PARAMETER Experiment Name: At_Siliques_P Parameter: Plant Line Value: WS
  misc_feature: MA Experiment 20000235 PARAMETER Experiment Name: At_Siliques_P Parameter: Tissue Value: 5-10mm Siliques vs. Whole Plant
  misc_feature: MA Experiment ID: 20001247 Result: Up-regulated in Transcription
  misc_feature: MA Experiment 20001247 PARAMETER Experiment Name: At_Far-red-induction_P Parameter: Age (day) Value: 7
  misc_feature: MA Experiment 20001247 PARAMETER Experiment Name: At_Far-red-induction_P Parameter: Light Value: Far-red vs. White
  misc_feature: MA Experiment 20001247 PARAMETER Experiment Name: At_Far-red-induction_P Parameter: Organism Value: A. thaliana
  misc_feature: MA Experiment 20001247 PARAMETER Experiment Name: At_Far-red-induction_P Parameter: Plant Line Value: Columbia
  misc_feature: MA Experiment 20001247 PARAMETER Experiment Name: At_Far-red-induction_P Parameter: Timepoint (hr) Value: 1
  misc_feature: MA Experiment 20001247 PARAMETER Experiment Name: At_Far-red-induction_P Parameter: Tissue Value: Whole Plant
  misc_feature: MA Experiment ID: 20001906 Result: Down-regulated in Transcription
  misc_feature: MA Experiment 20001906 PARAMETER Experiment Name: At_Drought_Reproduction_P Parameter: Age (day) Value: 35
  misc_feature: MA Experiment 20001906 PARAMETER Experiment Name: At_Drought_Reproduction_P Parameter: Organism Value: A. thaliana
  misc_feature: MA Experiment 20001906 PARAMETER Experiment Name: At_Drought_Reproduction_P Parameter: Plant Line Value: WS
  misc_feature: MA Experiment 20001906 PARAMETER Experiment Name: At_Drought_Reproduction_P Parameter: Timepoint (day) Value: 5
  misc_feature: MA Experiment 20001906 PARAMETER Experiment Name: At_Drought_Reproduction_P Parameter: Tissue Value: Siliques
  misc_feature: MA Experiment 20001906 PARAMETER Experiment Name: At_Drought_Reproduction_P Parameter: Treatment Value: Drought vs. No Drought
  misc_feature: MA Experiment ID: 20001907 Result: Down-regulated in Transcription
  misc_feature: MA Experiment 20001907 PARAMETER Experiment Name: At_Drought_Reproduction_P Parameter: Age (day) Value: 37
  misc_feature: MA Experiment 20001907 PARAMETER Experiment Name: At_Drought_Reproduction_P Parameter: Organism Value: A. thaliana
  misc_feature: MA Experiment 20001907 PARAMETER Experiment Name: At_Drought_Reproduction_P Parameter: Plant Line Value: WS
  misc_feature: MA Experiment 20001907 PARAMETER Experiment Name: At_Drought_Reproduction_P Parameter: Timepoint (day) Value: 7
  misc_feature: MA Experiment 20001907 PARAMETER Experiment Name: At_Drought_Reproduction_P Parameter: Tissue Value: Siliques
  misc_feature: MA Experiment 20001907 PARAMETER Experiment Name: At_Drought_Reproduction_P Parameter: Treatment Value: Drought vs. No Drought
  misc_feature: MA Experiment ID: 20001908 Result: Down-regulated in Transcription
  misc_feature: MA Experiment 20001908 PARAMETER Experiment Name: At_Drought_Reproduction_P Parameter: Age (day) Value: 40
  misc_feature: MA Experiment 20001908 PARAMETER Experiment Name: At_Drought_Reproduction_P Parameter: Organism Value: A. thaliana
  misc_feature: MA Experiment 20001908 PARAMETER Experiment Name: At_Drought_Reproduction_P Parameter: Plant Line Value: WS
  misc_feature: MA Experiment 20001908 PARAMETER Experiment Name: At_Drought_Reproduction_P Parameter: Timepoint (day) Value: 10
  misc_feature: MA Experiment 20001908 PARAMETER Experiment Name: At_Drought_Reproduction_P Parameter: Tissue Value: Siliques
  misc_feature: MA Experiment 20001908 PARAMETER Experiment Name: At_Drought_Reproduction_P Parameter: Treatment Value: Drought vs. No Drought
  misc_feature: MA Experiment ID: 20001911 Result: Down-regulated in Transcription
  misc_feature: MA Experiment 20001911 PARAMETER Experiment Name: At_Drought_Reproduction_P Parameter: Age (day) Value: 40
  misc_feature: MA Experiment 20001911 PARAMETER Experiment Name: At_Drought_Reproduction_P Parameter: Organism Value: A. thaliana
  misc_feature: MA Experiment 20001911 PARAMETER Experiment Name: At_Drought_Reproduction_P Parameter: Plant Line Value: WS
  misc_feature: MA Experiment 20001911 PARAMETER Experiment Name: At_Drought_Reproduction_P Parameter: Timepoint (day) Value: 10
  misc_feature: MA Experiment 20001911 PARAMETER Experiment Name: At_Drought_Reproduction_P Parameter: Tissue Value: Flowers
  misc_feature: MA Experiment 20001911 PARAMETER Experiment Name: At_Drought_Reproduction_P Parameter: Treatment Value: Drought vs. No Drought
gaacttgtaaaccttactctcgaagagtcctctgttactcatttttacattgtaaaaaaaaacttcttttcttctctacgtgaataagaatctgaagagtcattttctcaagaatgacgtggctaaaacaaatgtggtcaagcattttagtgctagccgtggtggtgatcggagccagagctgtgcccatcacgtatcttgaatctgcagtggctaaaggagctgtgtgtttggatggtagcgcgccagcataccatttcgataagggatcgggctcaggagtgaacaattggatcgttcatatggaaggaggaggatggtgcactgatatagctacatgcgttcaacgtaaaagtacaatgaagggttcttctaagcttatgaacaaagactttggtttctccggtatcttgggtggcaagcaaagcaccaatccagacttttacaattggaatagaatcaaagttcggtattgcgatggttcatctttcaccggtgatatagaagctgttgatccgacgcacaagctgttctttcgcggtgctagggtttggcgtgcggtgatcgatgatcttatggctaagggaatgagcaacgctcaaaacgctatactctccggttgttcagctggagcattggctgcgattctacattgcgaccagttcaagtccactctccctaaaacggctaaggtcaaatgtgtttctgacgctggttacttcatccacggtaaggatatcactggaggatcttacatccaatcctactacgccaaagtcgtagcgacccacggatctgcaaagagtctacctgcttcttgcacctcaagtatgaagcctgatttgtgtttcttccctcaatacgttgctaagaccttacaaacaccgcttttcgtcatcaatgccgccttcgattcttggcagatcaagaatgtattggcaccaacctctgttgataaaagcaaagcatggaagacttgtaagcttgatcttaagaagtgtacggccgctcagcttcaaaccgttcaagagaccaagtgttggctgcgttggcgcctgttcgatccgcgacgacgaacggattgttcttggactcgtgccatgctcattgccaaggtggaagcgctgccacttggtccggcgacaaaggtcccacagtcgcgaatacgaaaatggctaaggcggttggagattggttctttgagaggagtacgtttcagaacgtagattgttcatcgcttaattgcaaccctacttgccctgcagtatctactgaagactaaaatttattcattgatgtcttaaaatttattcatctttggaatattgttcttgaaatttaaaagtaaaataatataattgatacaatttcattcgaataaataaaatcctttgcccttctacaatcgtttaagctgttatatataatcaatctctcttattattgggttcgcaatttcttaaattctttttaataaagaatcaatctt

SEQ ID NO: 89629 - protein, 370 aa, Arabidopsis thaliana
  peptide (1)..(370): Ceres Seq. ID no. 12719801
  misc_feature (10)..(305): Pfam Name: Pectinacetylesterase Pfam Description: Pectinacetylesterase
  misc_feature (1)..(305): Homolog of NCBI NO: 15242357 NR Description: pectinacetylesterase, putative; protein id: supported by cDNA: 39005., supported by cDNA: gi_16323122 thaliana] >gi|10176999|dbj|BAB10249.1| pectin acetylesterase
  misc_feature (1)..(305): Homolog of NCBI NO: 21593445 NR Description: pectin acetylesterase [Arabidopsis thaliana]
  misc_feature (1)..(370): Homolog of NCBI NO: 30694729 NR Description: pectinacetylesterase, putative [Arabidopsis >gi|15810319|gb|AAL07047.1| putative pectin acetylesterase thaliana] >gi|23297554|gb|AAN12894.1| putative pectin
  misc_feature (4)..(305): Homolog of NCBI NO: 18415308 NR Description: pectinacetylesterase, putative; protein id: supported by cDNA: 34674., supported by cDNA: gi_15450901, by cDNA: gi_17978690 [Arabidopsis thaliana]
  misc_feature (5)..(305): Homolog of NCBI NO: 7488883 NR Description: pectin acetylesterase (EC 3.1.1.-) precursor - bean >gi|1431629|emb|CAA67728.1| pectinacetylesterase precursor
  misc_feature (3)..(305): Homolog of NCBI NO: 38344147 NR Description: OSJNBa0041A02.14 [Oryza sativa (japonica
  misc_feature (4)..(306): Homolog of NCBI NO: 22328797 NR Description: pectinacetylesterase family; protein id:
  misc_feature (126)..(305): Homolog of NCBI NO: 7488140 NR Description: probable pectin acetylesterase (EC 3.1.1.-) - thaliana >gi|3080371|emb|CAA18628.1| putative protein [Arabidopsis thaliana] >gi|7268736|emb|CAB78943.1|
  misc_feature (24)..(306): Homolog of NCBI NO: 15226462 NR Description: pectinacetylesterase, putative; protein id: supported by cDNA: gi_15450606 [Arabidopsis thaliana]
  misc_feature (24)..(305): Homolog of NCBI NO: 25347293 NR Description: probable pectinacetylesterase precursor T8L23.6 - Arabidopsis thaliana >gi|12321351|gb|AAG50747.1|AC079733_15
MTWLKQMWSSILVLAVVVIGARAVPITYLESAVAKGAVCLDGSAPAYHFDKGSGSGVNNWIVHMEGGGWCTDIATCVQRKSTMKGSSKLMNKDFGFSGILGGKQSTNPDFYNWNRIKVRYCDGSSFTGDIEAVDPTHKLFFRGARVWRAVIDDLMAKGMSNAQNAILSGCSAGALAAILHCDQFKSTLPKTAKVKCVSDAGYFIHGKDITGGSYIQSYYAKVVATHGSAKSLPASCTSSMKPDLCFFPQYVAKTLQTPLFVINAAFDSWQIKNVLAPTSVDKSKAWKTCKLDLKKCTAAQLQTVQETKCWLRWRLFDPRRRTDCSWTRAMLIAKVEALPLGPATKVPQSRIRKWLRRLEIGSLRGVRFRT

SEQ ID NO: 89630 - protein, 364 aa, Arabidopsis thaliana
  peptide (1)..(364): Ceres Seq. ID no. 12719802
  misc_feature (4)..(299): Pfam Name: Pectinacetylesterase Pfam Description: Pectinacetylesterase
  misc_feature (1)..(299): Homolog of NCBI NO: 15242357 NR Description: pectinacetylesterase, putative; protein id: supported by cDNA: 39005., supported by cDNA: gi_16323122 thaliana] >gi|10176999|dbj|BAB10249.1| pectin acetylesterase
  misc_feature (1)..(299): Homolog of NCBI NO: 21593445 NR Description: pectin acetylesterase [Arabidopsis thaliana]
  misc_feature (1)..(364): Homolog of NCBI NO: 30694729 NR Description: pectinacetylesterase, putative [Arabidopsis >gi|15810319|gb|AAL07047.1| putative pectin acetylesterase thaliana] >gi|23297554|gb|AAN12894.1| putative pectin
  misc_feature (1)..(299): Homolog of NCBI NO: 18415308 NR Description: pectinacetylesterase, putative; protein id: supported by cDNA: 34674., supported by cDNA: gi_15450901, by cDNA: gi_17978690 [Arabidopsis thaliana]
  misc_feature (1)..(299): Homolog of NCBI NO: 7488883 NR Description: pectin acetylesterase (EC 3.1.1.-) precursor - bean >gi|1431629|emb|CAA67728.1| pectinacetylesterase precursor
  misc_feature (1)..(299): Homolog of NCBI NO: 38344147 NR Description: OSJNBa0041A02.14 [Oryza sativa (japonica
  misc_feature (1)..(300): Homolog of NCBI NO: 22328797 NR Description: pectinacetylesterase family; protein id:
  misc_feature (120)..(299): Homolog of NCBI NO: 7488140 NR Description: probable pectin acetylesterase (EC 3.1.1.-) - thaliana >gi|3080371|emb|CAA18628.1| putative protein [Arabidopsis thaliana] >gi|7268736|emb|CAB78943.1|
  misc_feature (18)..(300): Homolog of NCBI NO: 15226462 NR Description: pectinacetylesterase, putative; protein id: supported by cDNA: gi_15450606 [Arabidopsis thaliana]
  misc_feature (18)..(299): Homolog of NCBI NO: 25347293 NR Description: probable pectinacetylesterase precursor T8L23.6 - Arabidopsis thaliana >gi|12321351|gb|AAG50747.1|AC079733_15
MWSSILVLAVVVIGARAVPITYLESAVAKGAVCLDGSAPAYHFDKGSGSGVNNWIVHMEGGGWCTDIATCVQRKSTMKGSSKLMNKDFGFSGILGGKQSTNPDFYNWNRIKVRYCDGSSFTGDIEAVDPTHKLFFRGARVWRAVIDDLMAKGMSNAQNAILSGCSAGALAAILHCDQFKSTLPKTAKVKCVSDAGYFIHGKDITGGSYIQSYYAKVVATHGSAKSLPASCTSSMKPDLCFFPQYVAKTLQTPLFVINAAFDSWQIKNVLAPTSVDKSKAWKTCKLDLKKCTAAQLQTVQETKCWLRWRLFDPRRRTDCSWTRAMLIAKVEALPLGPATKVPQSRIRKWLRRLEIGSLRGVRFRT

SEQ ID NO: 89631 - protein, 307 aa, Arabidopsis thaliana
  peptide (1)..(307): Ceres Seq. ID no. 12719803
  misc_feature (1)..(242): Pfam Name: Pectinacetylesterase Pfam Description: Pectinacetylesterase
  misc_feature (1)..(242): Homolog of NCBI NO: 15242357 NR Description: pectinacetylesterase, putative; protein id: supported by cDNA: 39005., supported by cDNA: gi_16323122 thaliana] >gi|10176999|dbj|BAB10249.1| pectin acetylesterase
  misc_feature (1)..(242): Homolog of NCBI NO: 21593445 NR Description: pectin acetylesterase [Arabidopsis thaliana]
  misc_feature (1)..(307): Homolog of NCBI NO: 30694729 NR Description: pectinacetylesterase, putative [Arabidopsis >gi|15810319|gb|AAL07047.1| putative pectin acetylesterase thaliana] >gi|23297554|gb|AAN12894.1| putative pectin
  misc_feature (1)..(242): Homolog of NCBI NO: 18415308 NR Description: pectinacetylesterase, putative; protein id: supported by cDNA: 34674., supported by cDNA: gi_15450901, by cDNA: gi_17978690 [Arabidopsis thaliana]
  misc_feature (1)..(242): Homolog of NCBI NO: 7488883 NR Description: pectin acetylesterase (EC 3.1.1.-) precursor - bean >gi|1431629|emb|CAA67728.1| pectinacetylesterase precursor
  misc_feature (1)..(242): Homolog of NCBI NO: 38344147 NR Description: OSJNBa0041A02.14 [Oryza sativa (japonica
  misc_feature (1)..(243): Homolog of NCBI NO: 22328797 NR Description: pectinacetylesterase family; protein id:
  misc_feature (63)..(242): Homolog of NCBI NO: 7488140 NR Description: probable pectin acetylesterase (EC 3.1.1.-) - thaliana >gi|3080371|emb|CAA18628.1| putative protein [Arabidopsis thaliana] >gi|7268736|emb|CAB78943.1|
  misc_feature (1)..(243): Homolog of NCBI NO: 15226462 NR Description: pectinacetylesterase, putative; protein id: supported by cDNA: gi_15450606 [Arabidopsis thaliana]
  misc_feature (1)..(242): Homolog of NCBI NO: 25347293 NR Description: probable pectinacetylesterase precursor T8L23.6 - Arabidopsis thaliana >gi|12321351|gb|AAG50747.1|AC079733_15
MEGGGWCTDIATCVQRKSTMKGSSKLMNKDFGFSGILGGKQSTNPDFYNWNRIKVRYCDGSSFTGDIEAVDPTHKLFFRGARVWRAVIDDLMAKGMSNAQNAILSGCSAGALAAILHCDQFKSTLPKTAKVKCVSDAGYFIHGKDITGGSYIQSYYAKVVATHGSAKSLPASCTSSMKPDLCFFPQYVAKTLQTPLFVINAAFDSWQIKNVLAPTSVDKSKAWKTCKLDLKKCTAAQLQTVQETKCWLRWRLFDPRRRTDCSWTRAMLIAKVEALPLGPATKVPQSRIRKWLRRLEIGSLRGVRFRT

SEQ ID NO: 89632 - DNA, 893 bp, Arabidopsis thaliana
  misc_feature (1)..(893): Ceres Seq. ID no. 12719804
  misc_feature: MA Experiment ID: 108488 Result: Down-regulated in Transcription
  misc_feature: MA Experiment ID: 108595 Result: Down-regulated in Transcription
  misc_feature: MA Experiment 108595 PARAMETER Experiment Name: At_Ler-pi_Ovule_cDNA_P Parameter: Plant Line Value: null
  misc_feature: MA Experiment ID: 20000224 Result: Down-regulated in Transcription
  misc_feature: MA Experiment ID: 20000315 Result: Down-regulated in Transcription
  misc_feature: MA Experiment 20000315 PARAMETER Experiment Name: At_14day_Shoots-Roots_Sub_P Parameter: Age (day) Value: 14
  misc_feature: MA Experiment 20000315 PARAMETER Experiment Name: At_14day_Shoots-Roots_Sub_P Parameter: Organism Value: A. thaliana
  misc_feature: MA Experiment 20000315 PARAMETER Experiment Name: At_14day_Shoots-Roots_Sub_P Parameter: Plant Line Value: WS
  misc_feature: MA Experiment 20000315 PARAMETER Experiment Name: At_14day_Shoots-Roots_Sub_P Parameter: Tissue Value: Shoots vs. Whole Plant
gactctctttctcatttccacctgaggaaaaaagctttttcgaatctcgcttgctttttgtcgccatgagtctctttgggttaggaagaaatcagaagactttccgacctaagaagagtgcaccttctggaagcaagggtgcacagcttcgaaagcatatagatgccaccctaggaagtgggaacttgagagaagctgtaagacttcctccgggagaggatgcaaatgaatggcttgctgtaaacactgtggatttctttaatcaggtgaatttgctatatggcacccttaccgagttctgcacacctgataactgtcctacaatgactgctggcccaaagtacgagtatagatgggcagatggtgtacagatcaagaagcccatcgaggtttctgctccaaagtatgtcgagtacttgatggattggatcgagacccaactcgatgatgagactttatttcctcaaaggcttggagcaccatttcctcagaacttcaaagatgtggtgaaaacgatctttaaacggctattccgagtttatgctcacatataccactctcatttccagaaaatcgttagcctaaaagaagaagctcatctcaacacttgcttcaaacacttcatcctctttactcatgaatttggactgatagacaagaaagaactcgcgcctctacaagagctcatagaatctatcatttcaccttattgagcaaaagaccatttctgttttttttttttcagattaaaaaccccaataaattaacggtaagaagttttatttttaattataaatctctcttgtttgttttcaagtttttttctttcttaaacctctgtaaaatttaaacatttactatgtaaaaaagaaatcgatcttgactagttcttt

SEQ ID NO: 89633 - protein, 236 aa, Arabidopsis thaliana; identical to SEQ ID NO: 36283
  peptide (1)..(236): Ceres Seq. ID no. 12719805
  misc_feature (50)..(234): Pfam Name: Mob1/phocein family Pfam Description: Mob1/phocein family
  misc_feature (22)..(236): Homolog of NCBI NO: 15242430 NR Description: putative protein; protein id: At5g45550.1, by cDNA: 27099., supported by cDNA: gi_15028014 [Arabidopsis
  misc_feature (22)..(236): Homolog of NCBI NO: 32470635 NR Description: putative Mob1/phocein family protein [Solanum
  misc_feature (22)..(236): Homolog of NCBI NO: 32470654 NR Description: unknown [Solanum bulbocastanum]
  misc_feature (22)..(236): Homolog of NCBI NO: 26449776 NR Description: unknown protein [Arabidopsis thaliana]
  misc_feature (30)..(236): Homolog of NCBI NO: 15234110 NR Description: putative protein; protein id: At4g19050.1
  misc_feature (22)..(233): Homolog of NCBI NO: 19309913 NR Description: Mob1-like protein [Medicago sativa subsp. falcata]
  misc_feature (29)..(234): Homolog of NCBI NO: 37534032 NR Description: putative F-box protein family [Oryza sativa
  misc_feature (44)..(233): Homolog of NCBI NO: 10800806 NR Description: hypothetical protein [Cicer arietinum]
  misc_feature (24)..(234): Homolog of NCBI NO: 28277885 NR Description: Similar to hypothetical protein LOC92597 [Danio
  misc_feature (24)..(234): Homolog of NCBI NO: 27735029 NR Description: hypothetical protein LOC92597 [Homo sapiens] RIKEN cDNA 1110003E08 [Mus musculus] >gi|23271309|gb|AAH38112.1|

SEQ ID NO: 89634 - protein, 215 aa, Arabidopsis thaliana; identical to SEQ ID NO: 36284
  peptide (1)..(215): Ceres Seq. ID no. 12719806
  misc_feature (29)..(213): Pfam Name: Mob1/phocein family Pfam Description: Mob1/phocein family
  misc_feature (1)..(215): Homolog of NCBI NO: 15242430 NR Description: putative protein; protein id: At5g45550.1, by cDNA: 27099., supported by cDNA: gi_15028014 [Arabidopsis
  misc_feature (1)..(215): Homolog of NCBI NO: 32470635 NR Description: putative Mob1/phocein family protein [Solanum
  misc_feature (1)..(215): Homolog of NCBI NO: 32470654 NR Description: unknown [Solanum bulbocastanum]
  misc_feature (1)..(215): Homolog of NCBI NO: 26449776 NR Description: unknown protein [Arabidopsis thaliana]
  misc_feature (9)..(215): Homolog of NCBI NO: 15234110 NR Description: putative protein; protein id: At4g19050.1
  misc_feature (1)..(212): Homolog of NCBI NO: 19309913 NR Description: Mob1-like protein [Medicago sativa subsp. falcata]
  misc_feature (8)..(213): Homolog of NCBI NO: 37534032 NR Description: putative F-box protein family [Oryza sativa
  misc_feature (23)..(212): Homolog of NCBI NO: 10800806 NR Description: hypothetical protein [Cicer arietinum]
  misc_feature (3)..(213): Homolog of NCBI NO: 28277885 NR Description: Similar to hypothetical protein LOC92597 [Danio
  misc_feature (3)..(213): Homolog of NCBI NO: 27735029 NR Description: hypothetical protein LOC92597 [Homo sapiens] RIKEN cDNA 1110003E08 [Mus musculus] >gi|23271309|gb|AAH38112.1|

SEQ ID NO: 89635 - protein, 129 aa, Arabidopsis thaliana; identical to SEQ ID NO: 36285
  peptide (1)..(129): Ceres Seq. ID no. 12719807
  misc_feature (1)..(127): Pfam Name: Mob1/phocein family Pfam Description: Mob1/phocein family
  misc_feature (1)..(129): Homolog of NCBI NO: 15242430 NR Description: putative protein; protein id: At5g45550.1, by cDNA: 27099., supported by cDNA: gi_15028014 [Arabidopsis
  misc_feature (1)..(129): Homolog of NCBI NO: 32470635 NR Description: putative Mob1/phocein family protein [Solanum
  misc_feature (1)..(129): Homolog of NCBI NO: 32470654 NR Description: unknown [Solanum bulbocastanum]
  misc_feature (1)..(129): Homolog of NCBI NO: 26449776 NR Description: unknown protein [Arabidopsis thaliana]
  misc_feature (1)..(129): Homolog of NCBI NO: 15234110 NR Description: putative protein; protein id: At4g19050.1
  misc_feature (1)..(126): Homolog of NCBI NO: 19309913 NR Description: Mob1-like protein [Medicago sativa subsp. falcata]
  misc_feature (1)..(127): Homolog of NCBI NO: 37534032 NR Description: putative F-box protein family [Oryza sativa
  misc_feature (1)..(126): Homolog of NCBI NO: 10800806 NR Description: hypothetical protein [Cicer arietinum]
  misc_feature (1)..(127): Homolog of NCBI NO: 28277885 NR Description: Similar to hypothetical protein LOC92597 [Danio
  misc_feature (1)..(127): Homolog of NCBI NO: 27735029 NR Description: hypothetical protein LOC92597 [Homo sapiens] RIKEN cDNA 1110003E08 [Mus musculus] >gi|23271309|gb|AAH38112.1|

SEQ ID NO: 89636 - DNA, 705 bp, Arabidopsis thaliana
  misc_feature (1)..(705): Ceres Seq. ID no. 12719816
  misc_feature: MA Experiment ID: 20000355 Result: Down-regulated in Transcription
  misc_feature: MA Experiment 20000355 PARAMETER Experiment Name: At_Siliques_Sub_P Parameter: Age (day) Value: 21
  misc_feature: MA Experiment 20000355 PARAMETER Experiment Name: At_Siliques_Sub_P Parameter: Organism Value: A. thaliana
  misc_feature: MA Experiment 20000355 PARAMETER Experiment Name: At_Siliques_Sub_P Parameter: Plant Line Value: WS
  misc_feature: MA Experiment 20000355 PARAMETER Experiment Name: At_Siliques_Sub_P Parameter: Tissue Value: Less Than 5mm Siliques vs. Whole Plant
ctcgatccctcactctctctcgcgtcagtcgttactgctgcaacaaatctgtatttgatttctccattaacaacgaatctaaatggccgctgcttttgcttccagattaacccgaggaggacgttcattgcttggaggtcttaacaatggtggttcgatgaattcttctaatggaatgatgaatgaaagtatcctctctcagcagcagcagagaaggacatttattcagatggggactgttctcaaagtcgtggacaattcaggtgcgaagaaagtgatgtgtattcaagctctaaaggggaaaaaaggagctagacttggagatactatagttgcttcagtgaaagaagcgatgccaaacggtaaagtgaagaaaggagcggttgtgtatggtgtggttgttcgtgctgcgatgcagagaggtcgtgttgatggaagtgaagttaggtttgatgataacgcggttgttcttgttgatagtaaagataagaatactaaaactgatcgccagccgattggtactagagtgtttggtcctgttcctcatgagcttcgcaagaagaaacatctcaagattcttgctttggctcaacacgttgcgtgagatgcaacaaaaccgtaaacctcgtactgtctttttttatgtaaactctagttacccgcatgttttttttttgtgtgttcttaacggaatttagaggcttc

SEQ ID NO: 89637 - protein, 173 aa, Arabidopsis thaliana
  peptide (1)..(173): Ceres Seq. ID no. 12719817
  misc_feature (48)..(173): Pfam Name: Ribosomal protein L14p/L23e Pfam Description: Ribosomal protein L14p/L23e
  misc_feature (1)..(173): Homolog of NCBI NO: 30694896 NR Description: ribosomal protein L14p family [Arabidopsis >gi|16604452|gb|AAL24232.1| AT5g46160/MCL19_22 [Arabidopsis >gi|18140860|gb|AAL60452.1|AF402993_1 HUELLENLOS PARALOG
  misc_feature (1)..(173): Homolog of NCBI NO: 30694900 NR Description: ribosomal protein L14p family [Arabidopsis
  misc_feature (1)..(173): Homolog of NCBI NO: 20260394 NR Description: unknown protein [Arabidopsis thaliana]
  misc_feature (50)..(173): Homolog of NCBI NO: 9757736 NR Description: 50S ribosomal protein L14 [Arabidopsis thaliana]
  misc_feature (1)..(172): Homolog of NCBI NO: 18140856 NR Description: HUELLENLOS-like protein [Oryza sativa]
  misc_feature (1)..(136): Homolog of NCBI NO: 8778471 NR Description: F1L3.27 [Arabidopsis thaliana]
  misc_feature (1)..(136): Homolog of NCBI NO: 15220161 NR Description: ribosomal protein, putative; protein id: supported by cDNA: 28484. [Arabidopsis thaliana]
  misc_feature (1)..(136): Homolog of NCBI NO: 18140858 NR Description: HUELLENLOS [Arabidopsis thaliana]
  misc_feature (26)..(136): Homolog of NCBI NO: 21555596 NR Description: ribosomal protein, putative [Arabidopsis thaliana]
  misc_feature (48)..(172): Homolog of NCBI NO: 15889233 NR Description: AGR_C_3539p [Agrobacterium tumefaciens] >gi|25295210|pir||B97593 hypothetical protein AGR_C_3539
MAAAFASRLTRGGRSLLGGLNNGGSMNSSNGMMNESILSQQQQRRTFIQMGTVLKVVDNSGAKKVMCIQALKGKKGARLGDTIVASVKEAMPNGKVKKGAVVYGVVVRAAMQRGRVDGSEVRFDDNAVVLVDSKDKNTKTDRQPIGTRVFGPVPHELRKKKHLKILALAQHVA

SEQ ID NO: 89638 - protein, 148 aa, Arabidopsis thaliana
  peptide (1)..(148): Ceres Seq. ID no. 12719818
  misc_feature (23)..(148): Pfam Name: Ribosomal protein L14p/L23e Pfam Description: Ribosomal protein L14p/L23e
  misc_feature (1)..(148): Homolog of NCBI NO: 30694896 NR Description: ribosomal protein L14p family [Arabidopsis >gi|16604452|gb|AAL24232.1| AT5g46160/MCL19_22 [Arabidopsis >gi|18140860|gb|AAL60452.1|AF402993_1 HUELLENLOS PARALOG
  misc_feature (1)..(148): Homolog of NCBI NO: 30694900 NR Description: ribosomal protein L14p family [Arabidopsis
  misc_feature (1)..(148): Homolog of NCBI NO: 20260394 NR Description: unknown protein [Arabidopsis thaliana]
  misc_feature (25)..(148): Homolog of NCBI NO: 9757736 NR Description: 50S ribosomal protein L14 [Arabidopsis thaliana]
  misc_feature (1)..(147): Homolog of NCBI NO: 18140856 NR Description: HUELLENLOS-like protein [Oryza sativa]
  misc_feature (1)..(111): Homolog of NCBI NO: 8778471 NR Description: F1L3.27 [Arabidopsis thaliana]
  misc_feature (1)..(111): Homolog of NCBI NO: 15220161 NR Description: ribosomal protein, putative; protein id: supported by cDNA: 28484. [Arabidopsis thaliana]
  misc_feature (1)..(111): Homolog of NCBI NO: 18140858 NR Description: HUELLENLOS [Arabidopsis thaliana]
  misc_feature (1)..(111): Homolog of NCBI NO: 21555596 NR Description: ribosomal protein, putative [Arabidopsis thaliana]
  misc_feature (23)..(147): Homolog of NCBI NO: 15889233 NR Description: AGR_C_3539p [Agrobacterium tumefaciens] >gi|25295210|pir||B97593 hypothetical protein AGR_C_3539
MNSSNGMMNESILSQQQQRRTFIQMGTVLKVVDNSGAKKVMCIQALKGKKGARLGDTIVASVKEAMPNGKVKKGAVVYGVVVRAAMQRGRVDGSEVRFDDNAVVLVDSKDKNTKTDRQPIGTRVFGPVPHELRKKKHLKILALAQHVA

SEQ ID NO: 89639 - protein, 142 aa, Arabidopsis thaliana
  peptide (1)..(142): Ceres Seq. ID no. 12719819
  misc_feature (17)..(142): Pfam Name: Ribosomal protein L14p/L23e Pfam Description: Ribosomal protein L14p/L23e
  misc_feature (1)..(142): Homolog of NCBI NO: 30694896 NR Description: ribosomal protein L14p family [Arabidopsis >gi|16604452|gb|AAL24232.1| AT5g46160/MCL19_22 [Arabidopsis >gi|18140860|gb|AAL60452.1|AF402993_1 HUELLENLOS PARALOG
  misc_feature (1)..(142): Homolog of NCBI NO: 30694900 NR Description: ribosomal protein L14p family [Arabidopsis
  misc_feature (1)..(142): Homolog of NCBI NO: 20260394 NR Description: unknown protein [Arabidopsis thaliana]
  misc_feature (19)..(142): Homolog of NCBI NO: 9757736 NR Description: 50S ribosomal protein L14 [Arabidopsis thaliana]
  misc_feature (1)..(141): Homolog of NCBI NO: 18140856 NR Description: HUELLENLOS-like protein [Oryza sativa]
  misc_feature (1)..(105): Homolog of NCBI NO: 8778471 NR Description: F1L3.27 [Arabidopsis thaliana]
  misc_feature (1)..(105): Homolog of NCBI NO: 15220161 NR Description: ribosomal protein, putative; protein id: supported by cDNA: 28484. [Arabidopsis thaliana]
  misc_feature (1)..(105): Homolog of NCBI NO: 18140858 NR Description: HUELLENLOS [Arabidopsis thaliana]
  misc_feature (1)..(105): Homolog of NCBI NO: 21555596 NR Description: ribosomal protein, putative [Arabidopsis thaliana]
  misc_feature (17)..(141): Homolog of NCBI NO: 15889233 NR Description: AGR_C_3539p [Agrobacterium tumefaciens] >gi|25295210|pir||B97593 hypothetical protein AGR_C_3539
MMNESILSQQQQRRTFIQMGTVLKVVDNSGAKKVMCIQALKGKKGARLGDTIVASVKEAMPNGKVKKGAVVYGVVVRAAMQRGRVDGSEVRFDDNAVVLVDSKDKNTKTDRQPIGTRVFGPVPHELRKKKHLKILALAQHVA

SEQ ID NO: 89640 - DNA, 853 bp, Arabidopsis thaliana
  misc_feature (1)..(853): Ceres Seq. ID no. 12719820
  misc_feature: MA Experiment ID: 108463 Result: Up-regulated in Transcription
  misc_feature: MA Experiment 108463 PARAMETER Experiment Name: At_Germinating_Seeds_cDNA_P Parameter: Age (day) Value: 3 vs. 0
  misc_feature: MA Experiment 108463 PARAMETER Experiment Name: At_Germinating_Seeds_cDNA_P Parameter: Tissue Value: Germinating Seeds
  misc_feature: MA Experiment ID: 108464 Result: Up-regulated in Transcription
  misc_feature: MA Experiment 108464 PARAMETER Experiment Name: At_Germinating_Seeds_cDNA_P Parameter: Age (day) Value: 4 vs. 0
  misc_feature: MA Experiment 108464 PARAMETER Experiment Name: At_Germinating_Seeds_cDNA_P Parameter: Tissue Value: Germinating Seeds
  misc_feature: MA Experiment ID: 108607 Result: Up-regulated in Transcription
  misc_feature: MA Experiment 108607 PARAMETER Experiment Name: At_100uM_ABA_cDNA_P Parameter: Timepoint (hr) Value: 4
  misc_feature: MA Experiment 108607 PARAMETER Experiment Name: At_100uM_ABA_cDNA_P Parameter: Tissue Value: Aerial
  misc_feature: MA Experiment 108607 PARAMETER Experiment Name: At_100uM_ABA_cDNA_P Parameter: Treatment Value: 100uM ABA vs. No Treatment
  misc_feature: MA Experiment ID: 20000113 Result: Down-regulated in Transcription
  misc_feature: MA Experiment 20000113 PARAMETER Experiment Name: At_42deg_Heat_cDNA_P Parameter: Temperature (deg C) Value: 42 vs. 22
  misc_feature: MA Experiment 20000113 PARAMETER Experiment Name: At_42deg_Heat_cDNA_P Parameter: Timepoint (hr) Value: 8
  misc_feature: MA Experiment 20000113 PARAMETER Experiment Name: At_42deg_Heat_cDNA_P Parameter: Tissue Value: Aerial
  misc_feature: MA Experiment ID: 20000173 Result: Down-regulated in Transcription
  misc_feature: MA Experiment 20000173 PARAMETER Experiment Name: At_42deg_Heat_P Parameter: Age (day) Value: 14
  misc_feature: MA Experiment 20000173 PARAMETER Experiment Name: At_42deg_Heat_P Parameter: Organism Value: A. thaliana
  misc_feature: MA Experiment 20000173 PARAMETER Experiment Name: At_42deg_Heat_P Parameter: Plant Line Value: WS
  misc_feature: MA Experiment 20000173 PARAMETER Experiment Name: At_42deg_Heat_P Parameter: Temperature (deg C) Value: 42 vs. 22
  misc_feature: MA Experiment 20000173 PARAMETER Experiment Name: At_42deg_Heat_P Parameter: Timepoint (hr) Value: 6
  misc_feature: MA Experiment 20000173 PARAMETER Experiment Name: At_42deg_Heat_P Parameter: Tissue Value: Aerial
  misc_feature: MA Experiment ID: 20000179 Result: Up-regulated in Transcription
  misc_feature: MA Experiment 20000179 PARAMETER Experiment Name: At_Germinating_Seeds_P Parameter: Age (hr) Value: 6 vs. 0
  misc_feature: MA Experiment 20000179 PARAMETER Experiment Name: At_Germinating_Seeds_P Parameter: Tissue Value: Germinating Seeds
  misc_feature: MA Experiment ID: 20000180 Result: Up-regulated in Transcription
  misc_feature: MA Experiment 20000180 PARAMETER Experiment Name: At_Germinating_Seeds_P Parameter: Age (hr) Value: 24 vs. 0
  misc_feature: MA Experiment 20000180 PARAMETER Experiment Name: At_Germinating_Seeds_P Parameter: Tissue Value: Germinating Seeds
  misc_feature: MA Experiment ID: 20000184 Result: Down-regulated in Transcription
  misc_feature: MA Experiment 20000184 PARAMETER Experiment Name: At_Shoots__P Parameter: Age (day) Value: 7
  misc_feature: MA Experiment 20000184 PARAMETER Experiment Name: At_Shoots__P Parameter: Tissue Value: Shoots vs. Whole Plant
  misc_feature: MA Experiment ID: 20000224 Result: Up-regulated in Transcription
  misc_feature: MA Experiment ID: 20000264 Result: Up-regulated in Transcription
  misc_feature: MA Experiment 20000264 PARAMETER Experiment Name: At_Open_Flower_P Parameter: Age (day) Value: 21
  misc_feature: MA Experiment 20000264 PARAMETER Experiment Name: At_Open_Flower_P Parameter: Plant Line Value: WS
  misc_feature: MA Experiment 20000264 PARAMETER Experiment Name: At_Open_Flower_P Parameter: Tissue Value: Open Flower vs. Whole Plant
  misc_feature: MA Experiment ID: 20000286 Result: Up-regulated in Transcription
  misc_feature: MA Experiment 20000286 PARAMETER Experiment Name: At_Open_Flower_P Parameter: Age (day) Value: 21
  misc_feature: MA Experiment 20000286 PARAMETER Experiment Name: At_Open_Flower_P Parameter: Plant Line Value: WS
  misc_feature: MA Experiment 20000286 PARAMETER Experiment Name: At_Open_Flower_P Parameter: Tissue Value: Half Open vs. Whole Plant
  misc_feature: MA Experiment ID: 20000573 Result: Down-regulated in Transcription
  misc_feature: MA Experiment 20000573 PARAMETER Experiment Name: At_100uM_ABA_Mutants__P Parameter: Organism Value: A. thaliana
  misc_feature: MA Experiment 20000573 PARAMETER Experiment Name: At_100uM_ABA_Mutants__P Parameter: Plant Line Value: CS22 vs. Ler wt
  misc_feature: MA Experiment 20000573 PARAMETER Experiment Name: At_100uM_ABA_Mutants__P Parameter: Timepoint (hr) Value: N/A
  misc_feature: MA Experiment 20000573 PARAMETER Experiment Name: At_100uM_ABA_Mutants__P Parameter: Tissue Value: Whole Plant
  misc_feature: MA Experiment 20000573 PARAMETER Experiment Name: At_100uM_ABA_Mutants__P Parameter: Treatment Value: None
  misc_feature: MA Experiment ID: 20000574 Result: Down-regulated in Transcription
  misc_feature: MA Experiment 20000574 PARAMETER Experiment Name: At_100uM_ABA_Mutants__P Parameter: Organism Value: A. thaliana
  misc_feature: MA Experiment 20000574 PARAMETER Experiment Name: At_100uM_ABA_Mutants__P Parameter: Plant Line Value: CS23 vs. Ler wt
  misc_feature: MA Experiment 20000574 PARAMETER Experiment Name: At_100uM_ABA_Mutants__P Parameter: Timepoint (hr) Value: N/A
  misc_feature: MA Experiment 20000574 PARAMETER Experiment Name: At_100uM_ABA_Mutants__P Parameter: Tissue Value: Whole Plant
  misc_feature: MA Experiment 20000574 PARAMETER Experiment Name: At_100uM_ABA_Mutants__P Parameter: Treatment Value: None
  misc_feature: MA Experiment ID: 20000794 Result: Up-regulated in Transcription
  misc_feature: MA Experiment 20000794 PARAMETER Experiment Name: At_Petals_P Parameter: Age (day) Value: 23-25 days
  misc_feature: MA Experiment 20000794 PARAMETER Experiment Name: At_Petals_P Parameter: Plant Line Value: WS
  misc_feature: MA Experiment 20000794 PARAMETER Experiment Name: At_Petals_P Parameter: Tissue Value: Petals vs. Whole plant
  misc_feature: MA Experiment ID: 20001911 Result: Down-regulated in Transcription
  misc_feature: MA Experiment 20001911 PARAMETER Experiment Name: At_Drought_Reproduction_P Parameter: Age (day) Value: 40
  misc_feature: MA Experiment 20001911 PARAMETER Experiment Name: At_Drought_Reproduction_P Parameter: Organism Value: A. thaliana
  misc_feature: MA Experiment 20001911 PARAMETER Experiment Name: At_Drought_Reproduction_P Parameter: Plant Line Value: WS
  misc_feature: MA Experiment 20001911 PARAMETER Experiment Name: At_Drought_Reproduction_P Parameter: Timepoint (day) Value: 10
  misc_feature: MA Experiment 20001911 PARAMETER Experiment Name: At_Drought_Reproduction_P Parameter: Tissue Value: Flowers
  misc_feature: MA Experiment 20001911 PARAMETER Experiment Name: At_Drought_Reproduction_P Parameter: Treatment Value: Drought vs. No Drought
atggatctgttactaaaacaaagtcgctttattcagatctgaagaagaagaagaagaagaaacatagttgaagtctctgttaatatgtcttcaacaacaacagattctacagaattgcaaaatctgatcaaactgtttcaaaattgccaaactcatcctcgtcaacattttcctgcaaaatcttcagctgtattagtttgtctataccaagaacaaagagaagacaaaaacgagctacgcgtaatcttaaccaaacgatctactactctctcttctcatcctggggaagtagcattgcctggaggaaaaagagaccaagaagataaagatgatatagctactgcgttgagagaagctcgtgaagaaatcggtttagatccttctcttgttacaatcatttctgttcttgaaccatttgttaacaagaagggaatgtcggtagcaccagttatcggttttctacacgataagaaagcgtttaaacagttaccaaatccagctgaagtggaagagatctttgatgtgccattagagatgttcctcaaggacagaaacaggcgagcagaggaacgagagcatgaaggagagagatatcttcttcaatactttgattactattccgaagataaagagagaagctttatcatatgggcactcactgctggtattctgatcagagttgcctccattgtttatcagagattaccggagtttcaagaacgtaaaccgagtttctggaatcagcctaactgattcttgacttgatctgattgagaaaattgaaacttttatgtataataagcgatacagattgaatcttctttaaatgtgtttcaagaatctatctttactc

SEQ ID NO: 89641 - protein, 222 aa, Arabidopsis thaliana; identical to SEQ ID NO: 74452
  peptide (1)..(222): Ceres Seq. ID no. 12719821
  misc_feature (32)..(170): Pfam Name: NUDIX domain Pfam Description: NUDIX domain
  misc_feature (1)..(222): Homolog of NCBI NO: 15242543 NR Description: putative protein; protein id: At5g45940.1, by cDNA: 141753. [Arabidopsis thaliana] gb|AAF24540.1~gene_id:K15I22.14~similar to unknown protein
  misc_feature (1)..(222): Homolog of NCBI NO: 21553389 NR Description: unknown [Arabidopsis thaliana]
  misc_feature (29)..(217): Homolog of NCBI NO: 18396900 NR Description: Expressed protein; protein id: At1g28960.1,
  misc_feature (29)..(217): Homolog of NCBI NO: 30690557 NR Description: MutT/nudix family protein [Arabidopsis thaliana]
  misc_feature (29)..(217): Homolog of NCBI NO: 26450576 NR Description: unknown protein [Arabidopsis thaliana]
  misc_feature (29)..(217): Homolog of NCBI NO: 10764850 NR Description: F1K23.5 [Arabidopsis thaliana]
  misc_feature (29)..(216): Homolog of NCBI NO: 18403412 NR Description: expressed protein; protein id: At2g33980.1, by cDNA: gi_13430755, supported by cDNA: gi_15293224 [Arabidopsis >gi|13430756|gb|AAK26000.1|AF360290_1 unknown protein
  misc_feature (29)..(221): Homolog of NCBI NO: 40253324 NR Description: putative phosphohydrolase [Oryza sativa (japonica group)] >gi|40253358|dbj|BAD05290.1| putative phosphohydrolase
  misc_feature (27)..(204): Homolog of NCBI NO: 23470438 NR Description: hypothetical protein [Pseudomonas syringae pv.
  misc_feature (28)..(211): Homolog of NCBI NO: 18859595 NR Description: nudix (nucleoside diphosphate linked moiety motif 7; RIKEN cDNA 1300007B24 gene; RIKEN cDNA 2210404C19 gene; A diphosphatase [Mus musculus]

SEQ ID NO: 89642 - DNA, 900 bp, Arabidopsis thaliana
  misc_feature (1)..(900): Ceres Seq. ID no. 12719830
  misc_feature: MA Experiment ID: 20000173 Result: Up-regulated in Transcription
  misc_feature: MA Experiment 20000173 PARAMETER Experiment Name: At_42deg_Heat_P Parameter: Age (day) Value: 14
  misc_feature: MA Experiment 20000173 PARAMETER Experiment Name: At_42deg_Heat_P Parameter: Organism Value: A. thaliana
  misc_feature: MA Experiment 20000173 PARAMETER Experiment Name: At_42deg_Heat_P Parameter: Plant Line Value: WS
  misc_feature: MA Experiment 20000173 PARAMETER Experiment Name: At_42deg_Heat_P Parameter: Temperature (deg C) Value: 42 vs. 22
  misc_feature: MA Experiment 20000173 PARAMETER Experiment Name: At_42deg_Heat_P Parameter: Timepoint (hr) Value: 6
  misc_feature: MA Experiment 20000173 PARAMETER Experiment Name: At_42deg_Heat_P Parameter: Tissue Value: Aerial
  misc_feature: MA Experiment ID: 20000182 Result: Up-regulated in Transcription
  misc_feature: MA Experiment 20000182 PARAMETER Experiment Name: At_2mM_SA_P Parameter: Age (day) Value: 14
  misc_feature: MA Experiment 20000182 PARAMETER Experiment Name: At_2mM_SA_P Parameter: Organism Value: A. thaliana
  misc_feature: MA Experiment 20000182 PARAMETER Experiment Name: At_2mM_SA_P Parameter: Plant Line Value: WS
  misc_feature: MA Experiment 20000182 PARAMETER Experiment Name: At_2mM_SA_P Parameter: Timepoint (hr) Value: 6
  misc_feature: MA Experiment 20000182 PARAMETER Experiment Name: At_2mM_SA_P Parameter: Tissue Value: Aerial
  misc_feature: MA Experiment 20000182 PARAMETER Experiment Name: At_2mM_SA_P Parameter: Treatment Value: 2mM SA vs. No Treatment
  misc_feature: MA Experiment ID: 20000184 Result: Down-regulated in Transcription
  misc_feature: MA Experiment 20000184 PARAMETER Experiment Name: At_Shoots__P Parameter: Age (day) Value: 7
  misc_feature: MA Experiment 20000184 PARAMETER Experiment Name: At_Shoots__P Parameter: Tissue Value: Shoots vs. Whole Plant
  misc_feature: MA Experiment ID: 20000234 Result: Down-regulated in Transcription
  misc_feature: MA Experiment 20000234 PARAMETER Experiment Name: At_Siliques_P Parameter: Age (day) Value: 21
  misc_feature: MA Experiment 20000234 PARAMETER Experiment Name: At_Siliques_P Parameter: Organism Value: A. thaliana
  misc_feature: MA Experiment 20000234 PARAMETER Experiment Name: At_Siliques_P Parameter: Plant Line Value: WS
  misc_feature: MA Experiment 20000234 PARAMETER Experiment Name: At_Siliques_P Parameter: Tissue Value: Less Than 5mm Siliques vs. Whole Plant
  misc_feature: MA Experiment ID: 20000264 Result: Down-regulated in Transcription
  misc_feature: MA Experiment 20000264 PARAMETER Experiment Name: At_Open_Flower_P Parameter: Age (day) Value: 21
  misc_feature: MA Experiment 20000264 PARAMETER Experiment Name: At_Open_Flower_P Parameter: Plant Line Value: WS
  misc_feature: MA Experiment 20000264 PARAMETER Experiment Name: At_Open_Flower_P Parameter: Tissue Value: Open Flower vs. Whole Plant
  misc_feature: MA Experiment ID: 20000265 Result: Down-regulated in Transcription
  misc_feature: MA Experiment 20000265 PARAMETER Experiment Name: At_Open_Flower_P Parameter: Age (day) Value: 21
  misc_feature: MA Experiment 20000265 PARAMETER Experiment Name: At_Open_Flower_P Parameter: Plant Line Value: WS
  misc_feature: MA Experiment 20000265 PARAMETER Experiment Name: At_Open_Flower_P Parameter: Tissue Value: Closed Flower vs. Whole Plant
  misc_feature: MA Experiment ID: 20000286 Result: Down-regulated in Transcription
  misc_feature: MA Experiment 20000286 PARAMETER Experiment Name: At_Open_Flower_P Parameter: Age (day) Value: 21
  misc_feature: MA Experiment 20000286 PARAMETER Experiment Name: At_Open_Flower_P Parameter: Plant Line Value: WS
  misc_feature: MA Experiment 20000286 PARAMETER Experiment Name: At_Open_Flower_P Parameter: Tissue Value: Half Open vs. Whole Plant
  misc_feature: MA Experiment ID: 20001558 Result: Down-regulated in Transcription
  misc_feature: MA Experiment 20001558 PARAMETER Experiment Name: At_Drought_Soil_Dry_P Parameter: Age (day) Value: 27
  misc_feature: MA Experiment 20001558 PARAMETER Experiment Name: At_Drought_Soil_Dry_P Parameter: Organism Value: A. thaliana
  misc_feature: MA Experiment 20001558 PARAMETER Experiment Name: At_Drought_Soil_Dry_P Parameter: Plant Line Value: WS
  misc_feature: MA Experiment 20001558 PARAMETER Experiment Name: At_Drought_Soil_Dry_P Parameter: Post Timepoint (hr) Value: 6
  misc_feature: MA Experiment 20001558 PARAMETER Experiment Name: At_Drought_Soil_Dry_P Parameter: Post-Treatment Value: Re-Water vs. No Drought
  misc_feature: MA Experiment 20001558 PARAMETER Experiment Name: At_Drought_Soil_Dry_P Parameter: Timepoint (day) Value: 13
  misc_feature: MA Experiment 20001558 PARAMETER Experiment Name: At_Drought_Soil_Dry_P Parameter: Treatment Value: Drought vs. No Drought
gttgttagcgctgatgagaagaaggtgaagcggctgagtcctcttcctgagatcagagatccaaagattttcactgttttggtagaaaatttgccagaggatcattcaaatgagaatattcgagagatatttggtaaagctggaagtattaaaagtgtatccatatgtgatccaaatgctgttgaagaatcagagaagggtgggaagaaggaaaatttcatcagaaccagattacatgcctttgtggagtatgaaacggtggaggcagctgaaaaagcggcagctacattgaataatgagcaagactggagaaatgggttgcgagttaagcttcttgaacaagcagcaggaaagtttgcacagagaagaccagctcggagggaagtcgataaagaaaaggacactacaggcagagttcatgatcaaactggaggagagaaaaacaaaaagacgcgtgaacatcaaaatcaccgtctccatcattctgataatcctgctgatgatgacggtggcaatcatcagaaggataaaaatggaaacaaaggcagagttgtaggacaaggaagacgacagaatcatcaaggcggcaacggacatggaacagcttcatcatcttctcatcctaattatcatcctgttgaggtctcaaagcgtccacctggcccgagaatgcctgatgggacgagagggttcacaatggggcgtggtaaagcgattcctcctcccacatctactcaaaccagtcatgaagtttgatcggttccgcatcttcggttgtatcattgtgtggttttatttcacattaaaaaatgtgaaacttgtatgtaattagaattgagatgttgttttggatttgggtttccttttggcatattcaagtcctccaaatcttcactttgg

SEQ ID NO: 89643 - protein, 251 aa, Arabidopsis thaliana
  peptide (1)..(251): Ceres Seq. ID no. 12719831
  misc_feature (26)..(111): Pfam Name: RNA recognition motif. (a.k.a. RRM, RBD, or RNP domain) Pfam Description: RNA recognition motif. (a.k.a. RRM, RBD, or RNP
  misc_feature (1)..(251): Homolog of NCBI NO: 30694926 NR Description: RNA recognition motif (RRM)-containing protein
  misc_feature (1)..(251): Homolog of NCBI NO: 10177706 NR Description: contains similarity to RNA-binding
  misc_feature (1)..(251): Homolog of NCBI NO: 30694922 NR Description: RNA recognition motif (RRM)-containing protein thaliana] >gi|15215748|gb|AAK91419.1| AT5g46250/MPL12_3 thaliana] >gi|23308375|gb|AAN18157.1| At5g46250/MPL12_3
  misc_feature (1)..(237): Homolog of NCBI NO: 15230287 NR Description: RNA-binding protein, putative; protein id:
  misc_feature (1)..(239): Homolog of NCBI NO: 34394175 NR Description: putative RNA-binding protein homolog [Oryza
  misc_feature (1)..(238): Homolog of NCBI NO: 34909652 NR Description: RNA-binding protein-like [Oryza sativa (japonica
  misc_feature (2)..(241): Homolog of NCBI NO: 15724224 NR Description: At2g43970/F6E13.10 [Arabidopsis thaliana]
  misc_feature (2)..(241): Homolog of NCBI NO: 18406414 NR Description: VirF-interacting protein FIP1; protein id: supported by cDNA: gi_12744918, supported by cDNA: gi_14030638,
  misc_feature (1)..(130): Homolog of NCBI NO: 6449448 NR Description: RNA-binding protein homolog [Brassica napus]
  misc_feature (1)..(124): Homolog of NCBI NO: 34896588 NR Description: putative RNA-binding protein [Oryza sativa]
VVSADEKKVKRLSPLPEIRDPKIFTVLVENLPEDHSNENIREIFGKAGSIKSVSICDPNAVEESEKGGKKENFIRTRLHAFVEYETVEAAEKAAATLNNEQDWRNGLRVKLLEQAAGKFAQRRPARREVDKEKDTTGRVHDQTGGEKNKKTREHQNHRLHHSDNPADDDGGNHQKDKNGNKGRVVGQGRRQNHQGGNGHGTASSSSHPNYHPVEVSKRPPGPRMPDGTRGFTMGRGKAIPPPTSTQTSHEV

SEQ ID NO: 89644 - DNA, 1469 bp, Arabidopsis thaliana
  misc_feature (1)..(1469): Ceres Seq. ID no. 12719838
  misc_feature: MA Experiment ID: 108433 Result: Down-regulated in Transcription
  misc_feature: MA Experiment 108433 PARAMETER Experiment Name: At_rhl_Mutant2_cDNA_P Parameter: Age (day) Value: 7
  misc_feature: MA Experiment 108433 PARAMETER Experiment Name: At_rhl_Mutant2_cDNA_P Parameter: Organism Value: A. thaliana
  misc_feature: MA Experiment 108433 PARAMETER Experiment Name: At_rhl_Mutant2_cDNA_P Parameter: Plant Line Value: rhl Mutant vs. wt landsburg
  misc_feature: MA Experiment 108433 PARAMETER Experiment Name: At_rhl_Mutant2_cDNA_P Parameter: Tissue Value: Roots
  misc_feature: MA Experiment ID: 20000315 Result: Down-regulated in Transcription
  misc_feature: MA Experiment 20000315 PARAMETER Experiment Name: At_14day_Shoots-Roots_Sub_P Parameter: Age (day) Value: 14
  misc_feature: MA Experiment 20000315 PARAMETER Experiment Name: At_14day_Shoots-Roots_Sub_P Parameter: Organism Value: A. thaliana
  misc_feature: MA Experiment 20000315 PARAMETER Experiment Name: At_14day_Shoots-Roots_Sub_P Parameter: Plant Line Value: WS
  misc_feature: MA Experiment 20000315 PARAMETER Experiment Name: At_14day_Shoots-Roots_Sub_P Parameter: Tissue Value: Shoots vs. Whole Plant
  misc_feature: MA Experiment ID: 20000328 Result: Down-regulated in Transcription
  misc_feature: MA Experiment 20000328 PARAMETER Experiment Name: At_42deg_Heat_Sub_P Parameter: Age (day) Value: 14
  misc_feature: MA Experiment 20000328 PARAMETER Experiment Name: At_42deg_Heat_Sub_P Parameter: Organism Value: A. thaliana
  misc_feature: MA Experiment 20000328 PARAMETER Experiment Name: At_42deg_Heat_Sub_P Parameter: Plant Line Value: WS
  misc_feature: MA Experiment 20000328 PARAMETER Experiment Name: At_42deg_Heat_Sub_P Parameter: Temperature (deg C) Value: 42 vs. 22
  misc_feature: MA Experiment 20000328 PARAMETER Experiment Name: At_42deg_Heat_Sub_P Parameter: Timepoint (hr) Value: 6
  misc_feature: MA Experiment 20000328 PARAMETER Experiment Name: At_42deg_Heat_Sub_P Parameter: Tissue Value: Aerial
aatttctgctttgaagaagaagagtcgatccataatcgccactttcagatttccagattctggggaaacatctctaaactcttcaacgatggcgactgagaatctcaccgataagaatgttgttttcagaaagctgaaatcaaaatccgagaacaaggtttgctttgattgtagtgcgaagaatccaacatgggcttctgttccttatgggatcttcctatgcatcgattgttctgctgttcatcgaagtctaggtgttcatatcagcttcgtcaggtcaacgaacttagactcgtggagtcctgagcagctaagaacaatgatgtttggagggaacaatcgagctcaggtgttttttaagcaacatggatggaatgatggtggtaagattgaggctaagtatacttcaagagctgctgatatgtatagacagactcttgctaaagaagttgctaaagccatggctgaagaaactgttttaccgtcgttatcctctgttgctacttctcagccagtggaatcatctgaaaatgggtttacttctgaatctccgaaagagagttctttgaagcaagaagcagctgttgtctcttcaccaaaagcttctcagaaagttgttgctagtacgtttaagaaacctcttgtttcgcgaaagtctgggaagactggtggtcttggtgctcgtaagcttactactaagtcaaaggataacctctatgagcagaagcctgaagaacctgtacctgtgattcctgctgcttctccaaccaatgacacatcagcagctggatcatcatttgcctctcgatttgagtactttgatgatgagcaatctggtgggcaaagtggcacacgggtgcttagccatgttgctccaccaaagtcatcaaatttctttaatgaatttggaatggacagtgctttccccaagaagtcaagctcaagctcatccaaagctcaggttgaagaaacagatgaagcaagaaagaagttttcaaacgccaaatcgatttcctctgcccaatttttcggaaatcagaacagagatgccgatcttgactcaaaagctacccttcagaagttctcgggttcagcagctatttcaagttctgatctttttggccacggaccagatgattccaacatcgatatcactgcaagcgatctcatcaaccgaatttctttccaggcgcagcaagatatgtcatctattgctaacttagctgaggaaacaaagaataagctgggaacatttgcctctagtatattcagtgatcttcaggatagaatgctgtaagaaacatacaaaggatcttgtcttttgatttacagagaacaaattgttggatataaatgtcatttttatttttggtttgactttgtagttgaaagagtgatttttgaggtaaattgttaaatgtggaatttgataatttgatgtggatatggtagaatatgttacagtatta

SEQ ID NO: 89645 - protein, 431 aa, Arabidopsis thaliana
  peptide (1)..(431): Ceres Seq. ID no. 12719839
  misc_feature (39)..(155): Pfam Name: Putative GTPase activating protein for Arf Pfam Description: Putative GTPase activating protein for Arf
  misc_feature (30)..(431): Homolog of NCBI NO: 15237500 NR Description: zinc finger protein Glo3-like; protein id:
  misc_feature (28)..(431): Homolog of NCBI NO: 7487780 NR Description: hypothetical protein T6K21.70 - Arabidopsis >gi|2894598|emb|CAA17132.1| putative protein [Arabidopsis >gi|7268541|emb|CAB78791.1| putative protein [Arabidopsis
  misc_feature (28)..(431): Homolog of NCBI NO: 18414983 NR Description: Expressed protein; protein id: At4g17890.1 thaliana] >gi|24030421|gb|AAN41368.1| unknown protein
  misc_feature (28)..(431): Homolog of NCBI NO: 13430530 NR Description: unknown protein [Arabidopsis thaliana]
  misc_feature (30)..(431): Homolog of NCBI NO: 37537094 NR Description: unknown protein [Oryza sativa (japonica
  misc_feature (30)..(423): Homolog of NCBI NO: 18403775 NR Description: expressed protein; protein id: At2g35210.1, by cDNA: 159093. [Arabidopsis thaliana] >gi|25408361|pir||H84765
  misc_feature (30)..(431): Homolog of NCBI NO: 29126345 NR Description: putative zinc finger protein [Oryza sativa
  misc_feature (180)..(429): Homolog of NCBI NO: 37362182 NR Description: ADP-ribosylation factor GTPase activating protein
  misc_feature (39)..(183): Homolog of NCBI NO: 37362182 NR Description: ADP-ribosylation factor GTPase activating protein
  misc_feature (217)..(429): Homolog of NCBI NO: 14042190 NR Description: unnamed protein product [Homo sapiens]
ISALKKKSRSIIATFRFPDSGETSLNSSTMATENLTDKNVVFRKLKSKSENKVCFDCSAKNPTWASVPYGIFLCIDCSAVHRSLGVHISFVRSTNLDSWSPEQLRTMMFGGNNRAQVFFKQHGWNDGGKIEAKYTSRAADMYRQTLAKEVAKAMAEETVLPSLSSVATSQPVESSENGFTSESPKESSLKQEAAVVSSPKASQKVVASTFKKPLVSRKSGKTGGLGARKLTTKSKDNLYEQKPEEPVPVIPAASPTNDTSAAGSSFASRFEYFDDEQSGGQSGTRVLSHVAPPKSSNFFNEFGMDSAFPKKSSSSSSKAQVEETDEARKKFSNAKSISSAQFFGNQNRDADLDSKATLQKFSGSAAISSSDLFGHGPDDSNIDITASDLINRISFQAQQDMSSIANLAEETKNKLGTFASSIFSDLQDRML

SEQ ID NO: 89646 - protein, 402 aa, Arabidopsis thaliana; identical to SEQ ID NO: 78261
  peptide (1)..(402): Ceres Seq. ID no. 12719840
  misc_feature (10)..(126): Pfam Name: Putative GTPase activating protein for Arf Pfam Description: Putative GTPase activating protein for Arf
  misc_feature (1)..(402): Homolog of NCBI NO: 15237500 NR Description: zinc finger protein Glo3-like; protein id:
  misc_feature (1)..(402): Homolog of NCBI NO: 7487780 NR Description: hypothetical protein T6K21.70 - Arabidopsis >gi|2894598|emb|CAA17132.1| putative protein [Arabidopsis >gi|7268541|emb|CAB78791.1| putative protein [Arabidopsis
  misc_feature (1)..(402): Homolog of NCBI NO: 18414983 NR Description: Expressed protein; protein id: At4g17890.1 thaliana] >gi|24030421|gb|AAN41368.1| unknown protein
  misc_feature (1)..(402): Homolog of NCBI NO: 13430530 NR Description: unknown protein [Arabidopsis thaliana]
  misc_feature (1)..(402): Homolog of NCBI NO: 37537094 NR Description: unknown protein [Oryza sativa (japonica
  misc_feature (1)..(394): Homolog of NCBI NO: 18403775 NR Description: expressed protein; protein id: At2g35210.1, by cDNA: 159093. [Arabidopsis thaliana] >gi|25408361|pir||H84765
  misc_feature (1)..(402): Homolog of NCBI NO: 29126345 NR Description: putative zinc finger protein [Oryza sativa
  misc_feature (151)..(400): Homolog of NCBI NO: 37362182 NR Description: ADP-ribosylation factor GTPase activating protein
  misc_feature (10)..(154): Homolog of NCBI NO: 37362182 NR Description: ADP-ribosylation factor GTPase activating protein
  misc_feature (188)..(400): Homolog of NCBI NO: 14042190 NR Description: unnamed protein product [Homo sapiens]

SEQ ID NO: 89647 - protein, 325 aa, Arabidopsis thaliana; identical to SEQ ID NO: 78262
  peptide (1)..(325): Ceres Seq. ID no. 12719841
  misc_feature (1)..(325): Homolog of NCBI NO: 15237500 NR Description: zinc finger protein Glo3-like; protein id:
  misc_feature (1)..(325): Homolog of NCBI NO: 7487780 NR Description: hypothetical protein T6K21.70 - Arabidopsis >gi|2894598|emb|CAA17132.1| putative protein [Arabidopsis >gi|7268541|emb|CAB78791.1| putative protein [Arabidopsis
  misc_feature (1)..(325): Homolog of NCBI NO: 18414983 NR Description: Expressed protein; protein id: At4g17890.1 thaliana] >gi|24030421|gb|AAN41368.1| unknown protein
  misc_feature (1)..(325): Homolog of NCBI NO: 13430530 NR Description: unknown protein [Arabidopsis thaliana]
  misc_feature (1)..(325): Homolog of NCBI NO: 37537094 NR Description: unknown protein [Oryza sativa (japonica
  misc_feature (1)..(317): Homolog of NCBI NO: 18403775 NR Description: expressed protein; protein id: At2g35210.1, by cDNA: 159093. [Arabidopsis thaliana] >gi|25408361|pir||H84765
  misc_feature (1)..(325): Homolog of NCBI NO: 29126345 NR Description: putative zinc finger protein [Oryza sativa
  misc_feature (74)..(323): Homolog of NCBI NO: 37362182 NR Description: ADP-ribosylation factor GTPase activating protein
  misc_feature (1)..(77): Homolog of NCBI NO: 37362182 NR Description: ADP-ribosylation factor GTPase activating protein
  misc_feature (111)..(323): Homolog of NCBI NO: 14042190 NR Description: unnamed protein product [Homo sapiens]

SEQ ID NO: 89648 - DNA, 1686 bp, Arabidopsis thaliana
  misc_feature (1)..(1686): Ceres Seq. ID no. 12719842
  misc_feature: MA Experiment ID: 20000173 Result: Down-regulated in Transcription
  misc_feature: MA Experiment 20000173 PARAMETER Experiment Name: At_42deg_Heat_P Parameter: Age (day) Value: 14
  misc_feature: MA Experiment 20000173 PARAMETER Experiment Name: At_42deg_Heat_P Parameter: Organism Value: A. thaliana
  misc_feature: MA Experiment 20000173 PARAMETER Experiment Name: At_42deg_Heat_P Parameter: Plant Line Value: WS
  misc_feature: MA Experiment 20000173 PARAMETER Experiment Name: At_42deg_Heat_P Parameter: Temperature (deg C) Value: 42 vs. 22
  misc_feature: MA Experiment 20000173 PARAMETER Experiment Name: At_42deg_Heat_P Parameter: Timepoint (hr) Value: 6
  misc_feature: MA Experiment 20000173 PARAMETER Experiment Name: At_42deg_Heat_P Parameter: Tissue Value: Aerial
  misc_feature: MA Experiment ID: 20000184 Result: Down-regulated in Transcription
  misc_feature: MA Experiment 20000184 PARAMETER Experiment Name: At_Shoots__P Parameter: Age (day) Value: 7
  misc_feature: MA Experiment 20000184 PARAMETER Experiment Name: At_Shoots__P Parameter: Tissue Value: Shoots vs. Whole Plant
  misc_feature: MA Experiment ID: 20000234 Result: Down-regulated in Transcription
  misc_feature: MA Experiment 20000234 PARAMETER Experiment Name: At_Siliques_P Parameter: Age (day) Value: 21
  misc_feature: MA Experiment 20000234 PARAMETER Experiment Name: At_Siliques_P Parameter: Organism Value: A. thaliana
  misc_feature: MA Experiment 20000234 PARAMETER Experiment Name: At_Siliques_P Parameter: Plant Line Value: WS
  misc_feature: MA Experiment 20000234 PARAMETER Experiment Name: At_Siliques_P Parameter: Tissue Value: Less Than 5mm Siliques vs. Whole Plant
  misc_feature: MA Experiment ID: 20000264 Result: Down-regulated in Transcription
  misc_feature: MA Experiment 20000264 PARAMETER Experiment Name: At_Open_Flower_P Parameter: Age (day) Value: 21
  misc_feature: MA Experiment 20000264 PARAMETER Experiment Name: At_Open_Flower_P Parameter: Plant Line Value: WS
  misc_feature: MA Experiment 20000264 PARAMETER Experiment Name: At_Open_Flower_P Parameter: Tissue Value: Open Flower vs. Whole Plant
  misc_feature: MA Experiment ID: 20000495 Result: Down-regulated in Transcription
  misc_feature: MA Experiment 20000495 PARAMETER Experiment Name: At_Guard_Cells_P Parameter: Harvest Date Value: 8/2/2002
  misc_feature: MA Experiment 20000495 PARAMETER Experiment Name: At_Guard_Cells_P Parameter: Organism Value: A. thaliana
  misc_feature: MA Experiment 20000495 PARAMETER Experiment Name: At_Guard_Cells_P Parameter: Tissue Value: Guard Cells vs. Leaves
  misc_feature: MA Experiment ID: 20000496 Result: Down-regulated in Transcription
  misc_feature: MA Experiment 20000496 PARAMETER Experiment Name: At_Guard_Cells_P Parameter: Harvest Date Value: 7/19/2002
  misc_feature: MA Experiment 20000496 PARAMETER Experiment Name: At_Guard_Cells_P Parameter: Organism Value: Canola
  misc_feature: MA Experiment 20000496 PARAMETER Experiment Name: At_Guard_Cells_P Parameter: Tissue Value: Guard Cells vs. Leaves
  misc_feature: MA Experiment ID: 20001451 Result: Down-regulated in Transcription
  misc_feature: MA Experiment 20001451 PARAMETER Experiment Name: At_Far-red-induction_P Parameter: Age (day) Value: 7
  misc_feature: MA Experiment 20001451 PARAMETER Experiment Name: At_Far-red-induction_P Parameter: Light Value: Far-red vs. White
  misc_feature: MA Experiment 20001451 PARAMETER Experiment Name: At_Far-red-induction_P Parameter: Organism Value: A. thaliana
  misc_feature: MA Experiment 20001451 PARAMETER Experiment Name: At_Far-red-induction_P Parameter: Plant Line Value: Columbia
  misc_feature: MA Experiment 20001451 PARAMETER Experiment Name: At_Far-red-induction_P Parameter: Timepoint (hr) Value: 24
  misc_feature: MA Experiment 20001451 PARAMETER Experiment Name: At_Far-red-induction_P Parameter: Tissue Value: Whole Plant
  misc_feature: MA Experiment ID: 20001560 Result: Down-regulated in Transcription
  misc_feature: MA Experiment 20001560 PARAMETER Experiment Name: At_Drought_Soil_Dry_P Parameter: Age (day) Value: 28
  misc_feature: MA Experiment 20001560 PARAMETER Experiment Name: At_Drought_Soil_Dry_P Parameter: Organism Value: A. thaliana
  misc_feature: MA Experiment 20001560 PARAMETER Experiment Name: At_Drought_Soil_Dry_P Parameter: Plant Line Value: WS
  misc_feature: MA Experiment 20001560 PARAMETER Experiment Name: At_Drought_Soil_Dry_P Parameter: Post Timepoint (hr) Value: None
  misc_feature: MA Experiment 20001560 PARAMETER Experiment Name: At_Drought_Soil_Dry_P Parameter: Post-Treatment Value: None
  misc_feature: MA Experiment 20001560 PARAMETER Experiment Name: At_Drought_Soil_Dry_P Parameter: Timepoint (day) Value: 14
  misc_feature: MA Experiment 20001560 PARAMETER Experiment Name: At_Drought_Soil_Dry_P Parameter: Treatment Value: Drought vs. No Drought
agttgttcaacttcttcgtcgtcgtcttcttcctttgctccgtcgtcgagatctcgtcgaacctcaaatctcaaatctcctgtaaccagatcgtctaattatccgatctgcgtttcgaatctcagatcgaagatgccggtggctgcttccgccatctattttctgaatctccgtggcgatgtactcataaatcgcacctaccgagatgacgtcgggggaaacatggtggatgcatttcgtacgcatataatgcagacgaaagagttagggaattgtcctgtgcgtcagattggtggctgctcctttgtttatatgcgaatcagcaatgtctacatcgtcattgttgtcagtagcaatgctaatgttgcttgtggattcaaatttgttgttgaggctgtagctttgttcaaatcatactttggtggagcttttgatgaagacgctattagaaataactttgttctgatttatgaattgttggatgagattatggactttggctatccacaaaatctctcacctgaaattttaaaactttatatcactcaggaaggtgtacggtcaccattttcatcgaagccaaaagacaaacctgttccaaatgcaacattacaagttacaggtgctgttggttggagaagagagggccttgcttacaaaaagaatgaggtgtttctggatattgtggaaagtgtaaaccttctgatgtcctctaaaggcaatgttcttcggtgtgatgtgacggggaaggttttaatgaaatgtttcctttcgggaatgcctgatttgaagttggggttgaatgataaaattggtcttgagaaggaatcagaaatgaaatctcgcccagctaagagtggtaaaaccattgagcttgatgatgtcacatttcaccagtgtgtgaacctgaccagattcaactccgagaagactgttagttttgtaccaccggatggagagtttgaactgatgaagtatcgaataacagagggtgtaaatctgcctttccgtgtattaccaacaatcaaagaacttggtcgtacacgtatggaagtaaatgtcaaggtcaaaagtgtgtttggtgctaaaatgtttgcccttggggtcgtggttaaaattccagtgccaaaacaaacagccaagaccaatttccaagtgacaactggtcgcgctaaatacaatccatcaatcgattgcttggtttggaagataagaaaattcccagggcaaacagagtccacgctaagtgcagaaattgagttgatctcaacaatgggagagaagaaatcttggacaaggccaccgatccaaatggaatttcaggtgccaatgttcacagcatctggtctgcgagttcgttttctcaaggtttgggagaagagcggttacaacacggtcgagtgggttcgatacataacgaaagcgggatcttacgagatcagatgctgaacattaaacacagttcaggttcagtgacatcagacttaaaagtttcatggcttctagttttttgttccttatgcaaaacaaaaacaaaagagttaaatatgttttataccttgttttatgtttgttttgtcgattagagatatctgtgttaatatgatttcttatgtcttaatttggtattgaattctgtttttctttctttctctgtttgtgaaattgtacgagatatagtttaga

SEQ ID NO: 89649 - protein, 482 aa, Arabidopsis thaliana
  peptide (1)..(482): Ceres Seq. ID no. 12719843
  misc_feature (52)..(482): Pfam Name: Adaptor complexes medium subunit family Pfam Description: Adaptor complexes medium subunit family
  misc_feature (45)..(482): Homolog of NCBI NO: 15237475 NR Description: AP47/50p (gb|AAB88283.1); protein id: supported by cDNA: gi_14326519, supported by cDNA: gi_2271476 thaliana] >gi|2271477|gb|AAB88283.1| AP47/50p [Arabidopsis
  misc_feature (44)..(481): Homolog of NCBI NO: 28828638 NR Description: similar to Dictyostelium discoideum (Slime mold). coat assembly protein AP50 (Clathrin coat associated protein
  misc_feature (50)..(481): Homolog of NCBI NO: 1703328 NR Description: CLATHRIN COAT ASSEMBLY PROTEIN AP50 (CLATHRIN COAT
  misc_feature (52)..(482): Homolog of NCBI NO: 6753074 NR Description: adaptor-related protein complex AP-2, mu1;
  misc_feature (52)..(482): Homolog of NCBI NO: 40788880 NR Description: KIAA0109 [Homo sapiens]
  misc_feature (52)..(482): Homolog of NCBI NO: 22219429 NR Description: Chain M, Ap2 Clathrin Adaptor Core
  misc_feature (52)..(482): Homolog of NCBI NO: 7448828 NR Description: assembly protein 50 - human
  misc_feature (52)..(482): Homolog of NCBI NO: 38174423 NR Description: Unknown (protein for MGC:75936) [Silurana
  misc_feature (52)..(482): Homolog of NCBI NO: 28839636 NR Description: Unknown (protein for MGC:53076) [Xenopus laevis]
  misc_feature (50)..(481): Homolog of NCBI NO: 32419759 NR Description: hypothetical protein [Neurospora crassa]
SCSTSSSSSSSFAPSSRSRRTSNLKSPVTRSSNYPICVSNLRSKMPVAASAIYFLNLRGDVLINRTYRDDVGGNMVDAFRTHIMQTKELGNCPVRQIGGCSFVYMRISNVYIVIVVSSNANVACGFKFVVEAVALFKSYFGGAFDEDAIRNNFVLIYELLDEIMDFGYPQNLSPEILKLYITQEGVRSPFSSKPKDKPVPNATLQVTGAVGWRREGLAYKKNEVFLDIVESVNLLMSSKGNVLRCDVTGKVLMKCFLSGMPDLKLGLNDKIGLEKESEMKSRPAKSGKTIELDDVTFHQCVNLTRFNSEKTVSFVPPDGEFELMKYRITEGVNLPFRVLPTIKELGRTRMEVNVKVKSVFGAKMFALGVVVKIPVPKQTAKTNFQVTTGRAKYNPSIDCLVWKIRKFPGQTESTLSAEIELISTMGEKKSWTRPPIQMEFQVPMFTASGLRVRFLKVWEKSGYNTVEWVRYITKAGSYEIRC

SEQ ID NO: 89650 - protein, 438 aa, Arabidopsis thaliana; identical to SEQ ID NO: 76506
  peptide (1)..(438): Ceres Seq. ID no. 12719844
  misc_feature (8)..(438): Pfam Name: Adaptor complexes medium subunit family Pfam Description: Adaptor complexes medium subunit family
  misc_feature (1)..(438): Homolog of NCBI NO: 15237475 NR Description: AP47/50p (gb|AAB88283.1); protein id: supported by cDNA: gi_14326519, supported by cDNA: gi_2271476 thaliana] >gi|2271477|gb|AAB88283.1| AP47/50p [Arabidopsis
  misc_feature (1)..(437): Homolog of NCBI NO: 28828638 NR Description: similar to Dictyostelium discoideum (Slime mold). coat assembly protein AP50 (Clathrin coat associated protein
  misc_feature (6)..(437): Homolog of NCBI NO: 1703328 NR Description: CLATHRIN COAT ASSEMBLY PROTEIN AP50 (CLATHRIN COAT
  misc_feature (8)..(438): Homolog of NCBI NO: 6753074 NR Description: adaptor-related protein complex AP-2, mu1;
  misc_feature (8)..(438): Homolog of NCBI NO: 40788880 NR Description: KIAA0109 [Homo sapiens]
  misc_feature (8)..(438): Homolog of NCBI NO: 22219429 NR Description: Chain M, Ap2 Clathrin Adaptor Core
  misc_feature (8)..(438): Homolog of NCBI NO: 7448828 NR Description: assembly protein 50 - human
  misc_feature (8)..(438): Homolog of NCBI NO: 38174423 NR Description: Unknown (protein for MGC:75936) [Silurana
  misc_feature (8)..(438): Homolog of NCBI NO: 28839636 NR Description: Unknown (protein for MGC:53076) [Xenopus laevis]
  misc_feature (6)..(437): Homolog of NCBI NO: 32419759 NR Description: hypothetical protein [Neurospora crassa]

SEQ ID NO: 89651 - protein, 408 aa, Arabidopsis thaliana; identical to SEQ ID NO: 76507
  peptide (1)..(408): Ceres Seq. ID no. 12719845
  misc_feature (1)..(408): Pfam Name: Adaptor complexes medium subunit family Pfam Description: Adaptor complexes medium subunit family
  misc_feature (1)..(408): Homolog of NCBI NO: 15237475 NR Description: AP47/50p (gb|AAB88283.1); protein id: supported by cDNA: gi_14326519, supported by cDNA: gi_2271476 thaliana] >gi|2271477|gb|AAB88283.1| AP47/50p [Arabidopsis
  misc_feature (1)..(407): Homolog of NCBI NO: 28828638 NR Description: similar to Dictyostelium discoideum (Slime mold). coat assembly protein AP50 (Clathrin coat associated protein
  misc_feature (1)..(407): Homolog of NCBI NO: 1703328 NR Description: CLATHRIN COAT ASSEMBLY PROTEIN AP50 (CLATHRIN COAT
  misc_feature (1)..(408): Homolog of NCBI NO: 6753074 NR Description: adaptor-related protein complex AP-2, mu1;
  misc_feature (1)..(408): Homolog of NCBI NO: 40788880 NR Description: KIAA0109 [Homo sapiens]
  misc_feature (1)..(408): Homolog of NCBI NO: 22219429 NR Description: Chain M, Ap2 Clathrin Adaptor Core
  misc_feature (1)..(408): Homolog of NCBI NO: 7448828 NR Description: assembly protein 50 - human
  misc_feature (1)..(408): Homolog of NCBI NO: 38174423 NR Description: Unknown (protein for MGC:75936) [Silurana
  misc_feature (1)..(408): Homolog of NCBI NO: 28839636 NR Description: Unknown (protein for MGC:53076) [Xenopus laevis]
  misc_feature (1)..(407): Homolog of NCBI NO: 32419759 NR Description: hypothetical protein [Neurospora crassa]

SEQ ID NO: 89652 - DNA, 1632 bp, Arabidopsis thaliana
  misc_feature (1)..(1632): Ceres Seq. ID no. 12719846
  misc_feature: MA Experiment ID: 20000173 Result: Down-regulated in Transcription
  misc_feature: MA Experiment 20000173 PARAMETER Experiment Name: At_42deg_Heat_P Parameter: Age (day) Value: 14
  misc_feature: MA Experiment 20000173 PARAMETER Experiment Name: At_42deg_Heat_P Parameter: Organism Value: A. thaliana
  misc_feature: MA Experiment 20000173 PARAMETER Experiment Name: At_42deg_Heat_P Parameter: Plant Line Value: WS
  misc_feature: MA Experiment 20000173 PARAMETER Experiment Name: At_42deg_Heat_P Parameter: Temperature (deg C) Value: 42 vs. 22
  misc_feature: MA Experiment 20000173 PARAMETER Experiment Name: At_42deg_Heat_P Parameter: Timepoint (hr) Value: 6
  misc_feature: MA Experiment 20000173 PARAMETER Experiment Name: At_42deg_Heat_P Parameter: Tissue Value: Aerial
  misc_feature: MA Experiment ID: 20000184 Result: Down-regulated in Transcription
  misc_feature: MA Experiment 20000184 PARAMETER Experiment Name: At_Shoots__P Parameter: Age (day) Value: 7
  misc_feature: MA Experiment 20000184 PARAMETER Experiment Name: At_Shoots__P Parameter: Tissue Value: Shoots vs. Whole Plant
  misc_feature: MA Experiment ID: 20000234 Result: Down-regulated in Transcription
  misc_feature: MA Experiment 20000234 PARAMETER Experiment Name: At_Siliques_P Parameter: Age (day) Value: 21
  misc_feature: MA Experiment 20000234 PARAMETER Experiment Name: At_Siliques_P Parameter: Organism Value: A. thaliana
  misc_feature: MA Experiment 20000234 PARAMETER Experiment Name: At_Siliques_P Parameter: Plant Line Value: WS
  misc_feature: MA Experiment 20000234 PARAMETER Experiment Name: At_Siliques_P Parameter: Tissue Value: Less Than 5mm Siliques vs. Whole Plant
  misc_feature: MA Experiment ID: 20000264 Result: Down-regulated in Transcription
  misc_feature: MA Experiment 20000264 PARAMETER Experiment Name: At_Open_Flower_P Parameter: Age (day) Value: 21
  misc_feature: MA Experiment 20000264 PARAMETER Experiment Name: At_Open_Flower_P Parameter: Plant Line Value: WS
  misc_feature: MA Experiment 20000264 PARAMETER Experiment Name: At_Open_Flower_P Parameter: Tissue Value: Open Flower vs. Whole Plant
  misc_feature: MA Experiment ID: 20000495 Result: Down-regulated in Transcription
  misc_feature: MA Experiment 20000495 PARAMETER Experiment Name: At_Guard_Cells_P Parameter: Harvest Date Value: 8/2/2002
  misc_feature: MA Experiment 20000495 PARAMETER Experiment Name: At_Guard_Cells_P Parameter: Organism Value: A. thaliana
  misc_feature: MA Experiment 20000495 PARAMETER Experiment Name: At_Guard_Cells_P Parameter: Tissue Value: Guard Cells vs. Leaves
  misc_feature: MA Experiment ID: 20000496 Result: Down-regulated in Transcription
  misc_feature: MA Experiment 20000496 PARAMETER Experiment Name: At_Guard_Cells_P Parameter: Harvest Date Value: 7/19/2002
  misc_feature: MA Experiment 20000496 PARAMETER Experiment Name: At_Guard_Cells_P Parameter: Organism Value: Canola
  misc_feature: MA Experiment 20000496 PARAMETER Experiment Name: At_Guard_Cells_P Parameter: Tissue Value: Guard Cells vs. Leaves
  misc_feature: MA Experiment ID: 20001451 Result: Down-regulated in Transcription
  misc_feature: MA Experiment 20001451 PARAMETER Experiment Name: At_Far-red-induction_P Parameter: Age (day) Value: 7
  misc_feature: MA Experiment 20001451 PARAMETER Experiment Name: At_Far-red-induction_P Parameter: Light Value: Far-red vs. White
  misc_feature: MA Experiment 20001451 PARAMETER Experiment Name: At_Far-red-induction_P Parameter: Organism Value: A. thaliana
  misc_feature: MA Experiment 20001451 PARAMETER Experiment Name: At_Far-red-induction_P Parameter: Plant Line Value: Columbia
  misc_feature: MA Experiment 20001451 PARAMETER Experiment Name: At_Far-red-induction_P Parameter: Timepoint (hr) Value: 24
  misc_feature: MA Experiment 20001451 PARAMETER Experiment Name: At_Far-red-induction_P Parameter: Tissue Value: Whole Plant
  misc_feature: MA Experiment ID: 20001560 Result: Down-regulated in Transcription
  misc_feature: MA Experiment 20001560 PARAMETER Experiment Name: At_Drought_Soil_Dry_P Parameter: Age (day) Value: 28
  misc_feature: MA Experiment 20001560 PARAMETER Experiment Name: At_Drought_Soil_Dry_P Parameter: Organism Value: A. thaliana
  misc_feature: MA Experiment 20001560 PARAMETER Experiment Name: At_Drought_Soil_Dry_P Parameter: Plant Line Value: WS
  misc_feature: MA Experiment 20001560 PARAMETER Experiment Name: At_Drought_Soil_Dry_P Parameter: Post Timepoint (hr) Value: None
  misc_feature: MA Experiment 20001560 PARAMETER Experiment Name: At_Drought_Soil_Dry_P Parameter: Post-Treatment Value: None
  misc_feature: MA Experiment 20001560 PARAMETER Experiment Name: At_Drought_Soil_Dry_P Parameter: Timepoint (day) Value: 14
  misc_feature: MA Experiment 20001560 PARAMETER Experiment Name: At_Drought_Soil_Dry_P Parameter: Treatment Value: Drought vs. No Drought
cttcgtcgtcgtcttcttcctttgctccgtcgtcgagatctcgtcgaacctcaaatctcaaatctcctgtaaccagatcgtctaattatccgatctgcgtttcgaatctcagatcgaagatgccggtggctgcttccgccatctattttctgaatctccgtggcgatgtactcataaatcgcacctaccgagatgacgtcgggggaaacatggtggatgcatttcgtacgcatataatgcagacgaaagagttagggaattgtcctgtgcgtcagattggtggctgctcctttgtttatatgcgaatcagcaatgtctacatcgtcattgttgtcagtagcaatgctaatgttgcttgtggattcaaatttgttgttgaggctgtagctttgttcaaatcatactttggtggagcttttgatgaagacgctattagaaataactttgttctgatttatgaattgttggatgagattatggactttggctatccacaaaatctctcacctgaaattttaaaactttatatcactcaggaaggtgtacggtcaccattttcatcgaagccaaaagacaaacctgttccaaatgcaacattacaagttacaggtgctgttggttggagaagagagggccttgcttacaaaaagaatgaggtgtttctggatattgtggaaagtgtaaaccttctgatgtcctctaaaggcaatgttcttcggtgtgatgtgacggggaaggttttaatgaaatgtttcctttcgggaatgcctgatttgaagttggggttgaatgataaaattggtcttgagaaggaatcagaaatgaaatctcgcccagctaagagtggtaaaaccattgagcttgatgatgtcacatttcaccagtgtgtgaacctgaccagattcaactccgagaagactgttagttttgtaccaccggatggagagtttgaactgatgaagtatcgaataacagagggtgtaaatctgcctttccgtgtattaccaacaatcaaagaacttggtcgtacacgtatggaagtaaatgtcaaggtcaaaagtgtgtttggtgctaaaatgtttgcccttggggtcgtggttaaaattccagtgccaaaacaaacagccaagaccaatttccaagtgacaactggtcgcgctaaatacaatccatcaatcgattgcttggtttggaagataagaaaattcccagggcaaacagagtccacgctaagtgcagaaattgagttgatctcaacaatgggagagaagaaatcttggacaaggccaccgatccaaatggaatttcaggtgccaatgttcacagcatctggtctgcgagttcgttttctcaaggtttgggagaagagcggttacaacacggtcgagtgggttcgatacataacgaaagcgggatcttacgagatcagatgctgaacattaaacacagttcaggttcagtgacatcagacttaaaagtttcatggcttctagttttttgttccttatgcaaaacaaaaacaaaagagttaaatatgttttataccttgttttatgtttgttttgtcgattagagatatctgtgttaatatgatttcttatgtcttaatttggtattgaattctgtttttct

SEQ ID NO: 89653 - protein, 477 aa, Arabidopsis thaliana
  peptide (1)..(477): Ceres Seq. ID no. 12719847
  misc_feature (47)..(477): Pfam Name: Adaptor complexes medium subunit family Pfam Description: Adaptor complexes medium subunit family
  misc_feature (40)..(477): Homolog of NCBI NO: 15237475 NR Description: AP47/50p (gb|AAB88283.1); protein id: supported by cDNA: gi_14326519, supported by cDNA: gi_2271476 thaliana] >gi|2271477|gb|AAB88283.1| AP47/50p [Arabidopsis
  misc_feature (39)..(476): Homolog of NCBI NO: 28828638 NR Description: similar to Dictyostelium discoideum (Slime mold). coat assembly protein AP50 (Clathrin coat associated protein
  misc_feature (45)..(476): Homolog of NCBI NO: 1703328 NR Description: CLATHRIN COAT ASSEMBLY PROTEIN AP50 (CLATHRIN COAT
  misc_feature (47)..(477): Homolog of NCBI NO: 6753074 NR Description: adaptor-related protein complex AP-2, mu1;
  misc_feature (47)..(477): Homolog of NCBI NO: 40788880 NR Description: KIAA0109 [Homo sapiens]
  misc_feature (47)..(477): Homolog of NCBI NO: 22219429 NR Description: Chain M, Ap2 Clathrin Adaptor Core
  misc_feature (47)..(477): Homolog of NCBI NO: 7448828 NR Description: assembly protein 50 - human
  misc_feature (47)..(477): Homolog of NCBI NO: 38174423 NR Description: Unknown (protein for MGC:75936) [Silurana
  misc_feature (47)..(477): Homolog of NCBI NO: 28839636 NR Description: Unknown (protein for MGC:53076) [Xenopus laevis]
  misc_feature (45)..(476): Homolog of NCBI NO: 32419759 NR Description: hypothetical protein [Neurospora crassa]
SSSSSSFAPSSRSRRTSNLKSPVTRSSNYPICVSNLRSKMPVAASAIYFLNLRGDVLINRTYRDDVGGNMVDAFRTHIMQTKELGNCPVRQIGGCSFVYMRISNVYIVIVVSSNANVACGFKFVVEAVALFKSYFGGAFDEDAIRNNFVLIYELLDEIMDFGYPQNLSPEILKLYITQEGVRSPFSSKPKDKPVPNATLQVTGAVGWRREGLAYKKNEVFLDIVESVNLLMSSKGNVLRCDVTGKVLMKCFLSGMPDLKLGLNDKIGLEKESEMKSRPAKSGKTIELDDVTFHQCVNLTRFNSEKTVSFVPPDGEFELMKYRITEGVNLPFRVLPTIKELGRTRMEVNVKVKSVFGAKMFALGVVVKIPVPKQTAKTNFQVTTGRAKYNPSIDCLVWKIRKFPGQTESTLSAEIELISTMGEKKSWTRPPIQMEFQVPMFTASGLRVRFLKVWEKSGYNTVEWVRYITKAGSYEIRC

SEQ ID NO: 89654 - protein, 438 aa, Arabidopsis thaliana; identical to SEQ ID NO: 76506
  peptide (1)..(438): Ceres Seq. ID no. 12719848
  misc_feature (8)..(438): Pfam Name: Adaptor complexes medium subunit family Pfam Description: Adaptor complexes medium subunit family
  misc_feature (1)..(438): Homolog of NCBI NO: 15237475 NR Description: AP47/50p (gb|AAB88283.1); protein id: supported by cDNA: gi_14326519, supported by cDNA: gi_2271476 thaliana] >gi|2271477|gb|AAB88283.1| AP47/50p [Arabidopsis
  misc_feature (1)..(437): Homolog of NCBI NO: 28828638 NR Description: similar to Dictyostelium discoideum (Slime mold). coat assembly protein AP50 (Clathrin coat associated protein
  misc_feature (6)..(437): Homolog of NCBI NO: 1703328 NR Description: CLATHRIN COAT ASSEMBLY PROTEIN AP50 (CLATHRIN COAT
  misc_feature (8)..(438): Homolog of NCBI NO: 6753074 NR Description: adaptor-related protein complex AP-2, mu1;
  misc_feature (8)..(438): Homolog of NCBI NO: 40788880 NR Description: KIAA0109 [Homo sapiens]
  misc_feature (8)..(438): Homolog of NCBI NO: 22219429 NR Description: Chain M, Ap2 Clathrin Adaptor Core
  misc_feature (8)..(438): Homolog of NCBI NO: 7448828 NR Description: assembly protein 50 - human
  misc_feature (8)..(438): Homolog of NCBI NO: 38174423 NR Description: Unknown (protein for MGC:75936) [Silurana
  misc_feature (8)..(438): Homolog of NCBI NO: 28839636 NR Description: Unknown (protein for MGC:53076) [Xenopus laevis]
  misc_feature (6)..(437): Homolog of NCBI NO: 32419759 NR Description: hypothetical protein [Neurospora crassa]

SEQ ID NO: 89655 - protein, 408 aa, Arabidopsis thaliana; identical to SEQ ID NO: 76507
  peptide (1)..(408): Ceres Seq. ID no. 12719849
  misc_feature (1)..(408): Pfam Name: Adaptor complexes medium subunit family Pfam Description: Adaptor complexes medium subunit family
  misc_feature (1)..(408): Homolog of NCBI NO: 15237475 NR Description: AP47/50p (gb|AAB88283.1); protein id: supported by cDNA: gi_14326519, supported by cDNA: gi_2271476 thaliana] >gi|2271477|gb|AAB88283.1| AP47/50p [Arabidopsis
  misc_feature (1)..(407): Homolog of NCBI NO: 28828638 NR Description: similar to Dictyostelium discoideum (Slime mold). coat assembly protein AP50 (Clathrin coat associated protein
  misc_feature (1)..(407): Homolog of NCBI NO: 1703328 NR Description: CLATHRIN COAT ASSEMBLY PROTEIN AP50 (CLATHRIN COAT
  misc_feature (1)..(408): Homolog of NCBI NO: 6753074 NR Description: adaptor-related protein complex AP-2, mu1;
  misc_feature (1)..(408): Homolog of NCBI NO: 40788880 NR Description: KIAA0109 [Homo sapiens]
  misc_feature (1)..(408): Homolog of NCBI NO: 22219429 NR Description: Chain M, Ap2 Clathrin Adaptor Core
  misc_feature (1)..(408): Homolog of NCBI NO: 7448828 NR Description: assembly protein 50 - human
  misc_feature (1)..(408): Homolog of NCBI NO: 38174423 NR Description: Unknown (protein for MGC:75936) [Silurana
  misc_feature (1)..(408): Homolog of NCBI NO: 28839636 NR Description: Unknown (protein for MGC:53076) [Xenopus laevis]
  misc_feature (1)..(407): Homolog of NCBI NO: 32419759 NR Description: hypothetical protein [Neurospora crassa]

SEQ ID NO: 89656 - DNA, 1116 bp, Arabidopsis thaliana
  misc_feature (1)..(1116): Ceres Seq. ID no. 12719850
  misc_feature: MA Experiment ID: 20000185 Result: Down-regulated in Transcription
  misc_feature: MA Experiment 20000185 PARAMETER Experiment Name: At_Roots__P Parameter: Age (day) Value: 7 vs. 21
  misc_feature: MA Experiment 20000185 PARAMETER Experiment Name: At_Roots__P Parameter: Organism Value: A. thaliana
  misc_feature: MA Experiment 20000185 PARAMETER Experiment Name: At_Roots__P Parameter: Tissue Value: Roots vs. Whole Plant
  misc_feature: MA Experiment ID: 20000227 Result: Down-regulated in Transcription
  misc_feature: MA Experiment 20000227 PARAMETER Experiment Name: At_Root-Tips-vs-Tops_P Parameter: Tissue Value: Root Tips vs. Root Tops
  misc_feature: MA Experiment ID: 20000264 Result: Down-regulated in Transcription
  misc_feature: MA Experiment 20000264 PARAMETER Experiment Name: At_Open_Flower_P Parameter: Age (day) Value: 21
  misc_feature: MA Experiment 20000264 PARAMETER Experiment Name: At_Open_Flower_P Parameter: Plant Line Value: WS
  misc_feature: MA Experiment 20000264 PARAMETER Experiment Name: At_Open_Flower_P Parameter: Tissue Value: Open Flower vs. Whole Plant
  misc_feature: MA Experiment ID: 20000269 Result: Down-regulated in Transcription
  misc_feature: MA Experiment 20000269 PARAMETER Experiment Name: At_1mM_KNO3_L-vs-H_Roots_P Parameter: Age (day) Value: 7,10,12
  misc_feature: MA Experiment 20000269 PARAMETER Experiment Name: At_1mM_KNO3_L-vs-H_Roots_P Parameter: Organism Value: A. thaliana
  misc_feature: MA Experiment 20000269 PARAMETER Experiment Name: At_1mM_KNO3_L-vs-H_Roots_P Parameter: Plant Line Value: WS
  misc_feature: MA Experiment 20000269 PARAMETER Experiment Name: At_1mM_KNO3_L-vs-H_Roots_P Parameter: Timepoint (day) Value: 7,10,12
  misc_feature: MA Experiment 20000269 PARAMETER Experiment Name: At_1mM_KNO3_L-vs-H_Roots_P Parameter: Tissue Value: Roots
  misc_feature: MA Experiment 20000269 PARAMETER Experiment Name: At_1mM_KNO3_L-vs-H_Roots_P Parameter: Treatment Value: 1mM KNO3 vs. 50mM KNO3
  misc_feature: MA Experiment ID: 20000439 Result: Down-regulated in Transcription
  misc_feature: MA Experiment 20000439 PARAMETER Experiment Name: At_Roots__P Parameter: Age (day) Value: 14 vs. 21
  misc_feature: MA Experiment 20000439 PARAMETER Experiment Name: At_Roots__P Parameter: Organism Value: A. thaliana
  misc_feature: MA Experiment 20000439 PARAMETER Experiment Name: At_Roots__P Parameter: Tissue Value: Roots vs. Whole Plant
  misc_feature: MA Experiment ID: 20000794 Result: Down-regulated in Transcription
  misc_feature: MA Experiment 20000794 PARAMETER Experiment Name: At_Petals_P Parameter: Age (day) Value: 23-25 days
  misc_feature: MA Experiment 20000794 PARAMETER Experiment Name: At_Petals_P Parameter: Plant Line Value: WS
  misc_feature: MA Experiment 20000794 PARAMETER Experiment Name: At_Petals_P Parameter: Tissue Value: Petals vs. Whole plant
  misc_feature: MA Experiment ID: 20001904 Result: Down-regulated in Transcription
  misc_feature: MA Experiment 20001904 PARAMETER Experiment Name: At_Drought_Reproduction_P Parameter: Age (day) Value: 37
  misc_feature: MA Experiment 20001904 PARAMETER Experiment Name: At_Drought_Reproduction_P Parameter: Organism Value: A. thaliana
  misc_feature: MA Experiment 20001904 PARAMETER Experiment Name: At_Drought_Reproduction_P Parameter: Plant Line Value: WS
  misc_feature: MA Experiment 20001904 PARAMETER Experiment Name: At_Drought_Reproduction_P Parameter: Timepoint (day) Value: 7
  misc_feature: MA Experiment 20001904 PARAMETER Experiment Name: At_Drought_Reproduction_P Parameter: Tissue Value: Rosettes
  misc_feature: MA Experiment 20001904 PARAMETER Experiment Name: At_Drought_Reproduction_P Parameter: Treatment Value: Drought vs. No Drought
  misc_feature: MA Experiment ID: 20001905 Result: Down-regulated in Transcription
  misc_feature: MA Experiment 20001905 PARAMETER Experiment Name: At_Drought_Reproduction_P Parameter: Age (day) Value: 40
  misc_feature: MA Experiment 20001905 PARAMETER Experiment Name: At_Drought_Reproduction_P Parameter: Organism Value: A. thaliana
  misc_feature: MA Experiment 20001905 PARAMETER Experiment Name: At_Drought_Reproduction_P Parameter: Plant Line Value: WS
  misc_feature: MA Experiment 20001905 PARAMETER Experiment Name: At_Drought_Reproduction_P Parameter: Timepoint (day) Value: 10
  misc_feature: MA Experiment 20001905 PARAMETER Experiment Name: At_Drought_Reproduction_P Parameter: Tissue Value: Rosettes
  misc_feature: MA Experiment 20001905 PARAMETER Experiment Name: At_Drought_Reproduction_P Parameter: Treatment Value: Drought vs. No Drought
  misc_feature: Pfam Name: Chloroa_b-bind Pfam Description: Chlorophyll A-B binding protein
atttcaaaccacacattcaaactaactctgcaaaaaaaaaaaaaactcagagcagaggagatcgagagagacaaagagagagagagagagagagagagatcttaacaaaaaaatgtctatatccatggcgttattctctccgccgatctcttcctcacttcagaaccctaatctcatccccaagatctcaacctctcttctctccaccaagcgtttctctctaatctccgtccctagagcttcctccgacaatggtacgacttcccccgtcgtggagattccgaagcctgcttctgtggctgtagaggaagttccagttaaatctccagccgaaagctcctccgcttctgaaaacggcgccgttggaggtgaagcgactgattcgagtactgagacggtaatcaaatatcagaatgcgaagtgggttaatggaacttgggatctgaaacagttcgagaaagatggcaaaactgattgggattctgttatcgtttctgaggcaaagaggagaaaatggcttgaagataacccggaaacaacgagtaacgacgagcttgttgtcttcgatacttcgattattccatggtgggcatggatgaagagataccatctacctgaagctgaacttctcaatggtcgtgctgcgatgatagggttcttcatggcttactttgttgatagtcttaccggagtaggacttgttgatcaaatgggaaatttcttctgcaaaacactcttgtttgtggctgtagctggagttctcttcatccgtaagaatgaagatttagacaaacttaaggatctgttcgatgagactacgttatatgacaaacaatggcaagctgcatggaaagagccagattcatcaacagtttcttcaaagaagtgaacaagttcttacaatctttcattttcctttttttgttatgcaataatctgtgaatcagtgaaagtttatctctactgaactactgatcttcagattttgtaatctttctgctttaaaaatctctatgaagtagtctcaaagataatgtatcgaaggtctttgacttgtaaagcagacctatttcgttttgacgcttgataatttaatcaataagagattttattttt

SEQ ID NO: 89657 - protein, 258 aa, Arabidopsis thaliana; identical to SEQ ID NO: 71157
  peptide (1)..(258): Ceres Seq. ID no. 12719851
  misc_feature: Pfam Name: Chloroa_b-bind Pfam Description: Chlorophyll A-B binding protein
  misc_feature (1)..(258): Homolog of NCBI NO: 30695110 NR Description: Lil3 protein [Arabidopsis thaliana]
  misc_feature (5)..(258): Homolog of NCBI NO: 8978078 NR Description: Lil3 protein [Arabidopsis thaliana]
  misc_feature (5)..(258): Homolog of NCBI NO: 21555799 NR Description: Lil3 protein [Arabidopsis thaliana]
  misc_feature (5)..(258): Homolog of NCBI NO: 7485188 NR Description: hypothetical protein - Arabidopsis thaliana hypothetical protein [Arabidopsis thaliana]
  misc_feature (5)..(258): Homolog of NCBI NO: 18414927 NR Description: Lil3 protein; protein id: At4g17600.1, supported cDNA: 29150., supported by cDNA: gi_14030672, supported by cDNA: supported by cDNA: gi_4741965 [Arabidopsis thaliana] thaliana

SEQ ID NO: 89658 - protein, 254 aa, Arabidopsis thaliana; identical to SEQ ID NO: 71158
  peptide (1)..(254): Ceres Seq. ID no. 12719852
  misc_feature: Pfam Name: Chloroa_b-bind Pfam Description: Chlorophyll A-B binding protein
  misc_feature (1)..(254): Homolog of NCBI NO: 30695110 NR Description: Lil3 protein [Arabidopsis thaliana]
  misc_feature (1)..(254): Homolog of NCBI NO: 8978078 NR Description: Lil3 protein [Arabidopsis thaliana]
  misc_feature (1)..(254): Homolog of NCBI NO: 21555799 NR Description: Lil3 protein [Arabidopsis thaliana]
  misc_feature (1)..(254): Homolog of NCBI NO: 7485188 NR Description: hypothetical protein - Arabidopsis thaliana hypothetical protein [Arabidopsis thaliana]
  misc_feature (1)..(254): Homolog of NCBI NO: 18414927 NR Description: Lil3 protein; protein id: At4g17600.1, supported cDNA: 29150., supported by cDNA: gi_14030672, supported by cDNA: supported by cDNA: gi_4741965 [Arabidopsis thaliana] thaliana

SEQ ID NO: 89659 - DNA, 1812 bp, Arabidopsis thaliana
  misc_feature (1)..(1812): Ceres Seq. ID no. 12719864
  misc_feature: MA Experiment ID: 108573 Result: Up-regulated in Transcription
  misc_feature: MA Experiment 108573 PARAMETER Experiment Name: At_Drought_cDNA_P Parameter: Timepoint (hr) Value: 6
  misc_feature: MA Experiment 108573 PARAMETER Experiment Name: At_Drought_cDNA_P Parameter: Tissue Value: Aerial
  misc_feature: MA Experiment 108573 PARAMETER Experiment Name: At_Drought_cDNA_P Parameter: Treatment Value: Drought vs. No Drought
  misc_feature: MA Experiment ID: 108595 Result: Down-regulated in Transcription
  misc_feature: MA Experiment 108595 PARAMETER Experiment Name: At_Ler-pi_Ovule_cDNA_P Parameter: Plant Line Value: null
  misc_feature: MA Experiment ID: 20000093 Result: Up-regulated in Transcription
  misc_feature: MA Experiment 20000093 PARAMETER Experiment Name: At_42deg_Heat_cDNA_P Parameter: Temperature (deg C) Value: 42 vs. 22
  misc_feature: MA Experiment 20000093 PARAMETER Experiment Name: At_42deg_Heat_cDNA_P Parameter: Timepoint (hr) Value: 0.5
  misc_feature: MA Experiment 20000093 PARAMETER Experiment Name: At_42deg_Heat_cDNA_P Parameter: Tissue Value: Aerial
  misc_feature: MA Experiment ID: 20000112 Result: Up-regulated in Transcription
  misc_feature: MA Experiment 20000112 PARAMETER Experiment Name: At_42deg_Heat_cDNA_P Parameter: Temperature (deg C) Value: 42 vs. 22
  misc_feature: MA Experiment 20000112 PARAMETER Experiment Name: At_42deg_Heat_cDNA_P Parameter: Timepoint (hr) Value: 2
  misc_feature: MA Experiment 20000112 PARAMETER Experiment Name: At_42deg_Heat_cDNA_P Parameter: Tissue Value: Aerial
  misc_feature: MA Experiment ID: 20000113 Result: Up-regulated in Transcription
  misc_feature: MA Experiment 20000113 PARAMETER Experiment Name: At_42deg_Heat_cDNA_P Parameter: Temperature (deg C) Value: 42 vs. 22
  misc_feature: MA Experiment 20000113 PARAMETER Experiment Name: At_42deg_Heat_cDNA_P Parameter: Timepoint (hr) Value: 8
  misc_feature: MA Experiment 20000113 PARAMETER Experiment Name: At_42deg_Heat_cDNA_P Parameter: Tissue Value: Aerial
  misc_feature: MA Experiment ID: 20000144 Result: Up-regulated in Transcription
  misc_feature: MA Experiment 20000144 PARAMETER Experiment Name: At_42deg_Heat_cDNA_P Parameter: Temperature (deg C) Value: 42 vs. 22
  misc_feature: MA Experiment 20000144 PARAMETER Experiment Name: At_42deg_Heat_cDNA_P Parameter: Timepoint (hr) Value: 1
  misc_feature: MA Experiment 20000144 PARAMETER Experiment Name: At_42deg_Heat_cDNA_P Parameter: Tissue Value: Aerial
  misc_feature: MA Experiment ID: 20000171 Result: Up-regulated in Transcription
  misc_feature: MA Experiment 20000171 PARAMETER Experiment Name: At_42deg_Heat_P Parameter: Age (day) Value: 14
  misc_feature: MA Experiment 20000171 PARAMETER Experiment Name: At_42deg_Heat_P Parameter: Organism Value: A. thaliana
  misc_feature: MA Experiment 20000171 PARAMETER Experiment Name: At_42deg_Heat_P Parameter: Plant Line Value: WS
  misc_feature: MA Experiment 20000171 PARAMETER Experiment Name: At_42deg_Heat_P Parameter: Temperature (deg C) Value: 42 vs. 22
  misc_feature: MA Experiment 20000171 PARAMETER Experiment Name: At_42deg_Heat_P Parameter: Timepoint (hr) Value: 1
  misc_feature: MA Experiment 20000171 PARAMETER Experiment Name: At_42deg_Heat_P Parameter: Tissue Value: Aerial
  misc_feature: MA Experiment ID: 20000286 Result: Up-regulated in Transcription
  misc_feature: MA Experiment 20000286 PARAMETER Experiment Name: At_Open_Flower_P Parameter: Age (day) Value: 21
  misc_feature: MA Experiment 20000286 PARAMETER Experiment Name: At_Open_Flower_P Parameter: Plant Line Value: WS
  misc_feature: MA Experiment 20000286 PARAMETER Experiment Name: At_Open_Flower_P Parameter: Tissue Value: Half Open vs. Whole Plant
  misc_feature: MA Experiment ID: 20000794 Result: Up-regulated in Transcription
  misc_feature: MA Experiment 20000794 PARAMETER Experiment Name: At_Petals_P Parameter: Age (day) Value: 23-25 days
  misc_feature: MA Experiment 20000794 PARAMETER Experiment Name: At_Petals_P Parameter: Plant Line Value: WS
  misc_feature: MA Experiment 20000794 PARAMETER Experiment Name: At_Petals_P Parameter: Tissue Value: Petals vs. Whole plant
  misc_feature: MA Experiment ID: 20001451 Result: Up-regulated in Transcription
  misc_feature: MA Experiment 20001451 PARAMETER Experiment Name: At_Far-red-induction_P Parameter: Age (day) Value: 7
  misc_feature: MA Experiment 20001451 PARAMETER Experiment Name: At_Far-red-induction_P Parameter: Light Value: Far-red vs. White
  misc_feature: MA Experiment 20001451 PARAMETER Experiment Name: At_Far-red-induction_P Parameter: Organism Value: A. thaliana
  misc_feature: MA Experiment 20001451 PARAMETER Experiment Name: At_Far-red-induction_P Parameter: Plant Line Value: Columbia
  misc_feature: MA Experiment 20001451 PARAMETER Experiment Name: At_Far-red-induction_P Parameter: Timepoint (hr) Value: 24
  misc_feature: MA Experiment 20001451 PARAMETER Experiment Name: At_Far-red-induction_P Parameter: Tissue Value: Whole Plant
gcagaaaaagaaaagaaaagaaaagactaaaaatttggacgataagcagaaaagagagaggagggcctctcgccctcttattaaaaccttgccttctccaaatctgaagatttctcaatcctaaaatcttttttttttcctctttctccgtttctttattttcggaatccaagatcgtgggtcgatcggtttttacacaatccgatcacgacccatctgctctttttcatcctattttgcttcccttgagaaatggaaatggaatcatgtaagctcttcatcggtggtatatcttgggaaaccagtgaagatcgtcttcgtgactattttcacagttttggtgaggttttagaggctgttattatgaaggatcgtgccactggccgtgctcgtggctttggtttcgttgtctttgctgatcctaatgttgctgaaagagtcgtcttgcttaaacatatcattgatggtaaaattgttgaggcaaagaaggctgttccaagagatgatcacgtagtatttaataaaagtaacagcagccttcagggatcacctggcccatcaaactccaagaagatctttgtgggaggtttggcatcatccgtgacagaggctgagttcaaaaagtattttgctcagtttgggatgatcactgatgttgtggtgatgtatgaccacagaacccagcggcctagaggctttgggttcatttcatatgactctgaggaagctgttgacaaagtactgcagaagacattccacgaactcaatggtaagatggtggaggtcaaactggctgttcctaaggatatggctctcaacacaatgcggaaccaaatgaatgtaaatagctttggcactagtagaatcagttcattactgaatgagtacacccagggattcagcccgagtccaatctctggttatggagtgaaacctgaagttaggtacagtccagcagtaggtaataggggaggattctcaccgtttggacatggatacggaatcgagctgaattttgagccaaaccagactcagaactacggttctggttccagtggaggctttggacgaccctttagccctggatatgctgcgagtctcggcaggttcggtagccaaatggagtcgggaggagctagtgttgggaacggttctgtcctaaatgcagcaccaaagaaccatttatggggaaatggtggtctaggttacatgtcaaactctccgatatcaagaagcagcttcagtggaaactctggaatgtcttcactaggcagcattggtgacaactggggaacagttgcacgtgcacgcagtagctaccacggtgagagaggaggtgtaggattagaagcaatgagaggagttcatgttggtggttacagcagcggctcaagcatcttggaggcagactctctgtacagcgactcgatgtggctttcgctgcctgcaaaggcagaggaaggattgggaatgggaccattggacttcatgtctagaggaccagctggatacatcaacaggcaaccaaacggaggaattgcagcttagagaagtgacaaatctataccatggagatcagatgattgcagaagagagtttttagaagaggaaaaaagtttattaaaaaaaaaaaaattattggtaccaaaaagcttaaagcttttatttactttttactattttgatttgttgttatagctttcttttcacccttttttctaatttggggttttgtttcttttgtttttatcgttaaagaaaaaagatgtaaacttgagtgatataaaaagagacaaagaaacaatgaagtgt

SEQ ID NO: 89660 - protein, 431 aa, Arabidopsis thaliana; identical to SEQ ID NO: 26118
  peptide (1)..(431): Ceres Seq. ID no. 12719865
  misc_feature (108)..(178): Pfam Name: RNA recognition motif. (a.k.a. RRM, RBD, or RNP domain) Pfam Description: RNA recognition motif. (a.k.a. RRM, RBD, or RNP
  misc_feature (1)..(431): Homolog of NCBI NO: 18422817 NR Description: heterogeneous nuclear ribonucleoprotein (hnRNP), protein id: At5g47620.1, supported by cDNA: 1876. [Arabidopsis
  misc_feature (1)..(431): Homolog of NCBI NO: 21553963 NR Description: RNA-binding protein-like [Arabidopsis thaliana]
  misc_feature (1)..(357): Homolog of NCBI NO: 9758790 NR Description: RNA-binding protein-like [Arabidopsis thaliana]
  misc_feature (1)..(374): Homolog of NCBI NO: 6648193 NR Description: putative RNA-binding protein [Arabidopsis
  misc_feature (1)..(374): Homolog of NCBI NO: 15292697 NR Description: putative RNA-binding protein [Arabidopsis
  misc_feature (1)..(374): Homolog of NCBI NO: 30680456 NR Description: heterogeneous nuclear ribonucleoprotein (hnRNP),
  misc_feature (1)..(374): Homolog of NCBI NO: 18398061 NR Description: heterogeneous nuclear ribonucleoprotein (hnRNP), protein id: At3g07810.1, supported by cDNA: gi_15292696, by cDNA: gi_16930692 [Arabidopsis thaliana]
  misc_feature (1)..(380): Homolog of NCBI NO: 38175737 NR Description: putative heterogeneous nuclear ribonucleoprotein
  misc_feature (1)..(398): Homolog of NCBI NO: 18416794 NR Description: heterogeneous nuclear ribonucleoprotein (hnRNP), protein id: At4g26650.1, supported by cDNA: gi_16930502, by cDNA: gi_20453244 [Arabidopsis thaliana]
  misc_feature (7)..(398): Homolog of NCBI NO: 7487039 NR Description: hypothetical protein T15N24.100 - Arabidopsis

SEQ ID NO: 89661 - protein, 429 aa, Arabidopsis thaliana; identical to SEQ ID NO: 26119
  peptide (1)..(429): Ceres Seq. ID no. 12719866
  misc_feature (106)..(176): Pfam Name: RNA recognition motif. (a.k.a. RRM, RBD, or RNP domain) Pfam Description: RNA recognition motif. (a.k.a. RRM, RBD, or RNP
  misc_feature (1)..(429): Homolog of NCBI NO: 18422817 NR Description: heterogeneous nuclear ribonucleoprotein (hnRNP), protein id: At5g47620.1, supported by cDNA: 1876. [Arabidopsis
  misc_feature (1)..(429): Homolog of NCBI NO: 21553963 NR Description: RNA-binding protein-like [Arabidopsis thaliana]
  misc_feature (1)..(355): Homolog of NCBI NO: 9758790 NR Description: RNA-binding protein-like [Arabidopsis thaliana]
  misc_feature (1)..(372): Homolog of NCBI NO: 6648193 NR Description: putative RNA-binding protein [Arabidopsis
  misc_feature (1)..(372): Homolog of NCBI NO: 18398061 NR Description: heterogeneous nuclear ribonucleoprotein (hnRNP), protein id: At3g07810.1, supported by cDNA: gi_15292696, by cDNA: gi_16930692 [Arabidopsis thaliana]
  misc_feature (1)..(372): Homolog of NCBI NO: 30680456 NR Description: heterogeneous nuclear ribonucleoprotein (hnRNP),
  misc_feature (1)..(372): Homolog of NCBI NO: 15292697 NR Description: putative RNA-binding protein [Arabidopsis
  misc_feature (1)..(378): Homolog of NCBI NO: 38175737 NR Description: putative heterogeneous nuclear ribonucleoprotein
  misc_feature (1)..(396): Homolog of NCBI NO: 18416794 NR Description: heterogeneous nuclear ribonucleoprotein (hnRNP), protein id: At4g26650.1, supported by cDNA: gi_16930502, by cDNA: gi_20453244 [Arabidopsis thaliana]
  misc_feature (5)..(396): Homolog of NCBI NO: 7487039 NR Description: hypothetical protein T15N24.100 - Arabidopsis

SEQ ID NO: 89662 - protein, 394 aa, Arabidopsis thaliana; identical to SEQ ID NO: 26120
  peptide (1)..(394): Ceres Seq. ID no. 12719867
  misc_feature (71)..(141): Pfam Name: RNA recognition motif. (a.k.a. RRM, RBD, or RNP domain) Pfam Description: RNA recognition motif. (a.k.a. RRM, RBD, or RNP
  misc_feature (1)..(394): Homolog of NCBI NO: 18422817 NR Description: heterogeneous nuclear ribonucleoprotein (hnRNP), protein id: At5g47620.1, supported by cDNA: 1876. [Arabidopsis
  misc_feature (1)..(394): Homolog of NCBI NO: 21553963 NR Description: RNA-binding protein-like [Arabidopsis thaliana]
  misc_feature (1)..(320): Homolog of NCBI NO: 9758790 NR Description: RNA-binding protein-like [Arabidopsis thaliana]
  misc_feature (1)..(337): Homolog of NCBI NO: 6648193 NR Description: putative RNA-binding protein [Arabidopsis
  misc_feature (1)..(337): Homolog of NCBI NO: 18398061 NR Description: heterogeneous nuclear ribonucleoprotein (hnRNP), protein id: At3g07810.1, supported by cDNA: gi_15292696, by cDNA: gi_16930692 [Arabidopsis thaliana]
  misc_feature (1)..(337): Homolog of NCBI NO: 15292697 NR Description: putative RNA-binding protein [Arabidopsis
  misc_feature (1)..(337): Homolog of NCBI NO: 30680456 NR Description: heterogeneous nuclear ribonucleoprotein (hnRNP),
  misc_feature (1)..(343): Homolog of NCBI NO: 38175737 NR Description: putative heterogeneous nuclear ribonucleoprotein
  misc_feature (1)..(361): Homolog of NCBI NO: 18416794 NR Description: heterogeneous nuclear ribonucleoprotein (hnRNP), protein id: At4g26650.1, supported by cDNA: gi_16930502, by cDNA: gi_20453244 [Arabidopsis thaliana]
  misc_feature (1)..(361): Homolog of NCBI NO: 7487039 NR Description: hypothetical protein T15N24.100 - Arabidopsis

SEQ ID NO: 89663 - DNA, 942 bp, Arabidopsis thaliana
  misc_feature (1)..(942): Ceres Seq. ID no. 12719872
  misc_feature: MA Experiment ID: 108462 Result: Down-regulated in Transcription
  misc_feature: MA Experiment 108462 PARAMETER Experiment Name: At_Germinating_Seeds_cDNA_P Parameter: Age (day) Value: 2 vs. 0
  misc_feature: MA Experiment 108462 PARAMETER Experiment Name: At_Germinating_Seeds_cDNA_P Parameter: Tissue Value: Germinating Seeds
  misc_feature: MA Experiment ID: 108463 Result: Down-regulated in Transcription
  misc_feature: MA Experiment 108463 PARAMETER Experiment Name: At_Germinating_Seeds_cDNA_P Parameter: Age (day) Value: 3 vs. 0
  misc_feature: MA Experiment 108463 PARAMETER Experiment Name: At_Germinating_Seeds_cDNA_P Parameter: Tissue Value: Germinating Seeds
  misc_feature: MA Experiment ID: 108464 Result: Down-regulated in Transcription
  misc_feature: MA Experiment 108464 PARAMETER Experiment Name: At_Germinating_Seeds_cDNA_P Parameter: Age (day) Value: 4 vs. 0
  misc_feature: MA Experiment 108464 PARAMETER Experiment Name: At_Germinating_Seeds_cDNA_P Parameter: Tissue Value: Germinating Seeds
  misc_feature: MA Experiment ID: 108573 Result: Down-regulated in Transcription
  misc_feature: MA Experiment 108573 PARAMETER Experiment Name: At_Drought_cDNA_P Parameter: Timepoint (hr) Value: 6
  misc_feature: MA Experiment 108573 PARAMETER Experiment Name: At_Drought_cDNA_P Parameter: Tissue Value: Aerial
  misc_feature: MA Experiment 108573 PARAMETER Experiment Name: At_Drought_cDNA_P Parameter: Treatment Value: Drought vs. No Drought
  misc_feature: MA Experiment ID: 20000224 Result: Up-regulated in Transcription
  misc_feature: MA Experiment ID: 20000227 Result: Up-regulated in Transcription
  misc_feature: MA Experiment 20000227 PARAMETER Experiment Name: At_Root-Tips-vs-Tops_P Parameter: Tissue Value: Root Tips vs. Root Tops
  misc_feature: MA Experiment ID: 20000234 Result: Up-regulated in Transcription
  misc_feature: MA Experiment 20000234 PARAMETER Experiment Name: At_Siliques_P Parameter: Age (day) Value: 21
  misc_feature: MA Experiment 20000234 PARAMETER Experiment Name: At_Siliques_P Parameter: Organism Value: A. thaliana
  misc_feature: MA Experiment 20000234 PARAMETER Experiment Name: At_Siliques_P Parameter: Plant Line Value: WS
  misc_feature: MA Experiment 20000234 PARAMETER Experiment Name: At_Siliques_P Parameter: Tissue Value: Less Than 5mm Siliques vs. Whole Plant
  misc_feature: MA Experiment ID: 20001560 Result: Up-regulated in Transcription
  misc_feature: MA Experiment 20001560 PARAMETER Experiment Name: At_Drought_Soil_Dry_P Parameter: Age (day) Value: 28
  misc_feature: MA Experiment 20001560 PARAMETER Experiment Name: At_Drought_Soil_Dry_P Parameter: Organism Value: A. thaliana
  misc_feature: MA Experiment 20001560 PARAMETER Experiment Name: At_Drought_Soil_Dry_P Parameter: Plant Line Value: WS
  misc_feature: MA Experiment 20001560 PARAMETER Experiment Name: At_Drought_Soil_Dry_P Parameter: Post Timepoint (hr) Value: None
  misc_feature: MA Experiment 20001560 PARAMETER Experiment Name: At_Drought_Soil_Dry_P Parameter: Post-Treatment Value: None
  misc_feature: MA Experiment 20001560 PARAMETER Experiment Name: At_Drought_Soil_Dry_P Parameter: Timepoint (day) Value: 14
  misc_feature: MA Experiment 20001560 PARAMETER Experiment Name: At_Drought_Soil_Dry_P Parameter: Treatment Value: Drought vs. No Drought
aggggtgactctcgaacacgatgctctgaagactgaaaaaggcgtaaacttttttcacctggctagggttcttggtcgtcgttaactggcatctagtatggctttctgcactaaacttggcggtcactggaaacaaggggtaaatgttccagtgtcatcaatgctcggttctcttcgctacatgtccacaaaactttatattggtggcctgtcccctggaactgacgagcactccttgaaggacgctttctctagcttcaatggagtgacagaggcaagagtcatgacaaacaaagtgaccgggaggtctagaggttatggatttgttaacttcataagcgaggattctgccaactctgctatttcagcaatgaatggacaggagctgaatgggtttaacataagtgtgaacgttgcaaaagattggccaagtttgccattgtctttggatgagagtatagaagaagctgagaagaaagaaaataagatgatgagccgatctgtatggaaagatccattcgttgatgcgttcctgatgaagaagaagaatgcagctctgaacaggaaaatatggtcaaggagatcgacgattcttcccgagtatgttgattcggcggtgagaatctacaacggcaaaactcatgtgcgttgtaagatcacagaggggaaagttgggcataaattcggagagtttgcgtttacaagaaaagtgaagaagcatgctaaagcaaagtagcatctttgagaatgaattggtcagctgcttgaaaggattgtgttgaaaagccaaaaacgaatcaaatcaataaattctcaataggtaaaactcattagctcacatgatcatgtagacgaatattgagctttagaaagtctttagttttcttgtcgatttcgtatttttggaccacaaaagtgccaatgttattttggaattcgatt

SEQ ID NO: 89664 - protein, 212 aa, Arabidopsis thaliana; identical to SEQ ID NO: 25892
  peptide (1)..(212): Ceres Seq. ID no. 12719873
  misc_feature (134)..(208): Pfam Name: Ribosomal protein S19 Pfam Description: Ribosomal protein S19
  misc_feature (1)..(212): Homolog of NCBI NO: 8809615 NR Description: 40S ribosomal protein S19 [Arabidopsis thaliana]
  misc_feature (1)..(212): Homolog of NCBI NO: 18422781 NR Description: 40S ribosomal protein S19, mitochondrial protein id: At5g47320.1, supported by cDNA: gi_15028320, by cDNA: gi_20259154 [Arabidopsis thaliana]
  misc_feature (1)..(212): Homolog of NCBI NO: 2129722 NR Description: ribosomal protein S19 precursor, mitochondrial - thaliana >gi|457760|emb|CAA54951.1| ribosomal protein S19
  misc_feature (1)..(116): Homolog of NCBI NO: 15229525 NR Description: glycine-rich RNA-binding protein; protein id: supported by cDNA: 18903., supported by cDNA: gi_17979515,
  misc_feature (1)..(116): Homolog of NCBI NO: 21553972 NR Description: glycine-rich RNA binding protein, putative
  misc_feature (1)..(114): Homolog of NCBI NO: 2826811 NR Description: AtGRP2 [Arabidopsis thaliana]
  misc_feature (1)..(114): Homolog of NCBI NO: 15236359 NR Description: glycine-rich RNA-binding protein AtGRP2; protein At4g13850.1, supported by cDNA: 16314., supported by cDNA:
  misc_feature (1)..(114): Homolog of NCBI NO: 30682622 NR Description: glycine-rich RNA-binding protein (AtGRP2)
  misc_feature (1)..(114): Homolog of NCBI NO: 7439994 NR Description: glycine-rich RNA-binding protein - garden pea
  misc_feature (16)..(114): Homolog of NCBI NO: 322514 NR Description: glycine-rich RNA-binding protein (clone A81) -

SEQ ID NO: 89665 - protein, 191 aa, Arabidopsis thaliana; identical to SEQ ID NO: 25893
  peptide (1)..(191): Ceres Seq. ID no. 12719874
  misc_feature (113)..(187): Pfam Name: Ribosomal protein S19 Pfam Description: Ribosomal protein S19
  misc_feature (1)..(191): Homolog of NCBI NO: 8809615 NR Description: 40S ribosomal protein S19 [Arabidopsis thaliana]
  misc_feature (1)..(191): Homolog of NCBI NO: 18422781 NR Description: 40S ribosomal protein S19, mitochondrial protein id: At5g47320.1, supported by cDNA: gi_15028320, by cDNA: gi_20259154 [Arabidopsis thaliana]
  misc_feature (1)..(191): Homolog of NCBI NO: 2129722 NR Description: ribosomal protein S19 precursor, mitochondrial - thaliana >gi|457760|emb|CAA54951.1| ribosomal protein S19
  misc_feature (1)..(95): Homolog of NCBI NO: 15229525 NR Description: glycine-rich RNA-binding protein; protein id: supported by cDNA: 18903., supported by cDNA: gi_17979515,
  misc_feature (1)..(95): Homolog of NCBI NO: 21553972 NR Description: glycine-rich RNA binding protein, putative
  misc_feature (1)..(93): Homolog of NCBI NO: 2826811 NR Description: AtGRP2 [Arabidopsis thaliana]
  misc_feature (1)..(93): Homolog of NCBI NO: 15236359 NR Description: glycine-rich RNA-binding protein AtGRP2; protein At4g13850.1, supported by cDNA: 16314., supported by cDNA:
  misc_feature (1)..(93): Homolog of NCBI NO: 30682622 NR Description: glycine-rich RNA-binding protein (AtGRP2)
  misc_feature (1)..(93): Homolog of NCBI NO: 7439994 NR Description: glycine-rich RNA-binding protein - garden pea
  misc_feature (1)..(93): Homolog of NCBI NO: 322514 NR Description: glycine-rich RNA-binding protein (clone A81) -

SEQ ID NO: 89666 - protein, 184 aa, Arabidopsis thaliana; identical to SEQ ID NO: 25894
  peptide (1)..(184): Ceres Seq. ID no. 12719875
  misc_feature (106)..(180): Pfam Name: Ribosomal protein S19 Pfam Description: Ribosomal protein S19
  misc_feature (1)..(184): Homolog of NCBI NO: 8809615 NR Description: 40S ribosomal protein S19 [Arabidopsis thaliana]
  misc_feature (1)..(184): Homolog of NCBI NO: 18422781 NR Description: 40S ribosomal protein S19, mitochondrial protein id: At5g47320.1, supported by cDNA: gi_15028320, by cDNA: gi_20259154 [Arabidopsis thaliana]
  misc_feature (1)..(184): Homolog of NCBI NO: 2129722 NR Description: ribosomal protein S19 precursor, mitochondrial - thaliana >gi|457760|emb|CAA54951.1| ribosomal protein S19
  misc_feature (1)..(88): Homolog of NCBI NO: 15229525 NR Description: glycine-rich RNA-binding protein; protein id: supported by cDNA: 18903., supported by cDNA: gi_17979515,
  misc_feature (1)..(88): Homolog of NCBI NO: 21553972 NR Description: glycine-rich RNA binding protein, putative
  misc_feature (1)..(86): Homolog of NCBI NO: 2826811 NR Description: AtGRP2 [Arabidopsis thaliana]
  misc_feature (1)..(86): Homolog of NCBI NO: 15236359 NR Description: glycine-rich RNA-binding protein AtGRP2; protein At4g13850.1, supported by cDNA: 16314., supported by cDNA:
  misc_feature (1)..(86): Homolog of NCBI NO: 30682622 NR Description: glycine-rich RNA-binding protein (AtGRP2)
  misc_feature (1)..(86): Homolog of NCBI NO: 7439994 NR Description: glycine-rich RNA-binding protein - garden pea
  misc_feature (1)..(86): Homolog of NCBI NO: 322514 NR Description: glycine-rich RNA-binding protein (clone A81) -

SEQ ID NO: 89667 - DNA, 680 bp, Arabidopsis thaliana
  misc_feature (1)..(680): Ceres Seq. ID no. 12719880
  misc_feature: MA Experiment ID: 20000071 Result: Down-regulated in Transcription
  misc_feature: MA Experiment 20000071 PARAMETER Experiment Name: At_100uM_ABA_Mutants_cDNA_P Parameter: Plant Line Value: CS8104
  misc_feature: MA Experiment 20000071 PARAMETER Experiment Name: At_100uM_ABA_Mutants_cDNA_P Parameter: Timepoint (hr) Value: 6
  misc_feature: MA Experiment 20000071 PARAMETER Experiment Name: At_100uM_ABA_Mutants_cDNA_P Parameter: Tissue Value: Aerial
  misc_feature: MA Experiment 20000071 PARAMETER Experiment Name: At_100uM_ABA_Mutants_cDNA_P Parameter: Treatment Value: 100uM ABA vs. No Treatment
  misc_feature: MA Experiment ID: 20000437 Result: Down-regulated in Transcription
  misc_feature: MA Experiment 20000437 PARAMETER Experiment Name: At_Drought_P Parameter: Age (day) Value: 8
  misc_feature: MA Experiment 20000437 PARAMETER Experiment Name: At_Drought_P Parameter: Organism Value: A. thaliana
  misc_feature: MA Experiment 20000437 PARAMETER Experiment Name: At_Drought_P Parameter: Plant Line Value: WS
  misc_feature: MA Experiment 20000437 PARAMETER Experiment Name: At_Drought_P Parameter: Timepoint (hr) Value: 24
  misc_feature: MA Experiment 20000437 PARAMETER Experiment Name: At_Drought_P Parameter: Tissue Value: Whole Plant
  misc_feature: MA Experiment 20000437 PARAMETER Experiment Name: At_Drought_P Parameter: Treatment Value: Drought vs. No Drought
  misc_feature: MA Experiment ID: 20001557 Result: Up-regulated in Transcription
  misc_feature: MA Experiment 20001557 PARAMETER Experiment Name: At_Drought_Soil_Dry_P Parameter: Age (day) Value: 27
  misc_feature: MA Experiment 20001557 PARAMETER Experiment Name: At_Drought_Soil_Dry_P Parameter: Organism Value: A. thaliana
  misc_feature: MA Experiment 20001557 PARAMETER Experiment Name: At_Drought_Soil_Dry_P Parameter: Plant Line Value: WS
  misc_feature: MA Experiment 20001557 PARAMETER Experiment Name: At_Drought_Soil_Dry_P Parameter: Post Timepoint (hr) Value: 3
  misc_feature: MA Experiment 20001557 PARAMETER Experiment Name: At_Drought_Soil_Dry_P Parameter: Post-Treatment Value: Re-Water vs. No Drought
  misc_feature: MA Experiment 20001557 PARAMETER Experiment Name: At_Drought_Soil_Dry_P Parameter: Timepoint (day) Value: 13
  misc_feature: MA Experiment 20001557 PARAMETER Experiment Name: At_Drought_Soil_Dry_P Parameter: Treatment Value: Drought vs. No Drought
  misc_feature: MA Experiment ID: 20001558 Result: Up-regulated in Transcription
  misc_feature: MA Experiment 20001558 PARAMETER Experiment Name: At_Drought_Soil_Dry_P Parameter: Age (day) Value: 27
  misc_feature: MA Experiment 20001558 PARAMETER Experiment Name: At_Drought_Soil_Dry_P Parameter: Organism Value: A. thaliana
  misc_feature: MA Experiment 20001558 PARAMETER Experiment Name: At_Drought_Soil_Dry_P Parameter: Plant Line Value: WS
  misc_feature: MA Experiment 20001558 PARAMETER Experiment Name: At_Drought_Soil_Dry_P Parameter: Post Timepoint (hr) Value: 6
  misc_feature: MA Experiment 20001558 PARAMETER Experiment Name: At_Drought_Soil_Dry_P Parameter: Post-Treatment Value: Re-Water vs. No Drought
  misc_feature: MA Experiment 20001558 PARAMETER Experiment Name: At_Drought_Soil_Dry_P Parameter: Timepoint (day) Value: 13
  misc_feature: MA Experiment 20001558 PARAMETER Experiment Name: At_Drought_Soil_Dry_P Parameter: Treatment Value: Drought vs. No Drought
aggaagggtttatagattaggtttttaagtcgcacctctctctctcactgccgcatcttttcttagggttcttgtttcgctatctcttaaacacaaacagctctgtccgaataatctctcttcaagtacctcttttttctgattctgtatatcgccatgaattactgatttccctctctataaacccatcaaagtaaaccaatttctcctgtgacttgtacctaactcgatcttaccagactggtgatggcgtctttgaaccctttcgatcttctaggagatgatgctgaggatccaagccagctcgctgtggctttgtctcagaaagtcgagaaagctgctgctgctgttcagcctcctaaggccgctaagttcccaaccaagccggctcctccttctcaagcagtgagggagtcgaggaatgctcctcaaggaggtcgtggtgggactggtggacgaggaaaccaaaggtatgcaaaagaagctgcagctccggcgattggagacacagctcagttcccttcgttgggctagtaaagacccctggtccttcagcctcgctatctctgtctttcgtttctctttggttgaattttgttagttttataattttttgttacactttctgaaggtcttttctgcgaaactattacgttttttaagttatgaaaaaaattatt

SEQ ID NO: 89668 - protein, 95 aa, Arabidopsis thaliana
  peptide (1)..(95): Ceres Seq. ID no. 12719881
  misc_feature (1)..(72): Homolog of NCBI NO: 15238039 NR Description: putative protein; protein id: At5g47210.1, by cDNA: 19104. [Arabidopsis thaliana] gene_id:MQL5.6~pir||G71444~similar to unknown protein
  misc_feature (1)..(72): Homolog of NCBI NO: 21553991 NR Description: nuclear RNA binding protein A-like protein
  misc_feature (1)..(84): Homolog of NCBI NO: 15236552 NR Description: nuclear RNA binding protein A-like protein; id: At4g17520.1, supported by cDNA: 35156., supported by cDNA: supported by cDNA: gi_19698830 [Arabidopsis thaliana]
  misc_feature (1)..(84): Homolog of NCBI NO: 21593013 NR Description: nuclear RNA binding protein A-like protein
  misc_feature (1)..(79): Homolog of NCBI NO: 15235894 NR Description: nuclear antigen homolog; protein id: At4g16830.1, by cDNA: 118826., supported by cDNA: gi_17380879, supported by gi_20465928 [Arabidopsis thaliana] >gi|7488137|pir||F71435
  misc_feature (1)..(78): Homolog of NCBI NO: 39725278 NR Description: salt tolerance protein 2 [Beta vulgaris]
  misc_feature (1)..(78): Homolog of NCBI NO: 6492266 NR Description: nuclear RNA binding protein A [Spinacia oleracea]
  misc_feature (1)..(79): Homolog of NCBI NO: 21537052 NR Description: nuclear antigen homolog [Arabidopsis thaliana]
  misc_feature (1)..(75): Homolog of NCBI NO: 7488863 NR Description: probable transcription factor - fava bean
  misc_feature (1)..(75): Homolog of NCBI NO: 39725276 NR Description: salt tolerance protein 1 [Beta vulgaris]
MASLNPFDLLGDDAEDPSQLAVALSQKVEKAAAAVQPPKAAKFPTKPAPPSQAVRESRNAPQGGRGGTGGRGNQRYAKEAAAPAIGDTAQFPSLG

SEQ ID NO: 89669 - protein, 59 aa, Arabidopsis thaliana
  peptide (1)..(59): Ceres Seq. ID no. 12719882
MLLKEVVVGLVDEETKGMQKKLQLRRLETQLSSLRWASKDPWSFSLAISVFRFSLVEFC

SEQ ID NO: 89670 - DNA, 1077 bp, Arabidopsis thaliana
  misc_feature (1)..(1077): Ceres Seq. ID no. 12719900
  misc_feature: MA Experiment ID: 20000234 Result: Up-regulated in Transcription
  misc_feature: MA Experiment 20000234 PARAMETER Experiment Name: At_Siliques_P Parameter: Age (day) Value: 21
  misc_feature: MA Experiment 20000234 PARAMETER Experiment Name: At_Siliques_P Parameter: Organism Value: A. thaliana
  misc_feature: MA Experiment 20000234 PARAMETER Experiment Name: At_Siliques_P Parameter: Plant Line Value: WS
  misc_feature: MA Experiment 20000234 PARAMETER Experiment Name: At_Siliques_P Parameter: Tissue Value: Less Than 5mm Siliques vs. Whole Plant
  misc_feature: MA Experiment ID: 20000264 Result: Up-regulated in Transcription
  misc_feature: MA Experiment 20000264 PARAMETER Experiment Name: At_Open_Flower_P Parameter: Age (day) Value: 21
  misc_feature: MA Experiment 20000264 PARAMETER Experiment Name: At_Open_Flower_P Parameter: Plant Line Value: WS
  misc_feature: MA Experiment 20000264 PARAMETER Experiment Name: At_Open_Flower_P Parameter: Tissue Value: Open Flower vs. Whole Plant
  misc_feature: MA Experiment ID: 20000495 Result: Up-regulated in Transcription
  misc_feature: MA Experiment 20000495 PARAMETER Experiment Name: At_Guard_Cells_P Parameter: Harvest Date Value: 8/2/2002
  misc_feature: MA Experiment 20000495 PARAMETER Experiment Name: At_Guard_Cells_P Parameter: Organism Value: A. thaliana
  misc_feature: MA Experiment 20000495 PARAMETER Experiment Name: At_Guard_Cells_P Parameter: Tissue Value: Guard Cells vs. Leaves
  misc_feature: MA Experiment ID: 20001451 Result: Up-regulated in Transcription
  misc_feature: MA Experiment 20001451 PARAMETER Experiment Name: At_Far-red-induction_P Parameter: Age (day) Value: 7
  misc_feature: MA Experiment 20001451 PARAMETER Experiment Name: At_Far-red-induction_P Parameter: Light Value: Far-red vs. White
  misc_feature: MA Experiment 20001451 PARAMETER Experiment Name: At_Far-red-induction_P Parameter: Organism Value: A. thaliana
  misc_feature: MA Experiment 20001451 PARAMETER Experiment Name: At_Far-red-induction_P Parameter: Plant Line Value: Columbia
  misc_feature: MA Experiment 20001451 PARAMETER Experiment Name: At_Far-red-induction_P Parameter: Timepoint (hr) Value: 24
  misc_feature: MA Experiment 20001451 PARAMETER Experiment Name: At_Far-red-induction_P Parameter: Tissue Value: Whole Plant
atgaagatgaagacagttcttgtaatcataaactgtatattcttggccattggaaactgtggaggccctctaatgatgcgtctctacttccaaaatggtggcgaaaggatctggtttccaagcttccttcaaaccgttggttgtccactcattttcttccctcttctcttatctttcctccgccgtcgtcgttgccttgaagaacaagaaacgactccatttttcctcatgaaacctcctctctttatcgccgctatcgttgttggtttgctcgtgggatttgacaattacctctactcttacgggttagcttatatccctgtttctactgcgtctttgatcatctccgcgcaattaggcttcactgctctctttgcattttttatggtgaagcaaaagttcacacctttcactataaacgctatcgttttgctcactggtggtgccgtagtccttgcccttaactctgatagtgacaagcttgcaaacgagacacacaaggaatatgttgttgggttcatcatgactcttggtgcagctcttctctatgggtttatattgccacttgtcgagctttcttacaagaaatctggtcagcgaatcacgtatacgctcgcgctcgagttccagatggtcttatgctttgctgccacttgtgtctgcctcgtggggatgctagccgctggcgatttcaaggtaaaacatgctttgtttattttcaagaatagggtgatagcaggagaagcaagagattttaagcttggagagtctttgtactatgtggtgattgtgttcacggccataatctggcaagcattttttgtgggagctattgggttgatcttctgtgcatcgtctctggtctctggaattatggtcagtgctctgcttccggtgacggtgatcttggccgtcatttgcttccaggagaagtttcaggcggggaaaggtgtcgctttggctctctccctctggggatcagtctcttatttctatggacaggttaaatccgaggagaagactaaggctcaggatacacaactgtctcagcttccagttactgattatgtagcttaa

SEQ ID NO: 89671 - protein, 358 aa, Arabidopsis thaliana
  peptide (1)..(358): Ceres Seq. ID no. 12719901
  misc_feature (155)..(347): Pfam Name: Domain of unknown function, DUF250 Pfam Description: Domain of unknown function, DUF250
  misc_feature (1)..(358): Homolog of NCBI NO: 30685825 NR Description: purine permease family [Arabidopsis thaliana]
  misc_feature (3)..(358): Homolog of NCBI NO: 25350217 NR Description: hypothetical protein At2g33750 [imported] - thaliana >gi|1707019|gb|AAC69140.1| hypothetical protein
  misc_feature (3)..(358): Homolog of NCBI NO: 15217873 NR Description: purine permease; protein id: At1g28230.1, by cDNA: gi_7620006 [Arabidopsis thaliana]
  misc_feature (3)..(358): Homolog of NCBI NO: 7620007 NR Description: purine permease [Arabidopsis thaliana]
  misc_feature (3)..(355): Homolog of NCBI NO: 15217872 NR Description: purine permease, putative; protein id: At1g28220.1
  misc_feature (5)..(344): Homolog of NCBI NO: 34902418 NR Description: Hypothetical protein [Oryza sativa (japonica group)] >gi|24756874|gb|AAN64138.1| Hypothetical protein [Oryza
  misc_feature (6)..(332): Homolog of NCBI NO: 15219436 NR Description: hypothetical protein; protein id: At1g44750.1, by cDNA: gi_17065411 [Arabidopsis thaliana]
  misc_feature (8)..(347): Homolog of NCBI NO: 18491221 NR Description: unknown protein [Arabidopsis thaliana]
  misc_feature (17)..(355): Homolog of NCBI NO: 15236799 NR Description: putative protein; protein id: At4g18220.1
  misc_feature (8)..(347): Homolog of NCBI NO: 15236796 NR Description: putative protein; protein id: At4g18200.1
MKMKTVLVIINCIFLAIGNCGGPLMMRLYFQNGGERIWFPSFLQTVGCPLIFFPLLLSFLRRRRCLEEQETTPFFLMKPPLFIAAIVVGLLVGFDNYLYSYGLAYIPVSTASLIISAQLGFTALFAFFMVKQKFTPFTINAIVLLTGGAVVLALNSDSDKLANETHKEYVVGFIMTLGAALLYGFILPLVELSYKKSGQRITYTLALEFQMVLCFAATCVCLVGMLAAGDFKVKHALFIFKNRVIAGEARDFKLGESLYYVVIVFTAIIWQAFFVGAIGLIFCASSLVSGIMVSALLPVTVILAVICFQEKFQAGKGVALALSLWGSVSYFYGQVKSEEKTKAQDTQLSQLPVTDYVA

SEQ ID NO: 89672 - protein, 356 aa, Arabidopsis thaliana
  peptide (1)..(356): Ceres Seq. ID no. 12719902
  misc_feature (153)..(345): Pfam Name: Domain of unknown function, DUF250 Pfam Description: Domain of unknown function, DUF250
  misc_feature (1)..(356): Homolog of NCBI NO: 30685825 NR Description: purine permease family [Arabidopsis thaliana]
  misc_feature (1)..(356): Homolog of NCBI NO: 25350217 NR Description: hypothetical protein At2g33750 [imported] - thaliana >gi|1707019|gb|AAC69140.1| hypothetical protein
  misc_feature (1)..(356): Homolog of NCBI NO: 15217873 NR Description: purine permease; protein id: At1g28230.1, by cDNA: gi_7620006 [Arabidopsis thaliana]
  misc_feature (1)..(356): Homolog of NCBI NO: 7620007 NR Description: purine permease [Arabidopsis thaliana]
  misc_feature (1)..(353): Homolog of NCBI NO: 15217872 NR Description: purine permease, putative; protein id: At1g28220.1
  misc_feature (3)..(342): Homolog of NCBI NO: 34902418 NR Description: Hypothetical protein [Oryza sativa (japonica group)] >gi|24756874|gb|AAN64138.1| Hypothetical protein [Oryza
  misc_feature (4)..(330): Homolog of NCBI NO: 15219436 NR Description: hypothetical protein; protein id: At1g44750.1, by cDNA: gi_17065411 [Arabidopsis thaliana]
  misc_feature (6)..(345): Homolog of NCBI NO: 18491221 NR Description: unknown protein [Arabidopsis thaliana]
  misc_feature (15)..(353): Homolog of NCBI NO: 15236799 NR Description: putative protein; protein id: At4g18220.1
  misc_feature (6)..(345): Homolog of NCBI NO: 15236796 NR Description: putative protein; protein id: At4g18200.1
MKTVLVIINCIFLAIGNCGGPLMMRLYFQNGGERIWFPSFLQTVGCPLIFFPLLLSFLRRRRCLEEQETTPFFLMKPPLFIAAIVVGLLVGFDNYLYSYGLAYIPVSTASLIISAQLGFTALFAFFMVKQKFTPFTINAIVLLTGGAVVLALNSDSDKLANETHKEYVVGFIMTLGAALLYGFILPLVELSYKKSGQRITYTLALEFQMVLCFAATCVCLVGMLAAGDFKVKHALFIFKNRVIAGEARDFKLGESLYYVVIVFTAIIWQAFFVGAIGLIFCASSLVSGIMVSALLPVTVILAVICFQEKFQAGKGVALALSLWGSVSYFYGQVKSEEKTKAQDTQLSQLPVTDYVA

SEQ ID NO: 89673 - protein, 334 aa, Arabidopsis thaliana
  peptide (1)..(334): Ceres Seq. ID no. 12719903
  misc_feature (131)..(323): Pfam Name: Domain of unknown function, DUF250 Pfam Description: Domain of unknown function, DUF250
  misc_feature (1)..(334): Homolog of NCBI NO: 30685825 NR Description: purine permease family [Arabidopsis thaliana]
  misc_feature (1)..(334): Homolog of NCBI NO: 25350217 NR Description: hypothetical protein At2g33750 [imported] - thaliana >gi|1707019|gb|AAC69140.1| hypothetical protein
  misc_feature (1)..(334): Homolog of NCBI NO: 15217873 NR Description: purine permease; protein id: At1g28230.1, by cDNA: gi_7620006 [Arabidopsis thaliana]
  misc_feature (1)..(334): Homolog of NCBI NO: 7620007 NR Description: purine permease [Arabidopsis thaliana]
  misc_feature (1)..(331): Homolog of NCBI NO: 15217872 NR Description: purine permease, putative; protein id: At1g28220.1
  misc_feature (1)..(320): Homolog of NCBI NO: 34902418 NR Description: Hypothetical protein [Oryza sativa (japonica group)] >gi|24756874|gb|AAN64138.1| Hypothetical protein [Oryza
  misc_feature (1)..(308): Homolog of NCBI NO: 15219436 NR Description: hypothetical protein; protein id: At1g44750.1, by cDNA: gi_17065411 [Arabidopsis thaliana]
  misc_feature (1)..(323): Homolog of NCBI NO: 18491221 NR Description: unknown protein [Arabidopsis thaliana]
  misc_feature (1)..(331): Homolog of NCBI NO: 15236799 NR Description: putative protein; protein id: At4g18220.1
  misc_feature (1)..(323): Homolog of NCBI NO: 15236796 NR Description: putative protein; protein id: At4g18200.1
MMRLYFQNGGERIWFPSFLQTVGCPLIFFPLLLSFLRRRRCLEEQETTPFFLMKPPLFIAAIVVGLLVGFDNYLYSYGLAYIPVSTASLIISAQLGFTALFAFFMVKQKFTPFTINAIVLLTGGAVVLALNSDSDKLANETHKEYVVGFIMTLGAALLYGFILPLVELSYKKSGQRITYTLALEFQMVLCFAATCVCLVGMLAAGDFKVKHALFIFKNRVIAGEARDFKLGESLYYVVIVFTAIIWQAFFVGAIGLIFCASSLVSGIMVSALLPVTVILAVICFQEKFQAGKGVALALSLWGSVSYFYGQVKSEEKTKAQDTQLSQLPVTDYVA

SEQ ID NO: 89674 - DNA, 1752 bp, Arabidopsis thaliana
  misc_feature (1)..(1752): Ceres Seq. ID no. 12719904
  misc_feature: MA Experiment ID: 20000180 Result: Down-regulated in Transcription
  misc_feature: MA Experiment 20000180 PARAMETER Experiment Name: At_Germinating_Seeds_P Parameter: Age (hr) Value: 24 vs. 0
  misc_feature: MA Experiment 20000180 PARAMETER Experiment Name: At_Germinating_Seeds_P Parameter: Tissue Value: Germinating Seeds
atgacaacaaaagtggcggcaaattctgctgcttacgaagccatagttcgagcaggtcctcgtgtaaagcaacttcaacaagttcatgctcacctcattgtcacgggttatggtcgtagccggagtctcttgacaaagctcattactttagcttgttccgctcgagccatcgcctatactcatcttctcttcctctccgttccccttcccgatgacttcctcttcaattcagttatcaaatcgacttctaagttgcgtttacctttgcattgcgttgcttattaccgtcgtatgttatcttcaaacgtctctccgagtaactacactttcacctctgttatcaagtcttgcgccgatctctctgccttgagaatcggaaaaggtgttcattgtcatgcagtggtttctgggtttggattggatacttacgttcaggctgctttggtgacgttttattcaaagtgtggcgatatggaaggtgcacgccaagtgttcgatagaatgcctgagaagtctattgtggcgtggaattcgttggtttctggatttgagcaaaatgggttggcggatgaagcaattcaggtgttttatcagatgcgagaatcagggtttgagccggattcagcgacgtttgtgagccttctctcggcttgtgcccaaactggtgcggtaagtttaggatcttgggtgcatcagtacattatcagtgagggtcttgacctgaatgttaaacttggtactgcgttgattaacttgtattctaggtgcggtgacgttggaaaagcccgggaagtctttgacaagatgaaggaaactaatgtggctgcttggacggcaatgatctctgcttatggtactcatggatatggccaacaagctgtagagctgtttaataaaatggaggatgattgcggtccaatcccaaataacgtaacatttgtagctgttttatcggcttgcgctcatgctggactcgttgaggaaggacgttcagtctacaagagaatgaccaagagctatagattgatcccaggagtggaacatcatgtttgtatggtagatatgcttgggcgggctggatttcttgacgaagcttataaattcatacatcagcttgatgctacagggaaagcaactgctccagcattgtggacagcgatgcttggagcatgcaagatgcacaggaactatgatctcggtgtagaaattgccaagcgtctcatagcccttgagccagataatcccggtcatcatgtcatgctctcaaatatctatgccttgagtggcaaaacagatgaagtatcacacataagagatggaatgatgaggaataaccttagaaaacaggttggctatagcgtaattgaagtggaaaataagacatatatgttcagtatgggtgatgagtctcatcaagagactggagaaatttatcggtatctggaaactttgataagccggtgtaaggaaatagggtatgcaccggtttctgaagaagttatgcaccaagttgaggaagaggaaaaggagttcgcacttagataccacagcgagaagcttgctgtagcattcggtttgttgaaaactgtagatgtagccattacaattgtgaagaatctacggatctgtgaggattgtcattctgctttcaagtatatttctattgtgtccaatagacagatcactgttagggataagctccggtttcaccattttcaaaatggttcttgttcatgtctggactattggtaa

SEQ ID NO: 89675 - protein, 583 aa, Arabidopsis thaliana
  peptide (1)..(583): Ceres Seq. ID no. 12719905
  misc_feature (275)..(309): Pfam Name: PPR repeat Pfam Description: PPR repeat
  misc_feature (1)..(583): Homolog of NCBI NO: 15226158 NR Description: hypothetical protein; protein id: At2g33760.1
  misc_feature (18)..(583): Homolog of NCBI NO: 34393394 NR Description: putative pentatricopeptide (PPR)
  misc_feature (22)..(568): Homolog of NCBI NO: 7486979 NR Description: hypothetical protein T13K14.230 - Arabidopsis
  misc_feature (20)..(583): Homolog of NCBI NO: 15234831 NR Description: putative protein; protein id: At4g30700.1
  misc_feature (15)..(583): Homolog of NCBI NO: 15226299 NR Description: hypothetical protein; protein id: At2g01510.1
  misc_feature (26)..(583): Homolog of NCBI NO: 15220337 NR Description: hypothetical protein; protein id: At1g11290.1
  misc_feature (26)..(583): Homolog of NCBI NO: 34897884 NR Description: Similar to Arabidopsis thaliana DNA chromosome 4,
  misc_feature (45)..(583): Homolog of NCBI NO: 15223099 NR Description: unknown protein; protein id: At1g08070.1 thaliana] >gi|8778839|gb|AAF79838.1|AC026875_18 T6D22.15
  misc_feature (22)..(583): Homolog of NCBI NO: 15227067 NR Description: hypothetical protein; protein id: At2g02980.1
  misc_feature (4)..(582): Homolog of NCBI NO: 37534806 NR Description: putative PPR-repeat containing protein [Oryza
MTTKVAANSAAYEAIVRAGPRVKQLQQVHAHLIVTGYGRSRSLLTKLITLACSARAIAYTHLLFLSVPLPDDFLFNSVIKSTSKLRLPLHCVAYYRRMLSSNVSPSNYTFTSVIKSCADLSALRIGKGVHCHAVVSGFGLDTYVQAALVTFYSKCGDMEGARQVFDRMPEKSIVAWNSLVSGFEQNGLADEAIQVFYQMRESGFEPDSATFVSLLSACAQTGAVSLGSWVHQYIISEGLDLNVKLGTALINLYSRCGDVGKAREVFDKMKETNVAAWTAMISAYGTHGYGQQAVELFNKMEDDCGPIPNNVTFVAVLSACAHAGLVEEGRSVYKRMTKSYRLIPGVEHHVCMVDMLGRAGFLDEAYKFIHQLDATGKATAPALWTAMLGACKMHRNYDLGVEIAKRLIALEPDNPGHHVMLSNIYALSGKTDEVSHIRDGMMRNNLRKQVGYSVIEVENKTYMFSMGDESHQETGEIYRYLETLISRCKEIGYAPVSEEVMHQVEEEEKEFALRYHSEKLAVAFGLLKTVDVAITIVKNLRICEDCHSAFKYISIVSNRQITVRDKLRFHHFQNGSCSCLDYW

SEQ ID NO: 89676 - protein, 486 aa, Arabidopsis thaliana
  peptide (1)..(486): Ceres Seq. ID no. 12719906
  misc_feature (178)..(212): Pfam Name: PPR repeat Pfam Description: PPR repeat
  misc_feature (1)..(486): Homolog of NCBI NO: 15226158 NR Description: hypothetical protein; protein id: At2g33760.1
  misc_feature (1)..(486): Homolog of NCBI NO: 34393394 NR Description: putative pentatricopeptide (PPR)
  misc_feature (1)..(471): Homolog of NCBI NO: 7486979 NR Description: hypothetical protein T13K14.230 - Arabidopsis
  misc_feature (1)..(486): Homolog of NCBI NO: 15234831 NR Description: putative protein; protein id: At4g30700.1
  misc_feature (1)..(486): Homolog of NCBI NO: 15226299 NR Description: hypothetical protein; protein id: At2g01510.1
  misc_feature (1)..(486): Homolog of NCBI NO: 15220337 NR Description: hypothetical protein; protein id: At1g11290.1
  misc_feature (1)..(486): Homolog of NCBI NO: 34897884 NR Description: Similar to Arabidopsis thaliana DNA chromosome 4,
  misc_feature (1)..(486): Homolog of NCBI NO: 15223099 NR Description: unknown protein; protein id: At1g08070.1 thaliana] >gi|8778839|gb|AAF79838.1|AC026875_18 T6D22.15
  misc_feature (1)..(486): Homolog of NCBI NO: 15227067 NR Description: hypothetical protein; protein id: At2g02980.1
  misc_feature (1)..(485): Homolog of NCBI NO: 37534806 NR Description: putative PPR-repeat containing protein [Oryza
MLSSNVSPSNYTFTSVIKSCADLSALRIGKGVHCHAVVSGFGLDTYVQAALVTFYSKCGDMEGARQVFDRMPEKSIVAWNSLVSGFEQNGLADEAIQVFYQMRESGFEPDSATFVSLLSACAQTGAVSLGSWVHQYIISEGLDLNVKLGTALINLYSRCGDVGKAREVFDKMKETNVAAWTAMISAYGTHGYGQQAVELFNKMEDDCGPIPNNVTFVAVLSACAHAGLVEEGRSVYKRMTKSYRLIPGVEHHVCMVDMLGRAGFLDEAYKFIHQLDATGKATAPALWTAMLGACKMHRNYDLGVEIAKRLIALEPDNPGHHVMLSNIYALSGKTDEVSHIRDGMMRNNLRKQVGYSVIEVENKTYMFSMGDESHQETGEIYRYLETLISRCKEIGYAPVSEEVMHQVEEEEKEFALRYHSEKLAVAFGLLKTVDVAITIVKNLRICEDCHSAFKYISIVSNRQITVRDKLRFHHFQNGSCSCLDYW

SEQ ID NO: 89677 - protein, 426 aa, Arabidopsis thaliana
  peptide (1)..(426): Ceres Seq. ID no. 12719907
  misc_feature (118)..(152): Pfam Name: PPR repeat Pfam Description: PPR repeat
  misc_feature (1)..(426): Homolog of NCBI NO: 15226158 NR Description: hypothetical protein; protein id: At2g33760.1
  misc_feature (1)..(426): Homolog of NCBI NO: 34393394 NR Description: putative pentatricopeptide (PPR)
  misc_feature (1)..(411): Homolog of NCBI NO: 7486979 NR Description: hypothetical protein T13K14.230 - Arabidopsis
  misc_feature (1)..(426): Homolog of NCBI NO: 15234831 NR Description: putative protein; protein id: At4g30700.1
  misc_feature (1)..(426): Homolog of NCBI NO: 15226299 NR Description: hypothetical protein; protein id: At2g01510.1
  misc_feature (1)..(426): Homolog of NCBI NO: 15220337 NR Description: hypothetical protein; protein id: At1g11290.1
  misc_feature (1)..(426): Homolog of NCBI NO: 34897884 NR Description: Similar to Arabidopsis thaliana DNA chromosome 4,
  misc_feature (1)..(426): Homolog of NCBI NO: 15223099 NR Description: unknown protein; protein id: At1g08070.1 thaliana] >gi|8778839|gb|AAF79838.1|AC026875_18 T6D22.15
  misc_feature (1)..(426): Homolog of NCBI NO: 15227067 NR Description: hypothetical protein; protein id: At2g02980.1
  misc_feature (1)..(425): Homolog of NCBI NO: 37534806 NR Description: putative PPR-repeat containing protein [Oryza
MEGARQVFDRMPEKSIVAWNSLVSGFEQNGLADEAIQVFYQMRESGFEPDSATFVSLLSACAQTGAVSLGSWVHQYIISEGLDLNVKLGTALINLYSRCGDVGKAREVFDKMKETNVAAWTAMISAYGTHGYGQQAVELFNKMEDDCGPIPNNVTFVAVLSACAHAGLVEEGRSVYKRMTKSYRLIPGVEHHVCMVDMLGRAGFLDEAYKFIHQLDATGKATAPALWTAMLGACKMHRNYDLGVEIAKRLIALEPDNPGHHVMLSNIYALSGKTDEVSHIRDGMMRNNLRKQVGYSVIEVENKTYMFSMGDESHQETGEIYRYLETLISRCKEIGYAPVSEEVMHQVEEEEKEFALRYHSEKLAVAFGLLKTVDVAITIVKNLRICEDCHSAFKYISIVSNRQITVRDKLRFHHFQNGSCSCLDYW

SEQ ID NO: 89678 - DNA, 660 bp, Arabidopsis thaliana
  misc_feature (1)..(660): Ceres Seq. ID no. 12719936
  misc_feature: MA Experiment ID: 20000355 Result: Up-regulated in Transcription
  misc_feature: MA Experiment 20000355 PARAMETER Experiment Name: At_Siliques_Sub_P Parameter: Age (day) Value: 21
  misc_feature: MA Experiment 20000355 PARAMETER Experiment Name: At_Siliques_Sub_P Parameter: Organism Value: A. thaliana
  misc_feature: MA Experiment 20000355 PARAMETER Experiment Name: At_Siliques_Sub_P Parameter: Plant Line Value: WS
  misc_feature: MA Experiment 20000355 PARAMETER Experiment Name: At_Siliques_Sub_P Parameter: Tissue Value: Less Than 5mm Siliques vs. Whole Plant
  misc_feature: MA Experiment ID: 20000440 Result: Up-regulated in Transcription
  misc_feature: MA Experiment 20000440 PARAMETER Experiment Name: At_Closed-Flower__Sub_P Parameter: Tissue Value: Closed Flower vs. Whole Plant
atgggaacatataaagctgaagacgattacgattacctcttcaaggttgtcttaacgggagattccggtgtaggaaaatcaaatctgctatcccgattcaccagaaacgactttagccacgactcacgctcgaccatcggtgttgaatttgccacacgtaggggcatccaggtcgacgacaagattgtcaaagctcagatatgggacactgccggccaagaaaggtatcgagccatcacgagcgcttattaccgaggagccgttggtgcattactagtctacgacgtgacacggcacgtgacattcgagaacgttgaaagatggctaaaggagctaagagaccacacggacgcaaacactgtgattatgctcgtaggtaacaaagctgatttgaatcaccttcgagccatctctacggaagaagtgaaagattttgcagagagagagaacactttctttatggagacttcggcactcgaagctataaatgtagaaaacgctttcacagaggttcttacacagatttacagagttgtaagcaagaaggctcttgatgctggagatgatccaaccactgccttgcctaaaggacaaatgattaacgtcggaagtagagatgatgtttcagccgtcaagaaatctggttgctgcgcgacatag

SEQ ID NO: 89679 - protein, 219 aa, Arabidopsis thaliana
  peptide (1)..(219): Ceres Seq. ID no. 12719937
  misc_feature (15)..(177): Pfam Name: Ras family Pfam Description: Ras family
  misc_feature (1)..(219): Homolog of NCBI NO: 15226182 NR Description: GTP-binding protein, putative; protein id:
  misc_feature (1)..(218): Homolog of NCBI NO: 15218719 NR Description: GTP-binding protein, putative; protein id: [Arabidopsis thaliana] >gi|6560749|gb|AAF16749.1|AC010155_2
  misc_feature (1)..(218): Homolog of NCBI NO: 10764861 NR Description: F1K23.21 [Arabidopsis thaliana]
  misc_feature (1)..(218): Homolog of NCBI NO: 7438432 NR Description: GTP-binding protein - garden pea
  misc_feature (1)..(218): Homolog of NCBI NO: 15239462 NR Description: GTP-binding protein, putative; protein id:
  misc_feature (1)..(219): Homolog of NCBI NO: 15232477 NR Description: Ras family GTP-binding protein, putative; protein
  misc_feature (1)..(219): Homolog of NCBI NO: 1370156 NR Description: RAB11H [Lotus japonicus]
  misc_feature (2)..(219): Homolog of NCBI NO: 3024504 NR Description: RAS-RELATED PROTEIN RAB11B
  misc_feature (11)..(218): Homolog of NCBI NO: 7438389 NR Description: GTP-binding protein, ras-like (clone vfa-ypt3a) - bean (fragment) >gi|452357|emb|CAA82708.1| guanine nucleotide
  misc_feature (1)..(218): Homolog of NCBI NO: 15233873 NR Description: membrane-bound small GTP-binding - like protein;
MGTYKAEDDYDYLFKVVLTGDSGVGKSNLLSRFTRNDFSHDSRSTIGVEFATRRGIQVDDKIVKAQIWDTAGQERYRAITSAYYRGAVGALLVYDVTRHVTFENVERWLKELRDHTDANTVIMLVGNKADLNHLRAISTEEVKDFAERENTFFMETSALEAINVENAFTEVLTQIYRVVSKKALDAGDDPTTALPKGQMINVGSRDDVSAVKKSGCCAT

SEQ ID NO: 89680 - DNA, 1969 bp, Arabidopsis thaliana
  misc_feature (1)..(1969): Ceres Seq. ID no. 12719938
  misc_feature: MA Experiment ID: 20000794 Result: Up-regulated in Transcription
  misc_feature: MA Experiment 20000794 PARAMETER Experiment Name: At_Petals_P Parameter: Age (day) Value: 23-25 days
  misc_feature: MA Experiment 20000794 PARAMETER Experiment Name: At_Petals_P Parameter: Plant Line Value: WS
  misc_feature: MA Experiment 20000794 PARAMETER Experiment Name: At_Petals_P Parameter: Tissue Value: Petals vs. Whole plant
atcaaccaaaacctcaacctaacttagggcaaaaagcttttttttttaagtgtcatattgccaaaagttccattggtctgcctttcaagcgagccttggctagcggacaactgttgtaattcactgcaattccatgaagtcgggagcatcagccgcgtcgccaacggcgaaaagcttcaattttggatcttccagactcttagccttggcgcagcagctgcgtgtatacaagccgccgctttcgtcatccttcgacgagagggaagagctgcttgcgtacaaggaaagcaccaggaaatcgataacccacgttgggtttcaggaatctatggctccggtgaggttcagaccgaagaaagctgctgtcttgatatgtctcttcgaaggagacgatggtgatttgcgtgtgattcttactaagaggtcttccacattgtctactcactcaggagaagtttctttgccaggtggtaaagcagaagagcatgataaggatgatgggattactgcaactagagaggcagaggaagagattggattagacccttcgcttgttgatgttgttgctttcctcgaaccatttctatctcagcatctgcttagagtaattcctgtggtaggaatattatgggacagaaaagcattcaatccaacaccaaatcctgcagaagtggaagccgtgcttgatgcaccctttgaaatgtttctgaaggatgagaaccggagatccgaggagtttgattggatgggagaaaagcatttggtccacttctttgattacaaaacaggagatagtgattatgttatatggggcttaactgcaagaatcttgattagagctgcaacagtggtttatcaacgaccacctgctttcattgaacagaaacctaacttgaagtactccaaaatgaaccaggctactcgtttatatggatggctgaagccgctggcaaatttacatgaatcttgtgaaaatggaagattactaggtcatgtcccagcatactgcttgcgttatctagttggaatatcatcaagatgatcgtgtttgtgcatatctcaatcgtttgtgctgaaagacaagctcattcttggaaagtctttcagcatgctttttggatgactctggtatcggaaatcaacagatttaagttatctaattcatctgatgcaagagcaaaggttaaaaagctaaagggaaggctgctgcgtagatccatcttctagatgctttgtttagctctttcatgttctaatgtctcaagagccactgatgcagctccttgaaaacatgggtagctcccgttttgcaagaagtgtgttttttggtgaaaccccaaccatttgacctgaaagtaaagctcgttcttgaaaaatctgccagcaggtgggtagtgcttgtgctgctttctgatgttttccggtttttctggtggaacaaattaatacatctgatgcgaaagaaaagctcgttcttgccttcttggagaatctggcagcatagcgctttgtcatggtcaatgtgtgtctgatattatctggttggaaatctcaatcatatgacctgatagcaaaggagcatttgacttcagttaaaagagctacagacacgctgttctaataggtctgagatgaaattccgtgtaactttggtctcctgaagaagccaagtggtcgataaagccatcactcgtcttatggaacaaaggagaatgcctaaatataatgaatcaacgttgccaaaactaagatggatgataaaccttataagttagggatcaaattcaataaaaaataaacaatgagaaaagtaaaacagtacatgtatgaagtgacacacgagtgaaaaagaagactaaatcgtcttattgtactccaaacattgatcctctacatttctttaggttatatgtaattatgcatgctacaacttaagcatattgtcgtaatttagtgatatattggagcc

SEQ ID NO: 89681 - protein, 302 aa, Arabidopsis thaliana
  peptide (1)..(302): Ceres Seq. ID no. 12719939
  misc_feature (74)..(207): Pfam Name: NUDIX domain Pfam Description: NUDIX domain
  misc_feature (1)..(302): Homolog of NCBI NO: 18403412 NR Description: expressed protein; protein id: At2g33980.1, by cDNA: gi_13430755, supported by cDNA: gi_15293224 [Arabidopsis >gi|13430756|gb|AAK26000.1|AF360290_1 unknown protein
  misc_feature (1)..(259): Homolog of NCBI NO: 18396900 NR Description: Expressed protein; protein id: At1g28960.1,
  misc_feature (1)..(259): Homolog of NCBI NO: 30690557 NR Description: MutT/nudix family protein [Arabidopsis thaliana]
  misc_feature (1)..(259): Homolog of NCBI NO: 26450576 NR Description: unknown protein [Arabidopsis thaliana]
  misc_feature (1)..(259): Homolog of NCBI NO: 10764850 NR Description: F1K23.5 [Arabidopsis thaliana]
  misc_feature (1)..(153): Homolog of NCBI NO: 25370770 NR Description: hypothetical protein At2g33980 [imported] -
  misc_feature (67)..(258): Homolog of NCBI NO: 40253324 NR Description: putative phosphohydrolase [Oryza sativa (japonica group)] >gi|40253358|dbj|BAD05290.1| putative phosphohydrolase
  misc_feature (71)..(253): Homolog of NCBI NO: 21553389 NR Description: unknown [Arabidopsis thaliana]
  misc_feature (71)..(253): Homolog of NCBI NO: 15242543 NR Description: putative protein; protein id: At5g45940.1, by cDNA: 141753. [Arabidopsis thaliana] gb|AAF24540.1~gene_id:K15I22.14~similar to unknown protein
  misc_feature (51)..(241): Homolog of NCBI NO: 23470438 NR Description: hypothetical protein [Pseudomonas syringae pv.
MKSGASAASPTAKSFNFGSSRLLALAQQLRVYKPPLSSSFDEREELLAYKESTRKSITHVGFQESMAPVRFRPKKAAVLICLFEGDDGDLRVILTKRSSTLSTHSGEVSLPGGKAEEHDKDDGITATREAEEEIGLDPSLVDVVAFLEPFLSQHLLRVIPVVGILWDRKAFNPTPNPAEVEAVLDAPFEMFLKDENRRSEEFDWMGEKHLVHFFDYKTGDSDYVIWGLTARILIRAATVVYQRPPAFIEQKPNLKYSKMNQATRLYGWLKPLANLHESCENGRLLGHVPAYCLRYLVGISSR

SEQ ID NO: 89682 - protein, 237 aa, Arabidopsis thaliana
  peptide (1)..(237): Ceres Seq. ID no. 12719940
  misc_feature (9)..(142): Pfam Name: NUDIX domain Pfam Description: NUDIX domain
  misc_feature (1)..(237): Homolog of NCBI NO: 18403412 NR Description: expressed protein; protein id: At2g33980.1, by cDNA: gi_13430755, supported by cDNA: gi_15293224 [Arabidopsis >gi|13430756|gb|AAK26000.1|AF360290_1 unknown protein
  misc_feature (1)..(194): Homolog of NCBI NO: 18396900 NR Description: Expressed protein; protein id: At1g28960.1,
  misc_feature (1)..(194): Homolog of NCBI NO: 30690557 NR Description: MutT/nudix family protein [Arabidopsis thaliana]
  misc_feature (1)..(194): Homolog of NCBI NO: 26450576 NR Description: unknown protein [Arabidopsis thaliana]
  misc_feature (1)..(194): Homolog of NCBI NO: 10764850 NR Description: F1K23.5 [Arabidopsis thaliana]
  misc_feature (1)..(88): Homolog of NCBI NO: 25370770 NR Description: hypothetical protein At2g33980 [imported] -
  misc_feature (2)..(193): Homolog of NCBI NO: 40253324 NR Description: putative phosphohydrolase [Oryza sativa (japonica group)] >gi|40253358|dbj|BAD05290.1| putative phosphohydrolase
  misc_feature (6)..(188): Homolog of NCBI NO: 21553389 NR Description: unknown [Arabidopsis thaliana]
  misc_feature (6)..(188): Homolog of NCBI NO: 15242543 NR Description: putative protein; protein id: At5g45940.1, by cDNA: 141753. [Arabidopsis thaliana] gb|AAF24540.1~gene_id:K15I22.14~similar to unknown protein
  misc_feature (1)..(176): Homolog of NCBI NO: 23470438 NR Description: hypothetical protein [Pseudomonas syringae pv.
MAPVRFRPKKAAVLICLFEGDDGDLRVILTKRSSTLSTHSGEVSLPGGKAEEHDKDDGITATREAEEEIGLDPSLVDVVAFLEPFLSQHLLRVIPVVGILWDRKAFNPTPNPAEVEAVLDAPFEMFLKDENRRSEEFDWMGEKHLVHFFDYKTGDSDYVIWGLTARILIRAATVVYQRPPAFIEQKPNLKYSKMNQATRLYGWLKPLANLHESCENGRLLGHVPAYCLRYLVGISSR

SEQ ID NO: 89683 - DNA, 750 bp, Arabidopsis thaliana
  misc_feature (1)..(750): Ceres Seq. ID no. 12719941
  misc_feature: MA Experiment ID: 20000184 Result: Down-regulated in Transcription
  misc_feature: MA Experiment 20000184 PARAMETER Experiment Name: At_Shoots__P Parameter: Age (day) Value: 7
  misc_feature: MA Experiment 20000184 PARAMETER Experiment Name: At_Shoots__P Parameter: Tissue Value: Shoots vs. Whole Plant
  misc_feature: MA Experiment ID: 20000264 Result: Down-regulated in Transcription
  misc_feature: MA Experiment 20000264 PARAMETER Experiment Name: At_Open_Flower_P Parameter: Age (day) Value: 21
  misc_feature: MA Experiment 20000264 PARAMETER Experiment Name: At_Open_Flower_P Parameter: Plant Line Value: WS
  misc_feature: MA Experiment 20000264 PARAMETER Experiment Name: At_Open_Flower_P Parameter: Tissue Value: Open Flower vs. Whole Plant
  misc_feature: MA Experiment ID: 20000265 Result: Down-regulated in Transcription
  misc_feature: MA Experiment 20000265 PARAMETER Experiment Name: At_Open_Flower_P Parameter: Age (day) Value: 21
  misc_feature: MA Experiment 20000265 PARAMETER Experiment Name: At_Open_Flower_P Parameter: Plant Line Value: WS
  misc_feature: MA Experiment 20000265 PARAMETER Experiment Name: At_Open_Flower_P Parameter: Tissue Value: Closed Flower vs. Whole Plant
  misc_feature: MA Experiment ID: 20000286 Result: Down-regulated in Transcription
  misc_feature: MA Experiment 20000286 PARAMETER Experiment Name: At_Open_Flower_P Parameter: Age (day) Value: 21
  misc_feature: MA Experiment 20000286 PARAMETER Experiment Name: At_Open_Flower_P Parameter: Plant Line Value: WS
  misc_feature: MA Experiment 20000286 PARAMETER Experiment Name: At_Open_Flower_P Parameter: Tissue Value: Half Open vs. Whole Plant
  misc_feature: MA Experiment ID: 20000438 Result: Down-regulated in Transcription
  misc_feature: MA Experiment 20000438 PARAMETER Experiment Name: At_Shoots__P Parameter: Age (day) Value: 14
  misc_feature: MA Experiment 20000438 PARAMETER Experiment Name: At_Shoots__P Parameter: Tissue Value: Shoots vs. Whole Plant
  misc_feature: MA Experiment ID: 20000439 Result: Down-regulated in Transcription
  misc_feature: MA Experiment 20000439 PARAMETER Experiment Name: At_Roots__P Parameter: Age (day) Value: 14 vs. 21
  misc_feature: MA Experiment 20000439 PARAMETER Experiment Name: At_Roots__P Parameter: Organism Value: A. thaliana
  misc_feature: MA Experiment 20000439 PARAMETER Experiment Name: At_Roots__P Parameter: Tissue Value: Roots vs. Whole Plant
  misc_feature: MA Experiment ID: 20001247 Result: Up-regulated in Transcription
  misc_feature: MA Experiment 20001247 PARAMETER Experiment Name: At_Far-red-induction_P Parameter: Age (day) Value: 7
  misc_feature: MA Experiment 20001247 PARAMETER Experiment Name: At_Far-red-induction_P Parameter: Light Value: Far-red vs. White
  misc_feature: MA Experiment 20001247 PARAMETER Experiment Name: At_Far-red-induction_P Parameter: Organism Value: A. thaliana
  misc_feature: MA Experiment 20001247 PARAMETER Experiment Name: At_Far-red-induction_P Parameter: Plant Line Value: Columbia
  misc_feature: MA Experiment 20001247 PARAMETER Experiment Name: At_Far-red-induction_P Parameter: Timepoint (hr) Value: 1
  misc_feature: MA Experiment 20001247 PARAMETER Experiment Name: At_Far-red-induction_P Parameter: Tissue Value: Whole Plant
  misc_feature: MA Experiment ID: 20001451 Result: Up-regulated in Transcription
  misc_feature: MA Experiment 20001451 PARAMETER Experiment Name: At_Far-red-induction_P Parameter: Age (day) Value: 7
  misc_feature: MA Experiment 20001451 PARAMETER Experiment Name: At_Far-red-induction_P Parameter: Light Value: Far-red vs. White
  misc_feature: MA Experiment 20001451 PARAMETER Experiment Name: At_Far-red-induction_P Parameter: Organism Value: A. thaliana
  misc_feature: MA Experiment 20001451 PARAMETER Experiment Name: At_Far-red-induction_P Parameter: Plant Line Value: Columbia
  misc_feature: MA Experiment 20001451 PARAMETER Experiment Name: At_Far-red-induction_P Parameter: Timepoint (hr) Value: 24
  misc_feature: MA Experiment 20001451 PARAMETER Experiment Name: At_Far-red-induction_P Parameter: Tissue Value: Whole Plant
  misc_feature: MA Experiment ID: 20001905 Result: Down-regulated in Transcription
  misc_feature: MA Experiment 20001905 PARAMETER Experiment Name: At_Drought_Reproduction_P Parameter: Age (day) Value: 40
  misc_feature: MA Experiment 20001905 PARAMETER Experiment Name: At_Drought_Reproduction_P Parameter: Organism Value: A. thaliana
  misc_feature: MA Experiment 20001905 PARAMETER Experiment Name: At_Drought_Reproduction_P Parameter: Plant Line Value: WS
  misc_feature: MA Experiment 20001905 PARAMETER Experiment Name: At_Drought_Reproduction_P Parameter: Timepoint (day) Value: 10
  misc_feature: MA Experiment 20001905 PARAMETER Experiment Name: At_Drought_Reproduction_P Parameter: Tissue Value: Rosettes
  misc_feature: MA Experiment 20001905 PARAMETER Experiment Name: At_Drought_Reproduction_P Parameter: Treatment Value: Drought vs. No Drought
atgggttctgggaatttgattaaggcaataattagattgaagaagagtaaacaaggaactgaaaagaaaaaaactagtgctgtgaaaccaaaaaaaggttccaagaagaagggtacatcactagttactcgtagtgaggattgggctgctactcggattcagactgcttttaaagcctataaggctagaaaaagcttacggcgtctaaaaggaattgcaagagcaaagttatcaactgagaaacaatctgtgaagaaccaagctgtggtcacattgaggtatcttcactcatggagtaaaatacagtcagagataaaggctcgccgagtttgcatggtaaccgaatggcgactgaagaataaaagattagagcatcagcaaaagcttgaggcaaagcttcatgatgttgaggttgaatggaatggtgggtcagagacaaaagatgaaatcttggagaggatacttcaaagggaagaagcgacgattaagcgagaaagagccttggcatatgctttctctcatcagctaggaaacactaattggggttggagctggaaagagcgttggatatctgctcggccttgggaagtaagatattcagtgactcctaagaaaccaaagagctcaaagacagactcaaattcaccagcaaagagaacagtgtcattatcatcagttccagccaaaactccgtttcctggagctagaaacacagtgaaaccgcggagattgtcatttccaggtgcttga

SEQ ID NO: 89684 - protein, 249 aa, Arabidopsis thaliana
  peptide (1)..(249): Ceres Seq. ID no. 12719942
  misc_feature (47)..(67): Pfam Name: IQ calmodulin-binding motif Pfam Description: IQ calmodulin-binding motif
  misc_feature (1)..(249): Homolog of NCBI NO: 15226186 NR Description: putative SF16 protein {Helianthus annuus}; id: At2g33990.1 [Arabidopsis thaliana] >gi|25408319|pir||A84751
  misc_feature (1)..(241): Homolog of NCBI NO: 15232474 NR Description: hypothetical protein; protein id: At3g15050.1 thaliana] >gi|8777488|dbj|BAA97068.1| contains similarity to SF16
  misc_feature (46)..(175): Homolog of NCBI NO: 15225258 NR Description: putative SF16 protein {Helianthus annuus}; id: At2g26180.1 [Arabidopsis thaliana] >gi|25367166|pir||D84657
  misc_feature (160)..(231): Homolog of NCBI NO: 15225258 NR Description: putative SF16 protein {Helianthus annuus}; id: At2g26180.1 [Arabidopsis thaliana] >gi|25367166|pir||D84657
  misc_feature (46)..(239): Homolog of NCBI NO: 11994738 NR Description: contains similarity to SF16
  misc_feature (45)..(222): Homolog of NCBI NO: 15982840 NR Description: AT5g03040/F15A17_70 [Arabidopsis thaliana]
  misc_feature (46)..(247): Homolog of NCBI NO: 15231175 NR Description: unknown protein; protein id: At3g52290.1
  misc_feature (45)..(196): Homolog of NCBI NO: 18414094 NR Description: putative protein; protein id: At5g03040.1,
  misc_feature (46)..(237): Homolog of NCBI NO: 15232741 NR Description: putative SF16 protein; protein id: At3g09710.1 thaliana] >gi|6682249|gb|AAF23301.1|AC016661_26 putative SF16
  misc_feature (45)..(215): Homolog of NCBI NO: 11292162 NR Description: hypothetical protein F15A17.70 - Arabidopsis >gi|7413581|emb|CAB86071.1| putative protein [Arabidopsis
MGSGNLIKAIIRLKKSKQGTEKKKTSAVKPKKGSKKKGTSLVTRSEDWAATRIQTAFKAYKARKSLRRLKGIARAKLSTEKQSVKNQAVVTLRYLHSWSKIQSEIKARRVCMVTEWRLKNKRLEHQQKLEAKLHDVEVEWNGGSETKDEILERILQREEATIKRERALAYAFSHQLGNTNWGWSWKERWISARPWEVRYSVTPKKPKSSKTDSNSPAKRTVSLSSVPAKTPFPGARNTVKPRRLSFPGA

SEQ ID NO: 89685 - protein, 138 aa, Arabidopsis thaliana
  peptide (1)..(138): Ceres Seq. ID no. 12719943
  misc_feature (1)..(138): Homolog of NCBI NO: 15226186 NR Description: putative SF16 protein {Helianthus annuus}; id: At2g33990.1 [Arabidopsis thaliana] >gi|25408319|pir||A84751
  misc_feature (1)..(130): Homolog of NCBI NO: 15232474 NR Description: hypothetical protein; protein id: At3g15050.1 thaliana] >gi|8777488|dbj|BAA97068.1| contains similarity to SF16
  misc_feature (1)..(64): Homolog of NCBI NO: 15225258 NR Description: putative SF16 protein {Helianthus annuus}; id: At2g26180.1 [Arabidopsis thaliana] >gi|25367166|pir||D84657
  misc_feature (49)..(120): Homolog of NCBI NO: 15225258 NR Description: putative SF16 protein {Helianthus annuus}; id: At2g26180.1 [Arabidopsis thaliana] >gi|25367166|pir||D84657
  misc_feature (1)..(128): Homolog of NCBI NO: 11994738 NR Description: contains similarity to SF16
  misc_feature (1)..(111): Homolog of NCBI NO: 15982840 NR Description: AT5g03040/F15A17_70 [Arabidopsis thaliana]
  misc_feature (1)..(136): Homolog of NCBI NO: 15231175 NR Description: unknown protein; protein id: At3g52290.1
  misc_feature (1)..(85): Homolog of NCBI NO: 18414094 NR Description: putative protein; protein id: At5g03040.1,
  misc_feature (1)..(126): Homolog of NCBI NO: 15232741 NR Description: putative SF16 protein; protein id: At3g09710.1 thaliana] >gi|6682249|gb|AAF23301.1|AC016661_26 putative SF16
  misc_feature (1)..(104): Homolog of NCBI NO: 11292162 NR Description: hypothetical protein F15A17.70 - Arabidopsis >gi|7413581|emb|CAB86071.1| putative protein [Arabidopsis
MVTEWRLKNKRLEHQQKLEAKLHDVEVEWNGGSETKDEILERILQREEATIKRERALAYAFSHQLGNTNWGWSWKERWISARPWEVRYSVTPKKPKSSKTDSNSPAKRTVSLSSVPAKTPFPGARNTVKPRRLSFPGA

SEQ ID NO: 89686 - DNA, 1038 bp, Arabidopsis thaliana
  misc_feature (1)..(1038): Ceres Seq. ID no. 12719946
  misc_feature: MA Experiment ID: 20000306 Result: Up-regulated in Transcription
  misc_feature: MA Experiment 20000306 PARAMETER Experiment Name: At_Germinating_Seeds_Sub_P Parameter: Age (hr) Value: 6 vs. 0
  misc_feature: MA Experiment 20000306 PARAMETER Experiment Name: At_Germinating_Seeds_Sub_P Parameter: Organism Value: A. thaliana
  misc_feature: MA Experiment 20000306 PARAMETER Experiment Name: At_Germinating_Seeds_Sub_P Parameter: Plant Line Value: WS
  misc_feature: MA Experiment 20000306 PARAMETER Experiment Name: At_Germinating_Seeds_Sub_P Parameter: Tissue Value: Germinating Seeds
  misc_feature: MA Experiment ID: 20000307 Result: Up-regulated in Transcription
  misc_feature: MA Experiment 20000307 PARAMETER Experiment Name: At_Germinating_Seeds_Sub_P Parameter: Age (hr) Value: 24 vs. 0
  misc_feature: MA Experiment 20000307 PARAMETER Experiment Name: At_Germinating_Seeds_Sub_P Parameter: Organism Value: A. thaliana
  misc_feature: MA Experiment 20000307 PARAMETER Experiment Name: At_Germinating_Seeds_Sub_P Parameter: Plant Line Value: WS
  misc_feature: MA Experiment 20000307 PARAMETER Experiment Name: At_Germinating_Seeds_Sub_P Parameter: Tissue Value: Germinating Seeds
  misc_feature: MA Experiment ID: 20000314 Result: Up-regulated in Transcription
  misc_feature: MA Experiment 20000314 PARAMETER Experiment Name: At_14day_Shoots-Roots_Sub_P Parameter: Age (day) Value: 14
  misc_feature: MA Experiment 20000314 PARAMETER Experiment Name: At_14day_Shoots-Roots_Sub_P Parameter: Organism Value: A. thaliana
  misc_feature: MA Experiment 20000314 PARAMETER Experiment Name: At_14day_Shoots-Roots_Sub_P Parameter: Plant Line Value: WS
  misc_feature: MA Experiment 20000314 PARAMETER Experiment Name: At_14day_Shoots-Roots_Sub_P Parameter: Tissue Value: Roots vs. Whole Plant
  misc_feature: MA Experiment ID: 20000315 Result: Up-regulated in Transcription
  misc_feature: MA Experiment 20000315 PARAMETER Experiment Name: At_14day_Shoots-Roots_Sub_P Parameter: Age (day) Value: 14
  misc_feature: MA Experiment 20000315 PARAMETER Experiment Name: At_14day_Shoots-Roots_Sub_P Parameter: Organism Value: A. thaliana
  misc_feature: MA Experiment 20000315 PARAMETER Experiment Name: At_14day_Shoots-Roots_Sub_P Parameter: Plant Line Value: WS
  misc_feature: MA Experiment 20000315 PARAMETER Experiment Name: At_14day_Shoots-Roots_Sub_P Parameter: Tissue Value: Shoots vs. Whole Plant
atggcatcaatcatggtattggtcactgttttaatcattcttttcacgggtttcagaatctctcaagctacgtctcgtactgtcatctttcgcgagcagtcaatggttgataaacatgagcaatggatggctcgattttctcgtgaataccgtgatgagctcgagaaaaatatgagacgcgatgtgtttaagaagaacttgaagttcattgagaacttcaacaaaaaagggaacaaaagctacaagcttggtgtcaatgaattcgcggattggaccaacgaggagttcctagcaatacataccggactaaagggcctaactgaagtttccccatccaaggtggtcgccaaaacgatatcgtctcagacttggaacgtcagtgacatggtagtcgagagcaaggactggagagctgaaggagctgtcactcctgtcaagtaccaaggccaatgcggatgttgctgggcattttcggctgtagcagcagtggaaggtgtggctaagatcgccggcgggaaccttgtatctctgtccgaacaacagcttctagactgcgacagagagtacgaccgaggctgcgacggtgggataatgtcggacgctttcaactatgtagtccaaaatcgaggcatcgcatcagagaatgactactcttaccaaggatcagatgggggatgccggtccaatgcaagaccagctgcacgtatcagtggattccaaaccgtccctagcaacaacgagcgggccttgctcgaggctgtatcgaggcaaccagtctctgtgtcgatggacgcgactggggacgggttcatgcattactcgggaggagtatatgatgggccttgtgggaccagctcgaaccacgctgttacgtttgttgggtatggaacgagccaggatggaactaagtactggctggctaaaaactcttggggcgaaacttggggagaaaaaggttacattaggatccgaagagacgtggcttggcctcaaggcatgtgtggtgtagcacagtatgctttttatccggttgcgtaa

SEQ ID NO: 89687 - protein, 345 aa, Arabidopsis thaliana
  peptide (1)..(345): Ceres Seq. ID no. 12719947
  misc_feature (130)..(344): Pfam Name: Papain family cysteine protease Pfam Description: Papain family cysteine protease
  misc_feature (1)..(345): Homolog of NCBI NO: 18403438 NR Description: cysteine proteinase; protein id: At2g34080.1
  misc_feature (1)..(345): Homolog of NCBI NO: 30690594 NR Description: cysteine proteinase [Arabidopsis thaliana]
  misc_feature (19)..(345): Homolog of NCBI NO: 25289991 NR Description: cysteine proteinase (EC 3.4.22.-) [similarity] - thaliana >gi|9502421|gb|AAF88120.1|AC021043_13 Putative cysteine
  misc_feature (1)..(345): Homolog of NCBI NO: 18396939 NR Description: cysteine protease; protein id: At1g29080.1
  misc_feature (1)..(345): Homolog of NCBI NO: 18401420 NR Description: cysteine proteinase; protein id: At2g27420.1, by cDNA: gi_17381153, supported by cDNA: gi_20465848 [Arabidopsis >gi|25289995|pir||F84672 probable cysteine proteinase cysteine
  misc_feature (164)..(344): Homolog of NCBI NO: 25289992 NR Description: probable cysteine proteinase [imported] - thaliana >gi|9502426|gb|AAF88125.1|AC021043_18 Putative cysteine
  misc_feature (1)..(151): Homolog of NCBI NO: 25289992 NR Description: probable cysteine proteinase [imported] - thaliana >gi|9502426|gb|AAF88125.1|AC021043_18 Putative cysteine
  misc_feature (1)..(344): Homolog of NCBI NO: 18396952 NR Description: cysteine proteinase; protein id: At1g29110.1
  misc_feature (7)..(345): Homolog of NCBI NO: 18408828 NR Description: cysteine protease; protein id: At3g49340.1
  misc_feature (2)..(345): Homolog of NCBI NO: 24285904 NR Description: cysteine proteinase precursor [Ipomoea batatas]
MASIMVLVTVLIILFTGFRISQATSRTVIFREQSMVDKHEQWMARFSREYRDELEKNMRRDVFKKNLKFIENFNKKGNKSYKLGVNEFADWTNEEFLAIHTGLKGLTEVSPSKVVAKTISSQTWNVSDMVVESKDWRAEGAVTPVKYQGQCGCCWAFSAVAAVEGVAKIAGGNLVSLSEQQLLDCDREYDRGCDGGIMSDAFNYVVQNRGIASENDYSYQGSDGGCRSNARPAARISGFQTVPSNNERALLEAVSRQPVSVSMDATGDGFMHYSGGVYDGPCGTSSNHAVTFVGYGTSQDGTKYWLAKNSWGETWGEKGYIRIRRDVAWPQGMCGVAQYAFYPVA

SEQ ID NO: 89688 - protein, 341 aa, Arabidopsis thaliana
  peptide (1)..(341): Ceres Seq. ID no. 12719948
  misc_feature (126)..(340): Pfam Name: Papain family cysteine protease Pfam Description: Papain family cysteine protease
  misc_feature (1)..(341): Homolog of NCBI NO: 18403438 NR Description: cysteine proteinase; protein id: At2g34080.1
  misc_feature (1)..(341): Homolog of NCBI NO: 30690594 NR Description: cysteine proteinase [Arabidopsis thaliana]
  misc_feature (15)..(341): Homolog of NCBI NO: 25289991 NR Description: cysteine proteinase (EC 3.4.22.-) [similarity] - thaliana >gi|9502421|gb|AAF88120.1|AC021043_13 Putative cysteine
  misc_feature (1)..(341): Homolog of NCBI NO: 18396939 NR Description: cysteine protease; protein id: At1g29080.1
  misc_feature (1)..(341): Homolog of NCBI NO: 18401420 NR Description: cysteine proteinase; protein id: At2g27420.1, by cDNA: gi_17381153, supported by cDNA: gi_20465848 [Arabidopsis >gi|25289995|pir||F84672 probable cysteine proteinase cysteine
  misc_feature (160)..(340): Homolog of NCBI NO: 25289992 NR Description: probable cysteine proteinase [imported] - thaliana >gi|9502426|gb|AAF88125.1|AC021043_18 Putative cysteine
  misc_feature (1)..(147): Homolog of NCBI NO: 25289992 NR Description: probable cysteine proteinase [imported] - thaliana >gi|9502426|gb|AAF88125.1|AC021043_18 Putative cysteine
  misc_feature (1)..(340): Homolog of NCBI NO: 18396952 NR Description: cysteine proteinase; protein id: At1g29110.1
  misc_feature (3)..(341): Homolog of NCBI NO: 18408828 NR Description: cysteine protease; protein id: At3g49340.1
  misc_feature (1)..(341): Homolog of NCBI NO: 24285904 NR Description: cysteine proteinase precursor [Ipomoea batatas]
MVLVTVLIILFTGFRISQATSRTVIFREQSMVDKHEQWMARFSREYRDELEKNMRRDVFKKNLKFIENFNKKGNKSYKLGVNEFADWTNEEFLAIHTGLKGLTEVSPSKVVAKTISSQTWNVSDMVVESKDWRAEGAVTPVKYQGQCGCCWAFSAVAAVEGVAKIAGGNLVSLSEQQLLDCDREYDRGCDGGIMSDAFNYVVQNRGIASENDYSYQGSDGGCRSNARPAARISGFQTVPSNNERALLEAVSRQPVSVSMDATGDGFMHYSGGVYDGPCGTSSNHAVTFVGYGTSQDGTKYWLAKNSWGETWGEKGYIRIRRDVAWPQGMCGVAQYAFYPVA

SEQ ID NO: 89689 - protein, 311 aa, Arabidopsis thaliana
  peptide (1)..(311): Ceres Seq. ID no. 12719949
  misc_feature (96)..(310): Pfam Name: Papain family cysteine protease Pfam Description: Papain family cysteine protease
  misc_feature (1)..(311): Homolog of NCBI NO: 18403438 NR Description: cysteine proteinase; protein id: At2g34080.1
  misc_feature (1)..(311): Homolog of NCBI NO: 30690594 NR Description: cysteine proteinase [Arabidopsis thaliana]
  misc_feature (1)..(311): Homolog of NCBI NO: 25289991 NR Description: cysteine proteinase (EC 3.4.22.-) [similarity] - thaliana >gi|9502421|gb|AAF88120.1|AC021043_13 Putative cysteine
  misc_feature (1)..(311): Homolog of NCBI NO: 18396939 NR Description: cysteine protease; protein id: At1g29080.1
  misc_feature (1)..(311): Homolog of NCBI NO: 18401420 NR Description: cysteine proteinase; protein id: At2g27420.1, by cDNA: gi_17381153, supported by cDNA: gi_20465848 [Arabidopsis >gi|25289995|pir||F84672 probable cysteine proteinase cysteine
  misc_feature (130)..(310): Homolog of NCBI NO: 25289992 NR Description: probable cysteine proteinase [imported] - thaliana >gi|9502426|gb|AAF88125.1|AC021043_18 Putative cysteine
  misc_feature (1)..(117): Homolog of NCBI NO: 25289992 NR Description: probable cysteine proteinase [imported] - thaliana >gi|9502426|gb|AAF88125.1|AC021043_18 Putative cysteine
  misc_feature (1)..(310): Homolog of NCBI NO: 18396952 NR Description: cysteine proteinase; protein id: At1g29110.1
  misc_feature (1)..(311): Homolog of NCBI NO: 18408828 NR Description: cysteine protease; protein id: At3g49340.1
  misc_feature (1)..(311): Homolog of NCBI NO: 24285904 NR Description: cysteine proteinase precursor [Ipomoea batatas]
MVDKHEQWMARFSREYRDELEKNMRRDVFKKNLKFIENFNKKGNKSYKLGVNEFADWTNEEFLAIHTGLKGLTEVSPSKVVAKTISSQTWNVSDMVVESKDWRAEGAVTPVKYQGQCGCCWAFSAVAAVEGVAKIAGGNLVSLSEQQLLDCDREYDRGCDGGIMSDAFNYVVQNRGIASENDYSYQGSDGGCRSNARPAARISGFQTVPSNNERALLEAVSRQPVSVSMDATGDGFMHYSGGVYDGPCGTSSNHAVTFVGYGTSQDGTKYWLAKNSWGETWGEKGYIRIRRDVAWPQGMCGVAQYAFYPVA

SEQ ID NO: 89690 - DNA, 1509 bp, Arabidopsis thaliana
  misc_feature (1)..(1509): Ceres Seq. ID no. 12719957
  misc_feature: MA Experiment ID: 20000227 Result: Down-regulated in Transcription
  misc_feature: MA Experiment 20000227 PARAMETER Experiment Name: At_Root-Tips-vs-Tops_P Parameter: Tissue Value: Root Tips vs. Root Tops
  misc_feature: MA Experiment ID: 20000451 Result: Down-regulated in Transcription
  misc_feature: MA Experiment 20000451 PARAMETER Experiment Name: At_CS6879_Shoots-Roots_P Parameter: Age (day) Value: 14
  misc_feature: MA Experiment 20000451 PARAMETER Experiment Name: At_CS6879_Shoots-Roots_P Parameter: Organism Value: A. thaliana
  misc_feature: MA Experiment 20000451 PARAMETER Experiment Name: At_CS6879_Shoots-Roots_P Parameter: Plant Line Value: CS6879 vs. WS
  misc_feature: MA Experiment 20000451 PARAMETER Experiment Name: At_CS6879_Shoots-Roots_P Parameter: Tissue Value: Roots
  misc_feature: MA Experiment ID: 20001248 Result: Up-regulated in Transcription
  misc_feature: MA Experiment 20001248 PARAMETER Experiment Name: At_Far-red-induction_P Parameter: Age (day) Value: 7
  misc_feature: MA Experiment 20001248 PARAMETER Experiment Name: At_Far-red-induction_P Parameter: Light Value: Far-red vs. White
  misc_feature: MA Experiment 20001248 PARAMETER Experiment Name: At_Far-red-induction_P Parameter: Organism Value: A. thaliana
  misc_feature: MA Experiment 20001248 PARAMETER Experiment Name: At_Far-red-induction_P Parameter: Plant Line Value: Columbia
  misc_feature: MA Experiment 20001248 PARAMETER Experiment Name: At_Far-red-induction_P Parameter: Timepoint (hr) Value: 4
  misc_feature: MA Experiment 20001248 PARAMETER Experiment Name: At_Far-red-induction_P Parameter: Tissue Value: Whole Plant
atggctcaagtactatctacaccgttggccatccccggcccaacgccaatacaattcatggcgggtcttcttgctcgaatcgttacaaaaaatacgaacaaagagaccagtactccagagagcccgaggagtccgcggactccacaaggctctattctcatggacaagtacgaaataggaaagcttcttggccacggaagcttcgctaaggtctatttagcacggaacattcattctggcgaggatgttgccatcaaagtcattgacaaggagaagatagtgaagagtggattggccggtcatattaaacgggagatttcaatcctccgccgtgtccgccacccttacattgtacacctactcgaggttatggctacgaagacaaagatttacattgtgatggagtacgttcgaggcggagagctttataatacggtggctagaggacggcttcgagaaggaaccgcgaggagatatttccagcagttgatctcatccgttgctttctgccacagccgcggtgtttaccaccgcgatctcaagcttgagaatctgcttttggacgacaaggggaacgtgaaagtctctgactttgggctcagcgttgtctcggagcagctcaagcaagaaggaatctgtcaaacgttttgcgggacaccagcttatttggcgcctgaggttttgacaaggaaaggttatgaaggtgcaaaagccgatatttggtcttgtggagtgatcttgtttgtattgatggctggttatcttccatttgatgacaagaacatattggttatgtatacaaagatatataaagggcagtttaagtgtcctaaatggttttctcctgagcttgcaaggcttgtgacccggatgctagacacgaatccagatacccgaatcacaataccggagatcatgaagcatagatggttcaagaaagggttcaaacatgtcaaattctatattgaaaacgataagttatgtagggaggatgatgacaatgatgatgacgattcatcatcattgtcatcaggccgatcatcgactgcttcagaaggagatgcagagtttgatattaaaagggttgattcaatgccgagacccgcgagtctaaacgcatttgacatcttatcgttctcagatctttcgggtttgtttgaagaaggtggacaaggagcaaggtttgtatctgctgctcctatgacaaagatcatatcgaaattggaagagattgccaaagaggtgaaatttatggtgaggaagaaggattggagcgtgaggctagaaggttgtagagaaggagctaaaggaccgttgacaattagagtcgagatctttgagctgacgccatctcttgtggtggttgaagtgaagaagaaaggaggaaatatagaagagtatgaagagttttgcaacaaggaacttagaccacagctggagaaactgatgcattaccaagcagatgaagttgaagaagtaatgtgtttgccacctgaaattgaacagtga

SEQ ID NO: 89691 - protein, 502 aa, Arabidopsis thaliana
  peptide (1)..(502): Ceres Seq. ID no. 12719958
  misc_feature (57)..(311): Pfam Name: Protein kinase domain Pfam Description: Protein kinase domain
  misc_feature (1)..(502): Homolog of NCBI NO: 15226241 NR Description: putative protein kinase; protein id: At2g34180.1, by cDNA: gi_13249124 [Arabidopsis thaliana]
  misc_feature (12)..(501): Homolog of NCBI NO: 15218854 NR Description: protein kinase PK4, putative; protein id: supported by cDNA: gi_14334387 [Arabidopsis thaliana]
  misc_feature (28)..(490): Homolog of NCBI NO: 15233981 NR Description: putative protein kinase; protein id: At4g18700.1, by cDNA: gi_13249122, supported by cDNA: gi_13448040, supported cDNA: gi_16648898 [Arabidopsis thaliana] >gi|7446437|pir||T04862
  misc_feature (51)..(497): Homolog of NCBI NO: 15242507 NR Description: serine threonine protein kinase; protein id: supported by cDNA: gi_14009295 [Arabidopsis thaliana]
  misc_feature (50)..(335): Homolog of NCBI NO: 6651177 NR Description: protein kinase PK4 [Zea mays]
  misc_feature (330)..(485): Homolog of NCBI NO: 6651177 NR Description: protein kinase PK4 [Zea mays]
  misc_feature (50)..(335): Homolog of NCBI NO: 5821067 NR Description: OsPK4 [Oryza sativa]
  misc_feature (329)..(485): Homolog of NCBI NO: 5821067 NR Description: OsPK4 [Oryza sativa]
  misc_feature (33)..(335): Homolog of NCBI NO: 3928519 NR Description: wpk4 protein kinase [Triticum aestivum]
  misc_feature (333)..(484): Homolog of NCBI NO: 3928519 NR Description: wpk4 protein kinase [Triticum aestivum]
MAQVLSTPLAIPGPTPIQFMAGLLARIVTKNTNKETSTPESPRSPRTPQGSILMDKYEIGKLLGHGSFAKVYLARNIHSGEDVAIKVIDKEKIVKSGLAGHIKREISILRRVRHPYIVHLLEVMATKTKIYIVMEYVRGGELYNTVARGRLREGTARRYFQQLISSVAFCHSRGVYHRDLKLENLLLDDKGNVKVSDFGLSVVSEQLKQEGICQTFCGTPAYLAPEVLTRKGYEGAKADIWSCGVILFVLMAGYLPFDDKNILVMYTKIYKGQFKCPKWFSPELARLVTRMLDTNPDTRITIPEIMKHRWFKKGFKHVKFYIENDKLCREDDDNDDDDSSSLSSGRSSTASEGDAEFDIKRVDSMPRPASLNAFDILSFSDLSGLFEEGGQGARFVSAAPMTKIISKLEEIAKEVKFMVRKKDWSVRLEGCREGAKGPLTIRVEIFELTPSLVVVEVKKKGGNIEEYEEFCNKELRPQLEKLMHYQADEVEEVMCLPPEIEQ

SEQ ID NO: 89692 - protein, 483 aa, Arabidopsis thaliana
  peptide (1)..(483): Ceres Seq. ID no. 12719959
  misc_feature (38)..(292): Pfam Name: Protein kinase domain Pfam Description: Protein kinase domain
  misc_feature (1)..(483): Homolog of NCBI NO: 15226241 NR Description: putative protein kinase; protein id: At2g34180.1, by cDNA: gi_13249124 [Arabidopsis thaliana]
  misc_feature (1)..(482): Homolog of NCBI NO: 15218854 NR Description: protein kinase PK4, putative; protein id: supported by cDNA: gi_14334387 [Arabidopsis thaliana]
  misc_feature (9)..(471): Homolog of NCBI NO: 15233981 NR Description: putative protein kinase; protein id: At4g18700.1, by cDNA: gi_13249122, supported by cDNA: gi_13448040, supported cDNA: gi_16648898 [Arabidopsis thaliana] >gi|7446437|pir||T04862
  misc_feature (32)..(478): Homolog of NCBI NO: 15242507 NR Description: serine threonine protein kinase; protein id: supported by cDNA: gi_14009295 [Arabidopsis thaliana]
  misc_feature (31)..(316): Homolog of NCBI NO: 6651177 NR Description: protein kinase PK4 [Zea mays]
  misc_feature (311)..(466): Homolog of NCBI NO: 6651177 NR Description: protein kinase PK4 [Zea mays]
  misc_feature (31)..(316): Homolog of NCBI NO: 5821067 NR Description: OsPK4 [Oryza sativa]
  misc_feature (310)..(466): Homolog of NCBI NO: 5821067 NR Description: OsPK4 [Oryza sativa]
  misc_feature (14)..(316): Homolog of NCBI NO: 3928519 NR Description: wpk4 protein kinase [Triticum aestivum]
  misc_feature (314)..(465): Homolog of NCBI NO: 3928519 NR Description: wpk4 protein kinase [Triticum aestivum]
MAGLLARIVTKNTNKETSTPESPRSPRTPQGSILMDKYEIGKLLGHGSFAKVYLARNIHSGEDVAIKVIDKEKIVKSGLAGHIKREISILRRVRHPYIVHLLEVMATKTKIYIVMEYVRGGELYNTVARGRLREGTARRYFQQLISSVAFCHSRGVYHRDLKLENLLLDDKGNVKVSDFGLSVVSEQLKQEGICQTFCGTPAYLAPEVLTRKGYEGAKADIWSCGVILFVLMAGYLPFDDKNILVMYTKIYKGQFKCPKWFSPELARLVTRMLDTNPDTRITIPEIMKHRWFKKGFKHVKFYIENDKLCREDDDNDDDDSSSLSSGRSSTASEGDAEFDIKRVDSMPRPASLNAFDILSFSDLSGLFEEGGQGARFVSAAPMTKIISKLEEIAKEVKFMVRKKDWSVRLEGCREGAKGPLTIRVEIFELTPSLVVVEVKKKGGNIEEYEEFCNKELRPQLEKLMHYQADEVEEVMCLPPEIEQ

SEQ ID NO: 89693 - protein, 449 aa, Arabidopsis thaliana
  peptide (1)..(449): Ceres Seq. ID no. 12719960
  misc_feature (4)..(258): Pfam Name: Protein kinase domain Pfam Description: Protein kinase domain
  misc_feature (1)..(449): Homolog of NCBI NO: 15226241 NR Description: putative protein kinase; protein id: At2g34180.1, by cDNA: gi_13249124 [Arabidopsis thaliana]
  misc_feature (1)..(448): Homolog of NCBI NO: 15218854 NR Description: protein kinase PK4, putative; protein id: supported by cDNA: gi_14334387 [Arabidopsis thaliana]
  misc_feature (1)..(437): Homolog of NCBI NO: 15233981 NR Description: putative protein kinase; protein id: At4g18700.1, by cDNA: gi_13249122, supported by cDNA: gi_13448040, supported cDNA: gi_16648898 [Arabidopsis thaliana] >gi|7446437|pir||T04862
  misc_feature (1)..(444): Homolog of NCBI NO: 15242507 NR Description: serine threonine protein kinase; protein id: supported by cDNA: gi_14009295 [Arabidopsis thaliana]
  misc_feature (1)..(282): Homolog of NCBI NO: 6651177 NR Description: protein kinase PK4 [Zea mays]
  misc_feature (277)..(432): Homolog of NCBI NO: 6651177 NR Description: protein kinase PK4 [Zea mays]
  misc_feature (1)..(282): Homolog of NCBI NO: 5821067 NR Description: OsPK4 [Oryza sativa]
  misc_feature (276)..(432): Homolog of NCBI NO: 5821067 NR Description: OsPK4 [Oryza sativa]
  misc_feature (1)..(282): Homolog of NCBI NO: 3928519 NR Description: wpk4 protein kinase [Triticum aestivum]
  misc_feature (280)..(431): Homolog of NCBI NO: 3928519 NR Description: wpk4 protein kinase [Triticum aestivum]
MDKYEIGKLLGHGSFAKVYLARNIHSGEDVAIKVIDKEKIVKSGLAGHIKREISILRRVRHPYIVHLLEVMATKTKIYIVMEYVRGGELYNTVARGRLREGTARRYFQQLISSVAFCHSRGVYHRDLKLENLLLDDKGNVKVSDFGLSVVSEQLKQEGICQTFCGTPAYLAPEVLTRKGYEGAKADIWSCGVILFVLMAGYLPFDDKNILVMYTKIYKGQFKCPKWFSPELARLVTRMLDTNPDTRITIPEIMKHRWFKKGFKHVKFYIENDKLCREDDDNDDDDSSSLSSGRSSTASEGDAEFDIKRVDSMPRPASLNAFDILSFSDLSGLFEEGGQGARFVSAAPMTKIISKLEEIAKEVKFMVRKKDWSVRLEGCREGAKGPLTIRVEIFELTPSLVVVEVKKKGGNIEEYEEFCNKELRPQLEKLMHYQADEVEEVMCLPPEIEQ

SEQ ID NO: 89694 - DNA, 1003 bp, Arabidopsis thaliana
  misc_feature (1)..(1003): Ceres Seq. ID no. 12720005
  misc_feature: MA Experiment ID: 108434 Result: Down-regulated in Transcription
  misc_feature: MA Experiment 108434 PARAMETER Experiment Name: At_Root_Tips_cDNA_P Parameter: Tissue Value: Root Tips
  misc_feature: MA Experiment ID: 108461 Result: Up-regulated in Transcription
  misc_feature: MA Experiment 108461 PARAMETER Experiment Name: At_Germinating_Seeds_cDNA_P Parameter: Age (day) Value: 1 vs. 0
  misc_feature: MA Experiment 108461 PARAMETER Experiment Name: At_Germinating_Seeds_cDNA_P Parameter: Tissue Value: Germinating Seeds
  misc_feature: MA Experiment ID: 108462 Result: Up-regulated in Transcription
  misc_feature: MA Experiment 108462 PARAMETER Experiment Name: At_Germinating_Seeds_cDNA_P Parameter: Age (day) Value: 2 vs. 0
  misc_feature: MA Experiment 108462 PARAMETER Experiment Name: At_Germinating_Seeds_cDNA_P Parameter: Tissue Value: Germinating Seeds
  misc_feature: MA Experiment ID: 108464 Result: Up-regulated in Transcription
  misc_feature: MA Experiment 108464 PARAMETER Experiment Name: At_Germinating_Seeds_cDNA_P Parameter: Age (day) Value: 4 vs. 0
  misc_feature: MA Experiment 108464 PARAMETER Experiment Name: At_Germinating_Seeds_cDNA_P Parameter: Tissue Value: Germinating Seeds
  misc_feature: MA Experiment ID: 108488 Result: Up-regulated in Transcription
  misc_feature: MA Experiment ID: 108489 Result: Down-regulated in Transcription
  misc_feature: MA Experiment ID: 108594 Result: Down-regulated in Transcription
  misc_feature: MA Experiment 108594 PARAMETER Experiment Name: At_Ler-rhl_Root_cDNA_P Parameter: Plant Line Value: null
  misc_feature: MA Experiment ID: 108595 Result: Down-regulated in Transcription
  misc_feature: MA Experiment 108595 PARAMETER Experiment Name: At_Ler-pi_Ovule_cDNA_P Parameter: Plant Line Value: null
  misc_feature: MA Experiment ID: 20000180 Result: Up-regulated in Transcription
  misc_feature: MA Experiment 20000180 PARAMETER Experiment Name: At_Germinating_Seeds_P Parameter: Age (hr) Value: 24 vs. 0
  misc_feature: MA Experiment 20000180 PARAMETER Experiment Name: At_Germinating_Seeds_P Parameter: Tissue Value: Germinating Seeds
  misc_feature: MA Experiment ID: 20000185 Result: Down-regulated in Transcription
  misc_feature: MA Experiment 20000185 PARAMETER Experiment Name: At_Roots__P Parameter: Age (day) Value: 7 vs. 21
  misc_feature: MA Experiment 20000185 PARAMETER Experiment Name: At_Roots__P Parameter: Organism Value: A. thaliana
  misc_feature: MA Experiment 20000185 PARAMETER Experiment Name: At_Roots__P Parameter: Tissue Value: Roots vs. Whole Plant
  misc_feature: MA Experiment ID: 20000234 Result: Down-regulated in Transcription
  misc_feature: MA Experiment 20000234 PARAMETER Experiment Name: At_Siliques_P Parameter: Age (day) Value: 21
  misc_feature: MA Experiment 20000234 PARAMETER Experiment Name: At_Siliques_P Parameter: Organism Value: A. thaliana
  misc_feature: MA Experiment 20000234 PARAMETER Experiment Name: At_Siliques_P Parameter: Plant Line Value: WS
  misc_feature: MA Experiment 20000234 PARAMETER Experiment Name: At_Siliques_P Parameter: Tissue Value: Less Than 5mm Siliques vs. Whole Plant
  misc_feature: MA Experiment ID: 20000235 Result: Down-regulated in Transcription
  misc_feature: MA Experiment 20000235 PARAMETER Experiment Name: At_Siliques_P Parameter: Age (day) Value: 21
  misc_feature: MA Experiment 20000235 PARAMETER Experiment Name: At_Siliques_P Parameter: Organism Value: A. thaliana
  misc_feature: MA Experiment 20000235 PARAMETER Experiment Name: At_Siliques_P Parameter: Plant Line Value: WS
  misc_feature: MA Experiment 20000235 PARAMETER Experiment Name: At_Siliques_P Parameter: Tissue Value: 5-10mm Siliques vs. Whole Plant
  misc_feature: MA Experiment ID: 20000264 Result: Down-regulated in Transcription
  misc_feature: MA Experiment 20000264 PARAMETER Experiment Name: At_Open_Flower_P Parameter: Age (day) Value: 21
  misc_feature: MA Experiment 20000264 PARAMETER Experiment Name: At_Open_Flower_P Parameter: Plant Line Value: WS
  misc_feature: MA Experiment 20000264 PARAMETER Experiment Name: At_Open_Flower_P Parameter: Tissue Value: Open Flower vs. Whole Plant
  misc_feature: MA Experiment ID: 20000265 Result: Down-regulated in Transcription
  misc_feature: MA Experiment 20000265 PARAMETER Experiment Name: At_Open_Flower_P Parameter: Age (day) Value: 21
  misc_feature: MA Experiment 20000265 PARAMETER Experiment Name: At_Open_Flower_P Parameter: Plant Line Value: WS
  misc_feature: MA Experiment 20000265 PARAMETER Experiment Name: At_Open_Flower_P Parameter: Tissue Value: Closed Flower vs. Whole Plant
  misc_feature: MA Experiment ID: 20000286 Result: Down-regulated in Transcription
  misc_feature: MA Experiment 20000286 PARAMETER Experiment Name: At_Open_Flower_P Parameter: Age (day) Value: 21
  misc_feature: MA Experiment 20000286 PARAMETER Experiment Name: At_Open_Flower_P Parameter: Plant Line Value: WS
  misc_feature: MA Experiment 20000286 PARAMETER Experiment Name: At_Open_Flower_P Parameter: Tissue Value: Half Open vs. Whole Plant
  misc_feature: MA Experiment ID: 20000436 Result: Up-regulated in Transcription
  misc_feature: MA Experiment 20000436 PARAMETER Experiment Name: At_Drought_P Parameter: Age (day) Value: 7
  misc_feature: MA Experiment 20000436 PARAMETER Experiment Name: At_Drought_P Parameter: Organism Value: A. thaliana
  misc_feature: MA Experiment 20000436 PARAMETER Experiment Name: At_Drought_P Parameter: Plant Line Value: WS
  misc_feature: MA Experiment 20000436 PARAMETER Experiment Name: At_Drought_P Parameter: Timepoint (hr) Value: 12
  misc_feature: MA Experiment 20000436 PARAMETER Experiment Name: At_Drought_P Parameter: Tissue Value: Whole Plant
  misc_feature: MA Experiment 20000436 PARAMETER Experiment Name: At_Drought_P Parameter: Treatment Value: Drought vs. No Drought
  misc_feature: MA Experiment ID: 20000439 Result: Down-regulated in Transcription
  misc_feature: MA Experiment 20000439 PARAMETER Experiment Name: At_Roots__P Parameter: Age (day) Value: 14 vs. 21
  misc_feature: MA Experiment 20000439 PARAMETER Experiment Name: At_Roots__P Parameter: Organism Value: A. thaliana
  misc_feature: MA Experiment 20000439 PARAMETER Experiment Name: At_Roots__P Parameter: Tissue Value: Roots vs. Whole Plant
  misc_feature: MA Experiment ID: 20000441 Result: Up-regulated in Transcription
  misc_feature: MA Experiment 20000441 PARAMETER Experiment Name: At_1uM_BR-BRZ__P Parameter: Tissue Value: Shoot Apices
  misc_feature: MA Experiment 20000441 PARAMETER Experiment Name: At_1uM_BR-BRZ__P Parameter: Treatment Value: 1uM BR vs. No Treatment
  misc_feature: MA Experiment ID: 20000443 Result: Up-regulated in Transcription
  misc_feature: MA Experiment 20000443 PARAMETER Experiment Name: At_1uM_BR-BRZ__P Parameter: Tissue Value: Shoot Apices
  misc_feature: MA Experiment 20000443 PARAMETER Experiment Name: At_1uM_BR-BRZ__P Parameter: Treatment Value: 1uM BRZ vs. No Treatment
  misc_feature: MA Experiment ID: 20000794 Result: Down-regulated in Transcription
  misc_feature: MA Experiment 20000794 PARAMETER Experiment Name: At_Petals_P Parameter: Age (day) Value: 23-25 days
  misc_feature: MA Experiment 20000794 PARAMETER Experiment Name: At_Petals_P Parameter: Plant Line Value: WS
  misc_feature: MA Experiment 20000794 PARAMETER Experiment Name: At_Petals_P Parameter: Tissue Value: Petals vs. Whole plant
  misc_feature: MA Experiment ID: 20001450 Result: Up-regulated in Transcription
  misc_feature: MA Experiment 20001450 PARAMETER Experiment Name: At_Far-red-induction_P Parameter: Age (day) Value: 7
  misc_feature: MA Experiment 20001450 PARAMETER Experiment Name: At_Far-red-induction_P Parameter: Light Value: Far-red vs. White
  misc_feature: MA Experiment 20001450 PARAMETER Experiment Name: At_Far-red-induction_P Parameter: Organism Value: A. thaliana
  misc_feature: MA Experiment 20001450 PARAMETER Experiment Name: At_Far-red-induction_P Parameter: Plant Line Value: Columbia
  misc_feature: MA Experiment 20001450 PARAMETER Experiment Name: At_Far-red-induction_P Parameter: Timepoint (hr) Value: 8
  misc_feature: MA Experiment 20001450 PARAMETER Experiment Name: At_Far-red-induction_P Parameter: Tissue Value: Whole Plant
  misc_feature: MA Experiment ID: 20001451 Result: Up-regulated in Transcription
  misc_feature: MA Experiment 20001451 PARAMETER Experiment Name: At_Far-red-induction_P Parameter: Age (day) Value: 7
  misc_feature: MA Experiment 20001451 PARAMETER Experiment Name: At_Far-red-induction_P Parameter: Light Value: Far-red vs. White
  misc_feature: MA Experiment 20001451 PARAMETER Experiment Name: At_Far-red-induction_P Parameter: Organism Value: A. thaliana
  misc_feature: MA Experiment 20001451 PARAMETER Experiment Name: At_Far-red-induction_P Parameter: Plant Line Value: Columbia
  misc_feature: MA Experiment 20001451 PARAMETER Experiment Name: At_Far-red-induction_P Parameter: Timepoint (hr) Value: 24
  misc_feature: MA Experiment 20001451 PARAMETER Experiment Name: At_Far-red-induction_P Parameter: Tissue Value: Whole Plant
  misc_feature: MA Experiment ID: 20001459 Result: Down-regulated in Transcription
  misc_feature: MA Experiment 20001459 PARAMETER Experiment Name: At_50mM_NH4NO3_L-to-H_P Parameter: Age (day) Value: Undefined
  misc_feature: MA Experiment 20001459 PARAMETER Experiment Name: At_50mM_NH4NO3_L-to-H_P Parameter: Organism Value: Undefined
  misc_feature: MA Experiment 20001459 PARAMETER Experiment Name: At_50mM_NH4NO3_L-to-H_P Parameter: Plant Line Value: Undefined
  misc_feature: MA Experiment 20001459 PARAMETER Experiment Name: At_50mM_NH4NO3_L-to-H_P Parameter: Timepoint (hr) Value: 4
  misc_feature: MA Experiment 20001459 PARAMETER Experiment Name: At_50mM_NH4NO3_L-to-H_P Parameter: Tissue Value: Siliques
  misc_feature: MA Experiment 20001459 PARAMETER Experiment Name: At_50mM_NH4NO3_L-to-H_P Parameter: Treatment Value: 50mM NH4NO3 vs. 100mM Manitol
  misc_feature: MA Experiment ID: 20001556 Result: Down-regulated in Transcription
  misc_feature: MA Experiment 20001556 PARAMETER Experiment Name: At_Drought_Soil_Dry_P Parameter: Age (day) Value: 26
  misc_feature: MA Experiment 20001556 PARAMETER Experiment Name: At_Drought_Soil_Dry_P Parameter: Organism Value: A. thaliana
  misc_feature: MA Experiment 20001556 PARAMETER Experiment Name: At_Drought_Soil_Dry_P Parameter: Plant Line Value: WS
  misc_feature: MA Experiment 20001556 PARAMETER Experiment Name: At_Drought_Soil_Dry_P Parameter: Post Timepoint (hr) Value: None
  misc_feature: MA Experiment 20001556 PARAMETER Experiment Name: At_Drought_Soil_Dry_P Parameter: Post-Treatment Value: None
  misc_feature: MA Experiment 20001556 PARAMETER Experiment Name: At_Drought_Soil_Dry_P Parameter: Timepoint (day) Value: 12
  misc_feature: MA Experiment 20001556 PARAMETER Experiment Name: At_Drought_Soil_Dry_P Parameter: Treatment Value: Drought vs. No Drought
  misc_feature: MA Experiment ID: 20001557 Result: Down-regulated in Transcription
  misc_feature: MA Experiment 20001557 PARAMETER Experiment Name: At_Drought_Soil_Dry_P Parameter: Age (day) Value: 27
  misc_feature: MA Experiment 20001557 PARAMETER Experiment Name: At_Drought_Soil_Dry_P Parameter: Organism Value: A. thaliana
  misc_feature: MA Experiment 20001557 PARAMETER Experiment Name: At_Drought_Soil_Dry_P Parameter: Plant Line Value: WS
  misc_feature: MA Experiment 20001557 PARAMETER Experiment Name: At_Drought_Soil_Dry_P Parameter: Post Timepoint (hr) Value: 3
  misc_feature: MA Experiment 20001557 PARAMETER Experiment Name: At_Drought_Soil_Dry_P Parameter: Post-Treatment Value: Re-Water vs. No Drought
  misc_feature: MA Experiment 20001557 PARAMETER Experiment Name: At_Drought_Soil_Dry_P Parameter: Timepoint (day) Value: 13
  misc_feature: MA Experiment 20001557 PARAMETER Experiment Name: At_Drought_Soil_Dry_P Parameter: Treatment Value: Drought vs. No Drought
  misc_feature: MA Experiment ID: 20001558 Result: Down-regulated in Transcription
  misc_feature: MA Experiment 20001558 PARAMETER Experiment Name: At_Drought_Soil_Dry_P Parameter: Age (day) Value: 27
  misc_feature: MA Experiment 20001558 PARAMETER Experiment Name: At_Drought_Soil_Dry_P Parameter: Organism Value: A. thaliana
  misc_feature: MA Experiment 20001558 PARAMETER Experiment Name: At_Drought_Soil_Dry_P Parameter: Plant Line Value: WS
  misc_feature: MA Experiment 20001558 PARAMETER Experiment Name: At_Drought_Soil_Dry_P Parameter: Post Timepoint (hr) Value: 6
  misc_feature: MA Experiment 20001558 PARAMETER Experiment Name: At_Drought_Soil_Dry_P Parameter: Post-Treatment Value: Re-Water vs. No Drought
  misc_feature: MA Experiment 20001558 PARAMETER Experiment Name: At_Drought_Soil_Dry_P Parameter: Timepoint (day) Value: 13
  misc_feature: MA Experiment 20001558 PARAMETER Experiment Name: At_Drought_Soil_Dry_P Parameter: Treatment Value: Drought vs. No Drought
  misc_feature: MA Experiment ID: 20001559 Result: Down-regulated in Transcription
  misc_feature: MA Experiment 20001559 PARAMETER Experiment Name: At_Drought_Soil_Dry_P Parameter: Age (day) Value: 28
  misc_feature: MA Experiment 20001559 PARAMETER Experiment Name: At_Drought_Soil_Dry_P Parameter: Organism Value: A. thaliana
  misc_feature: MA Experiment 20001559 PARAMETER Experiment Name: At_Drought_Soil_Dry_P Parameter: Plant Line Value: WS
  misc_feature: MA Experiment 20001559 PARAMETER Experiment Name: At_Drought_Soil_Dry_P Parameter: Post Timepoint (hr) Value: 29
  misc_feature: MA Experiment 20001559 PARAMETER Experiment Name: At_Drought_Soil_Dry_P Parameter: Post-Treatment Value: Re-Water vs. No Drought
  misc_feature: MA Experiment 20001559 PARAMETER Experiment Name: At_Drought_Soil_Dry_P Parameter: Timepoint (day) Value: 14
  misc_feature: MA Experiment 20001559 PARAMETER Experiment Name: At_Drought_Soil_Dry_P Parameter: Treatment Value: Drought vs. No Drought
  misc_feature: MA Experiment ID: 20001755 Result: Down-regulated in Transcription
  misc_feature: MA Experiment 20001755 PARAMETER Experiment Name: At_50mM_NH4NO3_L-to-H_P Parameter: Timepoint (hr) Value: 2
  misc_feature: MA Experiment 20001755 PARAMETER Experiment Name: At_50mM_NH4NO3_L-to-H_P Parameter: Tissue Value: Leaf
  misc_feature: MA Experiment 20001755 PARAMETER Experiment Name: At_50mM_NH4NO3_L-to-H_P Parameter: Treatment Value: 50mM NH4NO3 vs 100mM Mannitol
  misc_feature: MA Experiment ID: 20001762 Result: Down-regulated in Transcription
  misc_feature: MA Experiment 20001762 PARAMETER Experiment Name: At_50mM_NH4NO3_L-to-H_P Parameter: Timepoint (hr) Value: 6
  misc_feature: MA Experiment 20001762 PARAMETER Experiment Name: At_50mM_NH4NO3_L-to-H_P Parameter: Tissue Value: Siliques
  misc_feature: MA Experiment 20001762 PARAMETER Experiment Name: At_50mM_NH4NO3_L-to-H_P Parameter: Treatment Value: 50mM NH4NO3 vs 100mM Mannitol
  misc_feature: MA Experiment ID: 20001772 Result: Down-regulated in Transcription
  misc_feature: MA Experiment 20001772 PARAMETER Experiment Name: At_Far-red-enriched-adult_P Parameter: Age (day) Value: 29
  misc_feature: MA Experiment 20001772 PARAMETER Experiment Name: At_Far-red-enriched-adult_P Parameter: Light Value: Far-red enriched vs. White
  misc_feature: MA Experiment 20001772 PARAMETER Experiment Name: At_Far-red-enriched-adult_P Parameter: Organism Value: A. thaliana
  misc_feature: MA Experiment 20001772 PARAMETER Experiment Name: At_Far-red-enriched-adult_P Parameter: Plant Line Value: Columbia
  misc_feature: MA Experiment 20001772 PARAMETER Experiment Name: At_Far-red-enriched-adult_P Parameter: Timepoint (hr) Value: 24
  misc_feature: MA Experiment 20001772 PARAMETER Experiment Name: At_Far-red-enriched-adult_P Parameter: Tissue Value: Aerial
  misc_feature: MA Experiment ID: 20001773 Result: Down-regulated in Transcription
  misc_feature: MA Experiment 20001773 PARAMETER Experiment Name: At_Far-red-enriched-adult_P Parameter: Age (day) Value: 30
  misc_feature: MA Experiment 20001773 PARAMETER Experiment Name: At_Far-red-enriched-adult_P Parameter: Light Value: Far-red enriched vs. White
  misc_feature: MA Experiment 20001773 PARAMETER Experiment Name: At_Far-red-enriched-adult_P Parameter: Organism Value: A. thaliana
  misc_feature: MA Experiment 20001773 PARAMETER Experiment Name: At_Far-red-enriched-adult_P Parameter: Plant Line Value: Columbia
  misc_feature: MA Experiment 20001773 PARAMETER Experiment Name: At_Far-red-enriched-adult_P Parameter: Timepoint (hr) Value: 48
  misc_feature: MA Experiment 20001773 PARAMETER Experiment Name: At_Far-red-enriched-adult_P Parameter: Tissue Value: Aerial
  misc_feature: MA Experiment ID: 20001774 Result: Down-regulated in Transcription
  misc_feature: MA Experiment 20001774 PARAMETER Experiment Name: At_Far-red-enriched-adult_P Parameter: Age (day) Value: 31
  misc_feature: MA Experiment 20001774 PARAMETER Experiment Name: At_Far-red-enriched-adult_P Parameter: Light Value: Far-red enriched vs. White
  misc_feature: MA Experiment 20001774 PARAMETER Experiment Name: At_Far-red-enriched-adult_P Parameter: Organism Value: A. thaliana
  misc_feature: MA Experiment 20001774 PARAMETER Experiment Name: At_Far-red-enriched-adult_P Parameter: Plant Line Value: Columbia
  misc_feature: MA Experiment 20001774 PARAMETER Experiment Name: At_Far-red-enriched-adult_P Parameter: Timepoint (hr) Value: 72
  misc_feature: MA Experiment 20001774 PARAMETER Experiment Name: At_Far-red-enriched-adult_P Parameter: Tissue Value: Aerial
  misc_feature: MA Experiment ID: 20001905 Result: Down-regulated in Transcription
  misc_feature: MA Experiment 20001905 PARAMETER Experiment Name: At_Drought_Reproduction_P Parameter: Age (day) Value: 40
  misc_feature: MA Experiment 20001905 PARAMETER Experiment Name: At_Drought_Reproduction_P Parameter: Organism Value: A. thaliana
  misc_feature: MA Experiment 20001905 PARAMETER Experiment Name: At_Drought_Reproduction_P Parameter: Plant Line Value: WS
  misc_feature: MA Experiment 20001905 PARAMETER Experiment Name: At_Drought_Reproduction_P Parameter: Timepoint (day) Value: 10
  misc_feature: MA Experiment 20001905 PARAMETER Experiment Name: At_Drought_Reproduction_P Parameter: Tissue Value: Rosettes
  misc_feature: MA Experiment 20001905 PARAMETER Experiment Name: At_Drought_Reproduction_P Parameter: Treatment Value: Drought vs. No Drought
atccaatttcatcacatcttattaactaaagagccttttacttgcgccacactctcaccgcaatggccgcctcgacaatggctctctcctctcctgctttgaccggaaaggccgttaagctatccccggcggcctccgaagtatttggaaccggccgaatcaccatgcgcaaagcctccaagcccaccggtccatccggcagcccatggtacggatccgaccgagtcaagtacttgggtccattctccggtgagcctccgagctacctcactggagagttccccggtgattacgggtgggacactgccggtctatccgccgatcccgagaccttcgctaggaaccgtgagctagaagttatccacagcagatgggccatgctcggagccctaggctgcgttttccctgagctattggctaggaacggagtgaagttcggagaagcggtttggttcaaggctggttcacagatcttcagcgacggaggattggactacttgggcaacccgagcttggtccacgctcagagcatcttagccatttgggctactcaagttatcctcatgggagctgttgagggctacagagtcgccggagatggtccattgggagaagcagaggacttgctttacccaggtgggagcttcgacccattgggcctcgctactgaccccgaggctttcgcggagttgaaggtgaaggagctcaagaacggaaggttggctatgttctctatgtttggattcttcgttcaggccattgtcaccggaaagggaccgttggagaacctcgcggaccacttggctgatccagtcaacaacaatgcatgggccttcgctaccaacttcgtccccggaaagtgagtttaatttgtgatcgagttgtgtgtatccggtttgttgcatcttggaaatgtgatgcagatttcatatcttgtaaattactttgtatgtgtgtgaaatatttaagaagctttatgatattgatggatcagtcacttact

SEQ ID NO: 89695 - protein, 266 aa, Arabidopsis thaliana
  peptide (1)..(266): Ceres Seq. ID no. 12720006
  misc_feature (64)..(233): Pfam Name: Chlorophyll A-B binding protein Pfam Description: Chlorophyll A-B binding protein
  misc_feature (1)..(266): Homolog of NCBI NO: 18403549 NR Description: photosystem II type I chlorophyll a /b binding protein id: At2g34430.1, supported by cDNA: 23727., supported by
  misc_feature (1)..(266): Homolog of NCBI NO: 21592428 NR Description: putative photosystem II type I chlorophyll a b
  misc_feature (1)..(266): Homolog of NCBI NO: 115778 NR Description: Chlorophyll A-B binding protein 1, chloroplast
  misc_feature (1)..(266): Homolog of NCBI NO: 18266039 NR Description: chlorophyll a/b binding protein [Brassica
  misc_feature (1)..(266): Homolog of NCBI NO: 15220615 NR Description: light-harvesting chlorophyll a/b binding protein; id: At1g29930.1, supported by cDNA: gi_15010743, supported by
  misc_feature (1)..(266): Homolog of NCBI NO: 18397286 NR Description: photosystem II type I chlorophyll a /b binding putative; protein id: At1g29910.1, supported by cDNA: gi_17473827
  misc_feature (1)..(266): Homolog of NCBI NO: 18403546 NR Description: photosystem II type I chlorophyll a /b binding protein id: At2g34420.1, supported by cDNA: gi_13926259, by cDNA: gi_14517451, supported by cDNA: gi_15027898, supported
  misc_feature (1)..(266): Homolog of NCBI NO: 17473828 NR Description: chlorophyll a/b-binding protein [Arabidopsis
  misc_feature (19)..(266): Homolog of NCBI NO: 12324161 NR Description: chlorophyll A-B-binding protein 2 precursor, 5'
  misc_feature (1)..(266): Homolog of NCBI NO: 115819 NR Description: Chlorophyll A-B binding protein 1B, chloroplast
MAASTMALSSPALTGKAVKLSPAASEVFGTGRITMRKASKPTGPSGSPWYGSDRVKYLGPFSGEPPSYLTGEFPGDYGWDTAGLSADPETFARNRELEVIHSRWAMLGALGCVFPELLARNGVKFGEAVWFKAGSQIFSDGGLDYLGNPSLVHAQSILAIWATQVILMGAVEGYRVAGDGPLGEAEDLLYPGGSFDPLGLATDPEAFAELKVKELKNGRLAMFSMFGFFVQAIVTGKGPLENLADHLADPVNNNAWAFATNFVPGK

SEQ ID NO: 89696 - protein, 261 aa, Arabidopsis thaliana
  peptide (1)..(261): Ceres Seq. ID no. 12720007
  misc_feature (59)..(228): Pfam Name: Chlorophyll A-B binding protein Pfam Description: Chlorophyll A-B binding protein
  misc_feature (1)..(261): Homolog of NCBI NO: 18403549 NR Description: photosystem II type I chlorophyll a /b binding protein id: At2g34430.1, supported by cDNA: 23727., supported by
  misc_feature (1)..(261): Homolog of NCBI NO: 21592428 NR Description: putative photosystem II type I chlorophyll a b
  misc_feature (1)..(261): Homolog of NCBI NO: 115778 NR Description: Chlorophyll A-B binding protein 1, chloroplast
  misc_feature (1)..(261): Homolog of NCBI NO: 18266039 NR Description: chlorophyll a/b binding protein [Brassica
  misc_feature (1)..(261): Homolog of NCBI NO: 15220615 NR Description: light-harvesting chlorophyll a/b binding protein; id: At1g29930.1, supported by cDNA: gi_15010743, supported by
  misc_feature (1)..(261): Homolog of NCBI NO: 18397286 NR Description: photosystem II type I chlorophyll a /b binding putative; protein id: At1g29910.1, supported by cDNA: gi_17473827
  misc_feature (1)..(261): Homolog of NCBI NO: 18403546 NR Description: photosystem II type I chlorophyll a /b binding protein id: At2g34420.1, supported by cDNA: gi_13926259, by cDNA: gi_14517451, supported by cDNA: gi_15027898, supported
  misc_feature (1)..(261): Homolog of NCBI NO: 17473828 NR Description: chlorophyll a/b-binding protein [Arabidopsis
  misc_feature (14)..(261): Homolog of NCBI NO: 12324161 NR Description: chlorophyll A-B-binding protein 2 precursor, 5'
  misc_feature (1)..(261): Homolog of NCBI NO: 115819 NR Description: Chlorophyll A-B binding protein 1B, chloroplast
MALSSPALTGKAVKLSPAASEVFGTGRITMRKASKPTGPSGSPWYGSDRVKYLGPFSGEPPSYLTGEFPGDYGWDTAGLSADPETFARNRELEVIHSRWAMLGALGCVFPELLARNGVKFGEAVWFKAGSQIFSDGGLDYLGNPSLVHAQSILAIWATQVILMGAVEGYRVAGDGPLGEAEDLLYPGGSFDPLGLATDPEAFAELKVKELKNGRLAMFSMFGFFVQAIVTGKGPLENLADHLADPVNNNAWAFATNFVPGK

SEQ ID NO: 89697 - protein, 232 aa, Arabidopsis thaliana
  peptide (1)..(232): Ceres Seq. ID no. 12720008
  misc_feature (30)..(199): Pfam Name: Chlorophyll A-B binding protein Pfam Description: Chlorophyll A-B binding protein
  misc_feature (1)..(232): Homolog of NCBI NO: 18403549 NR Description: photosystem II type I chlorophyll a /b binding protein id: At2g34430.1, supported by cDNA: 23727., supported by
  misc_feature (1)..(232): Homolog of NCBI NO: 21592428 NR Description: putative photosystem II type I chlorophyll a b
  misc_feature (1)..(232): Homolog of NCBI NO: 115778 NR Description: Chlorophyll A-B binding protein 1, chloroplast
  misc_feature (1)..(232): Homolog of NCBI NO: 18266039 NR Description: chlorophyll a/b binding protein [Brassica
  misc_feature (1)..(232): Homolog of NCBI NO: 15220615 NR Description: light-harvesting chlorophyll a/b binding protein; id: At1g29930.1, supported by cDNA: gi_15010743, supported by
  misc_feature (1)..(232): Homolog of NCBI NO: 18397286 NR Description: photosystem II type I chlorophyll a /b binding putative; protein id: At1g29910.1, supported by cDNA: gi_17473827
  misc_feature (1)..(232): Homolog of NCBI NO: 18403546 NR Description: photosystem II type I chlorophyll a /b binding protein id: At2g34420.1, supported by cDNA: gi_13926259, by cDNA: gi_14517451, supported by cDNA: gi_15027898, supported
  misc_feature (1)..(232): Homolog of NCBI NO: 17473828 NR Description: chlorophyll a/b-binding protein [Arabidopsis
  misc_feature (1)..(232): Homolog of NCBI NO: 12324161 NR Description: chlorophyll A-B-binding protein 2 precursor, 5'
  misc_feature (1)..(232): Homolog of NCBI NO: 115819 NR Description: Chlorophyll A-B binding protein 1B, chloroplast
MRKASKPTGPSGSPWYGSDRVKYLGPFSGEPPSYLTGEFPGDYGWDTAGLSADPETFARNRELEVIHSRWAMLGALGCVFPELLARNGVKFGEAVWFKAGSQIFSDGGLDYLGNPSLVHAQSILAIWATQVILMGAVEGYRVAGDGPLGEAEDLLYPGGSFDPLGLATDPEAFAELKVKELKNGRLAMFSMFGFFVQAIVTGKGPLENLADHLADPVNNNAWAFATNFVPGK

SEQ ID NO: 89698 - DNA, 1925 bp, Arabidopsis thaliana
  misc_feature (1)..(1925): Ceres Seq. ID no. 12720085
  misc_feature: MA Experiment ID: 20000180 Result: Down-regulated in Transcription
  misc_feature: MA Experiment 20000180 PARAMETER Experiment Name: At_Germinating_Seeds_P Parameter: Age (hr) Value: 24 vs. 0
  misc_feature: MA Experiment 20000180 PARAMETER Experiment Name: At_Germinating_Seeds_P Parameter: Tissue Value: Germinating Seeds
  misc_feature: MA Experiment ID: 20000437 Result: Down-regulated in Transcription
  misc_feature: MA Experiment 20000437 PARAMETER Experiment Name: At_Drought_P Parameter: Age (day) Value: 8
  misc_feature: MA Experiment 20000437 PARAMETER Experiment Name: At_Drought_P Parameter: Organism Value: A. thaliana
  misc_feature: MA Experiment 20000437 PARAMETER Experiment Name: At_Drought_P Parameter: Plant Line Value: WS
  misc_feature: MA Experiment 20000437 PARAMETER Experiment Name: At_Drought_P Parameter: Timepoint (hr) Value: 24
  misc_feature: MA Experiment 20000437 PARAMETER Experiment Name: At_Drought_P Parameter: Tissue Value: Whole Plant
  misc_feature: MA Experiment 20000437 PARAMETER Experiment Name: At_Drought_P Parameter: Treatment Value: Drought vs. No Drought
  misc_feature: MA Experiment ID: 20000527 Result: Down-regulated in Transcription
  misc_feature: MA Experiment 20000527 PARAMETER Experiment Name: At_10percent_PEG_P Parameter: Age (day) Value: 20
  misc_feature: MA Experiment 20000527 PARAMETER Experiment Name: At_10percent_PEG_P Parameter: Organism Value: A. thaliana
  misc_feature: MA Experiment 20000527 PARAMETER Experiment Name: At_10percent_PEG_P Parameter: Plant Line Value: WS
  misc_feature: MA Experiment 20000527 PARAMETER Experiment Name: At_10percent_PEG_P Parameter: Timepoint (day) Value: 20
  misc_feature: MA Experiment 20000527 PARAMETER Experiment Name: At_10percent_PEG_P Parameter: Tissue Value: Whole Plant
  misc_feature: MA Experiment 20000527 PARAMETER Experiment Name: At_10percent_PEG_P Parameter: Treatment Value: 10percent PEG vs. No Treatment
  misc_feature: MA Experiment ID: 20001556 Result: Down-regulated in Transcription
  misc_feature: MA Experiment 20001556 PARAMETER Experiment Name: At_Drought_Soil_Dry_P Parameter: Age (day) Value: 26
  misc_feature: MA Experiment 20001556 PARAMETER Experiment Name: At_Drought_Soil_Dry_P Parameter: Organism Value: A. thaliana
  misc_feature: MA Experiment 20001556 PARAMETER Experiment Name: At_Drought_Soil_Dry_P Parameter: Plant Line Value: WS
  misc_feature: MA Experiment 20001556 PARAMETER Experiment Name: At_Drought_Soil_Dry_P Parameter: Post Timepoint (hr) Value: None
  misc_feature: MA Experiment 20001556 PARAMETER Experiment Name: At_Drought_Soil_Dry_P Parameter: Post-Treatment Value: None
  misc_feature: MA Experiment 20001556 PARAMETER Experiment Name: At_Drought_Soil_Dry_P Parameter: Timepoint (day) Value: 12
  misc_feature: MA Experiment 20001556 PARAMETER Experiment Name: At_Drought_Soil_Dry_P Parameter: Treatment Value: Drought vs. No Drought
  misc_feature: MA Experiment ID: 20001560 Result: Down-regulated in Transcription
  misc_feature: MA Experiment 20001560 PARAMETER Experiment Name: At_Drought_Soil_Dry_P Parameter: Age (day) Value: 28
  misc_feature: MA Experiment 20001560 PARAMETER Experiment Name: At_Drought_Soil_Dry_P Parameter: Organism Value: A. thaliana
  misc_feature: MA Experiment 20001560 PARAMETER Experiment Name: At_Drought_Soil_Dry_P Parameter: Plant Line Value: WS
  misc_feature: MA Experiment 20001560 PARAMETER Experiment Name: At_Drought_Soil_Dry_P Parameter: Post Timepoint (hr) Value: None
  misc_feature: MA Experiment 20001560 PARAMETER Experiment Name: At_Drought_Soil_Dry_P Parameter: Post-Treatment Value: None
  misc_feature: MA Experiment 20001560 PARAMETER Experiment Name: At_Drought_Soil_Dry_P Parameter: Timepoint (day) Value: 14
  misc_feature: MA Experiment 20001560 PARAMETER Experiment Name: At_Drought_Soil_Dry_P Parameter: Treatment Value: Drought vs. No Drought
  misc_feature: MA Experiment ID: 20001904 Result: Down-regulated in Transcription
  misc_feature: MA Experiment 20001904 PARAMETER Experiment Name: At_Drought_Reproduction_P Parameter: Age (day) Value: 37
  misc_feature: MA Experiment 20001904 PARAMETER Experiment Name: At_Drought_Reproduction_P Parameter: Organism Value: A. thaliana
  misc_feature: MA Experiment 20001904 PARAMETER Experiment Name: At_Drought_Reproduction_P Parameter: Plant Line Value: WS
  misc_feature: MA Experiment 20001904 PARAMETER Experiment Name: At_Drought_Reproduction_P Parameter: Timepoint (day) Value: 7
  misc_feature: MA Experiment 20001904 PARAMETER Experiment Name: At_Drought_Reproduction_P Parameter: Tissue Value: Rosettes
  misc_feature: MA Experiment 20001904 PARAMETER Experiment Name: At_Drought_Reproduction_P Parameter: Treatment Value: Drought vs. No Drought
actagtcaaacaatggaacaaaattagatggtgtctctttagctcttcttcattaacaaatctttgaagcagagagaatggaaggtgaagagagaggatactggagatggagcaagagagatttctttcctgaggaatctttccagagctttggtagttacagagctgctctgtctcagacatgttccaggttcaagaacaggttggttagtaggtctgatgatgagaacgagcggtttgagctcaagaaacagagtgagcacgagatgaaacggtgtttgacatggtgggatttagtatggtttggattcgggtcggtgattggagctggaatctttgtcttgacaggtcaagaagctcatgagcaagcaggaccagctattgtcttgtcttatgttgtttcaggtctttctgctatgctctctgtcttctgctacacggaattcgctgtggaaatccctgtggctggtggttctttcgcctatctacggattgagcttggggattttgcggcgttcatcactgcagggaatatacttcttgagagtattgttggaactgcagctgttgctagagcctggacttcatattttgcaactcttctgaatcgtagcccgaacgctctacggatcaaaacagatctcagttccggttttaatctcttggacccaatagctgttgttgttatagccgcttcagctacaattgcatcgatcagcacaagaaagacttcattgctcaactggatagcttctgctatcaacactttagtgatattttttgttataatcgctggttttatccacgccgacacatcaaatttgactccattcttgccttttggacctgagggagtgttccgagcagctgcagttgtgtactttgcatatggaggatttgatagcatagcaacaatggctgaagaaaccaagaatccatcaagagacataccaatcgggttactcggttcaatgtcgataataacagtgatatactgcttgatggcattatccttgagtatgatgcagaagtatacagatatagatccaaatgcagcttactcagtagcgtttcagagcgttggaatgaaatggggaaagtacttggtggcacttggtgctctcaaagggatgaccacagttcttttagtaggagcattgggacaagcgagatacgttactcacatcgcacggacccacatgattccgcctatatttgcccttgtccatcccaaaacaggaacaccgataaacgctaacctcctagtagcaattccaagtgctctcattgctttcttttctggtttagatgttttggcaagcctcttatcgataagtactctcttcatcttcacaatgatgcctatcgcactactcgtgaggagatactacgtgagacaagatactccaagagttcatctcattaagctcatcacttgtctcttattcgtcgttgtttcttcaatgggtacttcggcgtattggggaatgcagcgcaagggatcatggatcggttacacagtaacagttcctttctggttcttgggaactttggggatcgtattctttgttcctcagcaacgaacaccgaaagtgtggggcgtaccgttagtgccatggctcccgtgcttatcaatagcaacaaacatctttctcatgggatctttgggagcaatggcttttgtaaggtttggtgtttgcactttagccatgttactatactatttcctgcttggtcttcatgcaacattcgatatggctcatcagcaaattgtgccaagaacataacaactatggaaaacagagaagaaatgtaacctctgaaaaggtctcttccttccaccctagtgttattctgctttcttcatgaactgcttcgttctgtattctctgtaatctgcaaaaagtaaagtttgtatatataag

SEQ ID NO: 89699 - protein, 569 aa, Arabidopsis thaliana
  peptide (1)..(569): Ceres Seq. ID no. 12720086
  misc_feature (1)..(569): Homolog of NCBI NO: 15226868 NR Description: putative amino acid transporter; protein id: supported by cDNA: gi_19699364 [Arabidopsis thaliana]
  misc_feature (114)..(569): Homolog of NCBI NO: 19699365 NR Description: At2g34960/F19I3.19 [Arabidopsis thaliana]
  misc_feature (4)..(562): Homolog of NCBI NO: 34903850 NR Description: unnamed protein product [Oryza sativa (japonica group)] >gi|8096566|dbj|BAA96139.1| unnamed protein product
  misc_feature (4)..(565): Homolog of NCBI NO: 15220035 NR Description: putative amino acid transporter; protein id: supported by cDNA: gi_18176203 [Arabidopsis thaliana] amino acid transporter homolog [imported] similar to amino acid
  misc_feature (12)..(561): Homolog of NCBI NO: 30685317 NR Description: amino acid transport protein AAT1 [Arabidopsis
  misc_feature (56)..(561): Homolog of NCBI NO: 1076291 NR Description: amino acid transport protein AAT1 - Arabidopsis >gi|2911069|emb|CAA17531.1| amino acid transport protein AAT1 thaliana] >gi|7268909|emb|CAB79112.1| amino acid transport
  misc_feature (21)..(559): Homolog of NCBI NO: 15238312 NR Description: amino acid transport - like protein; protein id: supported by cDNA: 158156., supported by cDNA: gi_13430547, by cDNA: gi_14532753 [Arabidopsis thaliana]
  misc_feature (19)..(559): Homolog of NCBI NO: 15228334 NR Description: putative amino acid transporter; protein id: [Arabidopsis thaliana] >gi|8567793|gb|AAF76365.1| amino acid putative [Arabidopsis thaliana]
  misc_feature (31)..(566): Homolog of NCBI NO: 38345948 NR Description: OSJNBb0103I08.20 [Oryza sativa (japonica
  misc_feature (61)..(437): Homolog of NCBI NO: 17533459 NR Description: Amino acid permease family member [Caenorhabditis
MEGEERGYWRWSKRDFFPEESFQSFGSYRAALSQTCSRFKNRLVSRSDDENERFELKKQSEHEMKRCLTWWDLVWFGFGSVIGAGIFVLTGQEAHEQAGPAIVLSYVVSGLSAMLSVFCYTEFAVEIPVAGGSFAYLRIELGDFAAFITAGNILLESIVGTAAVARAWTSYFATLLNRSPNALRIKTDLSSGFNLLDPIAVVVIAASATIASISTRKTSLLNWIASAINTLVIFFVIIAGFIHADTSNLTPFLPFGPEGVFRAAAVVYFAYGGFDSIATMAEETKNPSRDIPIGLLGSMSIITVIYCLMALSLSMMQKYTDIDPNAAYSVAFQSVGMKWGKYLVALGALKGMTTVLLVGALGQARYVTHIARTHMIPPIFALVHPKTGTPINANLLVAIPSALIAFFSGLDVLASLLSISTLFIFTMMPIALLVRRYYVRQDTPRVHLIKLITCLLFVVVSSMGTSAYWGMQRKGSWIGYTVTVPFWFLGTLGIVFFVPQQRTPKVWGVPLVPWLPCLSIATNIFLMGSLGAMAFVRFGVCTLAMLLYYFLLGLHATFDMAHQQIVPRT

SEQ ID NO: 89700 - protein, 506 aa, Arabidopsis thaliana
  peptide (1)..(506): Ceres Seq. ID no. 12720087
  misc_feature (1)..(506): Homolog of NCBI NO: 15226868 NR Description: putative amino acid transporter; protein id: supported by cDNA: gi_19699364 [Arabidopsis thaliana]
  misc_feature (51)..(506): Homolog of NCBI NO: 19699365 NR Description: At2g34960/F19I3.19 [Arabidopsis thaliana]
  misc_feature (1)..(499): Homolog of NCBI NO: 34903850 NR Description: unnamed protein product [Oryza sativa (japonica group)] >gi|8096566|dbj|BAA96139.1| unnamed protein product
  misc_feature (1)..(502): Homolog of NCBI NO: 15220035 NR Description: putative amino acid transporter; protein id: supported by cDNA: gi_18176203 [Arabidopsis thaliana] amino acid transporter homolog [imported] similar to amino acid
  misc_feature (1)..(498): Homolog of NCBI NO: 30685317 NR Description: amino acid transport protein AAT1 [Arabidopsis
  misc_feature (1)..(498): Homolog of NCBI NO: 1076291 NR Description: amino acid transport protein AAT1 - Arabidopsis >gi|2911069|emb|CAA17531.1| amino acid transport protein AAT1 thaliana] >gi|7268909|emb|CAB79112.1| amino acid transport
  misc_feature (1)..(496): Homolog of NCBI NO: 15238312 NR Description: amino acid transport - like protein; protein id: supported by cDNA: 158156., supported by cDNA: gi_13430547, by cDNA: gi_14532753 [Arabidopsis thaliana]
  misc_feature (1)..(496): Homolog of NCBI NO: 15228334 NR Description: putative amino acid transporter; protein id: [Arabidopsis thaliana] >gi|8567793|gb|AAF76365.1| amino acid putative [Arabidopsis thaliana]
  misc_feature (1)..(503): Homolog of NCBI NO: 38345948 NR Description: OSJNBb0103I08.20 [Oryza sativa (japonica
  misc_feature (1)..(374): Homolog of NCBI NO: 17533459 NR Description: Amino acid permease family member [Caenorhabditis
MKRCLTWWDLVWFGFGSVIGAGIFVLTGQEAHEQAGPAIVLSYVVSGLSAMLSVFCYTEFAVEIPVAGGSFAYLRIELGDFAAFITAGNILLESIVGTAAVARAWTSYFATLLNRSPNALRIKTDLSSGFNLLDPIAVVVIAASATIASISTRKTSLLNWIASAINTLVIFFVIIAGFIHADTSNLTPFLPFGPEGVFRAAAVVYFAYGGFDSIATMAEETKNPSRDIPIGLLGSMSIITVIYCLMALSLSMMQKYTDIDPNAAYSVAFQSVGMKWGKYLVALGALKGMTTVLLVGALGQARYVTHIARTHMIPPIFALVHPKTGTPINANLLVAIPSALIAFFSGLDVLASLLSISTLFIFTMMPIALLVRRYYVRQDTPRVHLIKLITCLLFVVVSSMGTSAYWGMQRKGSWIGYTVTVPFWFLGTLGIVFFVPQQRTPKVWGVPLVPWLPCLSIATNIFLMGSLGAMAFVRFGVCTLAMLLYYFLLGLHATFDMAHQQIVPRT

SEQ ID NO: 89701 - protein, 456 aa, Arabidopsis thaliana
  peptide (1)..(456): Ceres Seq. ID no. 12720088
  misc_feature (1)..(456): Homolog of NCBI NO: 15226868 NR Description: putative amino acid transporter; protein id: supported by cDNA: gi_19699364 [Arabidopsis thaliana]
  misc_feature (1)..(456): Homolog of NCBI NO: 19699365 NR Description: At2g34960/F19I3.19 [Arabidopsis thaliana]
  misc_feature (1)..(449): Homolog of NCBI NO: 34903850 NR Description: unnamed protein product [Oryza sativa (japonica group)] >gi|8096566|dbj|BAA96139.1| unnamed protein product
  misc_feature (1)..(452): Homolog of NCBI NO: 15220035 NR Description: putative amino acid transporter; protein id: supported by cDNA: gi_18176203 [Arabidopsis thaliana] amino acid transporter homolog [imported] similar to amino acid
  misc_feature (1)..(448): Homolog of NCBI NO: 30685317 NR Description: amino acid transport protein AAT1 [Arabidopsis
  misc_feature (1)..(448): Homolog of NCBI NO: 1076291 NR Description: amino acid transport protein AAT1 - Arabidopsis >gi|2911069|emb|CAA17531.1| amino acid transport protein AAT1 thaliana] >gi|7268909|emb|CAB79112.1| amino acid transport
  misc_feature (1)..(446): Homolog of NCBI NO: 15238312 NR Description: amino acid transport - like protein; protein id: supported by cDNA: 158156., supported by cDNA: gi_13430547, by cDNA: gi_14532753 [Arabidopsis thaliana]
  misc_feature (1)..(446): Homolog of NCBI NO: 15228334 NR Description: putative amino acid transporter; protein id: [Arabidopsis thaliana] >gi|8567793|gb|AAF76365.1| amino acid putative [Arabidopsis thaliana]
  misc_feature (1)..(453): Homolog of NCBI NO: 38345948 NR Description: OSJNBb0103I08.20 [Oryza sativa (japonica
  misc_feature (1)..(324): Homolog of NCBI NO: 17533459 NR Description: Amino acid permease family member [Caenorhabditis
MLSVFCYTEFAVEIPVAGGSFAYLRIELGDFAAFITAGNILLESIVGTAAVARAWTSYFATLLNRSPNALRIKTDLSSGFNLLDPIAVVVIAASATIASISTRKTSLLNWIASAINTLVIFFVIIAGFIHADTSNLTPFLPFGPEGVFRAAAVVYFAYGGFDSIATMAEETKNPSRDIPIGLLGSMSIITVIYCLMALSLSMMQKYTDIDPNAAYSVAFQSVGMKWGKYLVALGALKGMTTVLLVGALGQARYVTHIARTHMIPPIFALVHPKTGTPINANLLVAIPSALIAFFSGLDVLASLLSISTLFIFTMMPIALLVRRYYVRQDTPRVHLIKLITCLLFVVVSSMGTSAYWGMQRKGSWIGYTVTVPFWFLGTLGIVFFVPQQRTPKVWGVPLVPWLPCLSIATNIFLMGSLGAMAFVRFGVCTLAMLLYYFLLGLHATFDMAHQQIVPRT

SEQ ID NO: 89702 - DNA, 1802 bp, Arabidopsis thaliana
  misc_feature (1)..(1802): Ceres Seq. ID no. 12720123
  misc_feature: MA Experiment ID: 20001248 Result: Up-regulated in Transcription
  misc_feature: MA Experiment 20001248 PARAMETER Experiment Name: At_Far-red-induction_P Parameter: Age (day) Value: 7
  misc_feature: MA Experiment 20001248 PARAMETER Experiment Name: At_Far-red-induction_P Parameter: Light Value: Far-red vs. White
  misc_feature: MA Experiment 20001248 PARAMETER Experiment Name: At_Far-red-induction_P Parameter: Organism Value: A. thaliana
  misc_feature: MA Experiment 20001248 PARAMETER Experiment Name: At_Far-red-induction_P Parameter: Plant Line Value: Columbia
  misc_feature: MA Experiment 20001248 PARAMETER Experiment Name: At_Far-red-induction_P Parameter: Timepoint (hr) Value: 4
  misc_feature: MA Experiment 20001248 PARAMETER Experiment Name: At_Far-red-induction_P Parameter: Tissue Value: Whole Plant
  misc_feature: MA Experiment ID: 20001450 Result: Up-regulated in Transcription
  misc_feature: MA Experiment 20001450 PARAMETER Experiment Name: At_Far-red-induction_P Parameter: Age (day) Value: 7
  misc_feature: MA Experiment 20001450 PARAMETER Experiment Name: At_Far-red-induction_P Parameter: Light Value: Far-red vs. White
  misc_feature: MA Experiment 20001450 PARAMETER Experiment Name: At_Far-red-induction_P Parameter: Organism Value: A. thaliana
  misc_feature: MA Experiment 20001450 PARAMETER Experiment Name: At_Far-red-induction_P Parameter: Plant Line Value: Columbia
  misc_feature: MA Experiment 20001450 PARAMETER Experiment Name: At_Far-red-induction_P Parameter: Timepoint (hr) Value: 8
  misc_feature: MA Experiment 20001450 PARAMETER Experiment Name: At_Far-red-induction_P Parameter: Tissue Value: Whole Plant
  misc_feature: MA Experiment ID: 20001451 Result: Up-regulated in Transcription
  misc_feature: MA Experiment 20001451 PARAMETER Experiment Name: At_Far-red-induction_P Parameter: Age (day) Value: 7
  misc_feature: MA Experiment 20001451 PARAMETER Experiment Name: At_Far-red-induction_P Parameter: Light Value: Far-red vs. White
  misc_feature: MA Experiment 20001451 PARAMETER Experiment Name: At_Far-red-induction_P Parameter: Organism Value: A. thaliana
  misc_feature: MA Experiment 20001451 PARAMETER Experiment Name: At_Far-red-induction_P Parameter: Plant Line Value: Columbia
  misc_feature: MA Experiment 20001451 PARAMETER Experiment Name: At_Far-red-induction_P Parameter: Timepoint (hr) Value: 24
  misc_feature: MA Experiment 20001451 PARAMETER Experiment Name: At_Far-red-induction_P Parameter: Tissue Value: Whole Plant
cttcttcttcttcttcgcgaaaacttggaaactgttttaggaacaaaaaccagaggctttgatttggaaaaaaccctaattttcaacaaccctaaatcccctaccatttctccccaaatcctctttccaagttccatactctttatgtaaatgcatctgaagaaatcatctgtaacagaacgacgattaatcgggaaagacgattccgatccaaaccaaatccccaatccgattcatcatcatcatcagacccagaataaaaatcgaaccgccattgataataaaggctctggcttcactaagtataatcatccccaaggtcagaatcatcatcacacggttgatatcccaaccggtgttgaccatttccgacgaagaagcgcacgggcacgatcaggatcgatttcttcatttttcccatcaaatcttttgtcttctctttcttcctatcgtcctgtgattgctcggttcttgaggaagcttctacgctatacccttagagcccgtttgatttgtttccatcttcgtttcttgcttcttctcgctgtccctcctttatacatcttcttccttgttatcaatcttcgtatcttccttcgtctagtctttgtgattatcgctttatccttcatcctctcgatctctctcagattcgctcttcctcacttaacatcaattcgtctttttgtcgcacgcttgctgacatttatccctgccagattctcttcctctcagccgagcactgaccgagttgtttggtccattgggtcgaagccagttgcggagaataataagacaaattcaggatcttgggttcagaagtatggcactaatgatatgtatgaaggagagtttcatagaggaaagtgttcaggaagtggagtttattactattctatgaaaggcaaatacgaaggagagtggattgatgggaaatatgatggttatggagtagaaacatggtctaaagggagtaggtatcgaggtcaatataggttaggtctaagacatggaattggagtttatacgttttatacaggagatgtgtatgctggtgaatggtctaatgggcagtgccatggttgtggtgtatatacctctgaggatggaagtagatatgacggagagttcaagtggggtgtcaaacatggccttggtagttaccatttcagaaatggtgatgcgtatgctggggagtattttgcagacaagatgcatggttttggagtgtatcactttgcgaacgggcataagtatgaaggagcttggcacgagggaagaaggcaagggcttggtatgtatactttcaggaatggtgatacacaagccggtcattgggaagacggtgtactcagttgtcctaccgagcagactatccgtcctggatcatcttttaccataagccattccaaagttgttgatgctgttgagcaagcaaggaaagcagctgagaaagcacatgaagttgtgaaagtggaagagaggatcaagagagcggtgatggctgcaaatagagcagcgaatgcagctagagtagcagccgtgaaggctgtccaatcccagacctttcacaggaatgatggcgatcttgaaaccaattgttgagcataggttagaagagatcttccttaacaggttttcttgttcctttatgagcaaagctagtttgaaactgtagataataaactagagatgatctttgtatatcaacaagaaaaaaattgggtctgcttcatagaatgcaactgacatacatgtagccaaaaatccctatcttgattaaacaattagaagaatctggt

SEQ ID NO: 89703 - protein, 484 aa, Arabidopsis thaliana
  peptide (1)..(484): Ceres Seq. ID no. 12720124
  misc_feature (300)..(322): Pfam Name: MORN repeat Pfam Description: MORN repeat
  misc_feature (1)..(484): Homolog of NCBI NO: 18403768 NR Description: expressed protein; protein id: At2g35170.1, by cDNA: gi_16604413, supported by cDNA: gi_19699213 [Arabidopsis >gi|25370691|pir||E84765 hypothetical protein At2g35170
  misc_feature (67)..(479): Homolog of NCBI NO: 21928129 NR Description: AT4g17080/dl4570w [Arabidopsis thaliana]
  misc_feature (1)..(479): Homolog of NCBI NO: 15235967 NR Description: hypothetical protein; protein id: At4g17080.1
  misc_feature (117)..(480): Homolog of NCBI NO: 37536922 NR Description: putative phosphatidylinositol-4-phosphate
  misc_feature (121)..(471): Homolog of NCBI NO: 15219142 NR Description: phosphatidylinositol-4-phosphate 5-kinase, protein id: At1g21920.1, supported by cDNA: 37462., supported by gi_13878044 [Arabidopsis thaliana]
  misc_feature (147)..(471): Homolog of NCBI NO: 21593251 NR Description: phosphatidylinositol-4-phosphate 5-kinase,
  misc_feature (121)..(471): Homolog of NCBI NO: 15217439 NR Description: unknown protein; protein id: At1g77660.1
  misc_feature (219)..(398): Homolog of NCBI NO: 40062709 NR Description: MORN repeat protein [uncultured bacterium 314]
  misc_feature (195)..(399): Homolog of NCBI NO: 40062709 NR Description: MORN repeat protein [uncultured bacterium 314]
  misc_feature (203)..(399): Homolog of NCBI NO: 40062709 NR Description: MORN repeat protein [uncultured bacterium 314]
MHLKKSSVTERRLIGKDDSDPNQIPNPIHHHHQTQNKNRTAIDNKGSGFTKYNHPQGQNHHHTVDIPTGVDHFRRRSARARSGSISSFFPSNLLSSLSSYRPVIARFLRKLLRYTLRARLICFHLRFLLLLAVPPLYIFFLVINLRIFLRLVFVIIALSFILSISLRFALPHLTSIRLFVARLLTFIPARFSSSQPSTDRVVWSIGSKPVAENNKTNSGSWVQKYGTNDMYEGEFHRGKCSGSGVYYYSMKGKYEGEWIDGKYDGYGVETWSKGSRYRGQYRLGLRHGIGVYTFYTGDVYAGEWSNGQCHGCGVYTSEDGSRYDGEFKWGVKHGLGSYHFRNGDAYAGEYFADKMHGFGVYHFANGHKYEGAWHEGRRQGLGMYTFRNGDTQAGHWEDGVLSCPTEQTIRPGSSFTISHSKVVDAVEQARKAAEKAHEVVKVEERIKRAVMAANRAANAARVAAVKAVQSQTFHRNDGDLETNC

SEQ ID NO: 89704 - protein, 255 aa, Arabidopsis thaliana
  peptide (1)..(255): Ceres Seq. ID no. 12720125
  misc_feature (71)..(93): Pfam Name: MORN repeat Pfam Description: MORN repeat
  misc_feature (1)..(255): Homolog of NCBI NO: 18403768 NR Description: expressed protein; protein id: At2g35170.1, by cDNA: gi_16604413, supported by cDNA: gi_19699213 [Arabidopsis >gi|25370691|pir||E84765 hypothetical protein At2g35170
  misc_feature (1)..(250): Homolog of NCBI NO: 21928129 NR Description: AT4g17080/dl4570w [Arabidopsis thaliana]
  misc_feature (1)..(250): Homolog of NCBI NO: 15235967 NR Description: hypothetical protein; protein id: At4g17080.1
  misc_feature (1)..(251): Homolog of NCBI NO: 37536922 NR Description: putative phosphatidylinositol-4-phosphate
  misc_feature (1)..(242): Homolog of NCBI NO: 15219142 NR Description: phosphatidylinositol-4-phosphate 5-kinase, protein id: At1g21920.1, supported by cDNA: 37462., supported by gi_13878044 [Arabidopsis thaliana]
  misc_feature (1)..(242): Homolog of NCBI NO: 21593251 NR Description: phosphatidylinositol-4-phosphate 5-kinase,
  misc_feature (1)..(242): Homolog of NCBI NO: 15217439 NR Description: unknown protein; protein id: At1g77660.1
  misc_feature (1)..(169): Homolog of NCBI NO: 40062709 NR Description: MORN repeat protein [uncultured bacterium 314]
  misc_feature (1)..(170): Homolog of NCBI NO: 40062709 NR Description: MORN repeat protein [uncultured bacterium 314]
  misc_feature (1)..(170): Homolog of NCBI NO: 40062709 NR Description: MORN repeat protein [uncultured bacterium 314]
MYEGEFHRGKCSGSGVYYYSMKGKYEGEWIDGKYDGYGVETWSKGSRYRGQYRLGLRHGIGVYTFYTGDVYAGEWSNGQCHGCGVYTSEDGSRYDGEFKWGVKHGLGSYHFRNGDAYAGEYFADKMHGFGVYHFANGHKYEGAWHEGRRQGLGMYTFRNGDTQAGHWEDGVLSCPTEQTIRPGSSFTISHSKVVDAVEQARKAAEKAHEVVKVEERIKRAVMAANRAANAARVAAVKAVQSQTFHRNDGDLETNC

SEQ ID NO: 89705 - DNA, 858 bp, Arabidopsis thaliana
  misc_feature (1)..(858): Ceres Seq. ID no. 12720130
  misc_feature: MA Experiment ID: 20000184 Result: Up-regulated in Transcription
  misc_feature: MA Experiment 20000184 PARAMETER Experiment Name: At_Shoots__P Parameter: Age (day) Value: 7
  misc_feature: MA Experiment 20000184 PARAMETER Experiment Name: At_Shoots__P Parameter: Tissue Value: Shoots vs. Whole Plant
  misc_feature: MA Experiment ID: 20000185 Result: Up-regulated in Transcription
  misc_feature: MA Experiment 20000185 PARAMETER Experiment Name: At_Roots__P Parameter: Age (day) Value: 7 vs. 21
  misc_feature: MA Experiment 20000185 PARAMETER Experiment Name: At_Roots__P Parameter: Organism Value: A. thaliana
  misc_feature: MA Experiment 20000185 PARAMETER Experiment Name: At_Roots__P Parameter: Tissue Value: Roots vs. Whole Plant
  misc_feature: MA Experiment ID: 20000436 Result: Down-regulated in Transcription
  misc_feature: MA Experiment 20000436 PARAMETER Experiment Name: At_Drought_P Parameter: Age (day) Value: 7
  misc_feature: MA Experiment 20000436 PARAMETER Experiment Name: At_Drought_P Parameter: Organism Value: A. thaliana
  misc_feature: MA Experiment 20000436 PARAMETER Experiment Name: At_Drought_P Parameter: Plant Line Value: WS
  misc_feature: MA Experiment 20000436 PARAMETER Experiment Name: At_Drought_P Parameter: Timepoint (hr) Value: 12
  misc_feature: MA Experiment 20000436 PARAMETER Experiment Name: At_Drought_P Parameter: Tissue Value: Whole Plant
  misc_feature: MA Experiment 20000436 PARAMETER Experiment Name: At_Drought_P Parameter: Treatment Value: Drought vs. No Drought
  misc_feature: MA Experiment ID: 20000437 Result: Down-regulated in Transcription
  misc_feature: MA Experiment 20000437 PARAMETER Experiment Name: At_Drought_P Parameter: Age (day) Value: 8
  misc_feature: MA Experiment 20000437 PARAMETER Experiment Name: At_Drought_P Parameter: Organism Value: A. thaliana
  misc_feature: MA Experiment 20000437 PARAMETER Experiment Name: At_Drought_P Parameter: Plant Line Value: WS
  misc_feature: MA Experiment 20000437 PARAMETER Experiment Name: At_Drought_P Parameter: Timepoint (hr) Value: 24
  misc_feature: MA Experiment 20000437 PARAMETER Experiment Name: At_Drought_P Parameter: Tissue Value: Whole Plant
  misc_feature: MA Experiment 20000437 PARAMETER Experiment Name: At_Drought_P Parameter: Treatment Value: Drought vs. No Drought
  misc_feature: MA Experiment ID: 20000439 Result: Up-regulated in Transcription
  misc_feature: MA Experiment 20000439 PARAMETER Experiment Name: At_Roots__P Parameter: Age (day) Value: 14 vs. 21
  misc_feature: MA Experiment 20000439 PARAMETER Experiment Name: At_Roots__P Parameter: Organism Value: A. thaliana
  misc_feature: MA Experiment 20000439 PARAMETER Experiment Name: At_Roots__P Parameter: Tissue Value: Roots vs. Whole Plant
  misc_feature: MA Experiment ID: 20001451 Result: Up-regulated in Transcription
  misc_feature: MA Experiment 20001451 PARAMETER Experiment Name: At_Far-red-induction_P Parameter: Age (day) Value: 7
  misc_feature: MA Experiment 20001451 PARAMETER Experiment Name: At_Far-red-induction_P Parameter: Light Value: Far-red vs. White
  misc_feature: MA Experiment 20001451 PARAMETER Experiment Name: At_Far-red-induction_P Parameter: Organism Value: A. thaliana
  misc_feature: MA Experiment 20001451 PARAMETER Experiment Name: At_Far-red-induction_P Parameter: Plant Line Value: Columbia
  misc_feature: MA Experiment 20001451 PARAMETER Experiment Name: At_Far-red-induction_P Parameter: Timepoint (hr) Value: 24
  misc_feature: MA Experiment 20001451 PARAMETER Experiment Name: At_Far-red-induction_P Parameter: Tissue Value: Whole Plant
atggctggtctcgatctaggcacaacttctcgctacgtccacaacgtcgatggtggcggcggcggacagttcaccaccgacaaccaccacgaagatgacggtggcgctggaggaaaccaccatcatcaccatcataatcataatcaccatcaaggtttagatttaatagcttctaatgataactctggactaggcggcggtggaggaggagggagcggtgacctcgtcatgcgtcggccacgtggccgtccagctggatcgaagaacaaaccgaagccgccggtgattgtcacgcgcgagagcgcaaacactcttagggctcacattcttgaagttggaagtggctgcgacgttttcgaatgtatctccacttacgctcgtcggagacagcgcgggatttgcgttttatccgggacgggaaccgtcactaacgtcagcatccgtcagcctacggcggccggagctgttgtgactctgcggggtacttttgagattctttccctctccggatcttttcttccgccacctgctcctccaggggcgactagcttgacgatattcctcgctggagctcaaggacaggtcgtcggaggtaacgtagttggtgagttaatggcggcggggccggtaatggtcatggcagcgtcttttacaaacgtggcttacgaaaggttgcctttggacgagcatgaggagcacttgcaaagtggcggcggcggaggtggagggaatatgtactcggaagccactggcggtggcggagggttgcctttctttaatttgccgatgagtatgcctcagattggagttgaaagttggcaggggaatcacgccggcgccggtagggctccgttttag

SEQ ID NO: 89706 - protein, 285 aa, Arabidopsis thaliana
  peptide (1)..(285): Ceres Seq. ID no. 12720131
  misc_feature (1)..(285): Homolog of NCBI NO: 15226945 NR Description: putative AT-hook DNA-binding protein; protein id:
  misc_feature (1)..(285): Homolog of NCBI NO: 15236657 NR Description: hypothetical protein; protein id: At4g17800.1, by cDNA: gi_17933298, supported by cDNA: gi_20453386 [Arabidopsis
  misc_feature (1)..(285): Homolog of NCBI NO: 38346718 NR Description: OSJNBa0086O06.16 [Oryza sativa (japonica
  misc_feature (23)..(257): Homolog of NCBI NO: 15234404 NR Description: putative DNA-binding protein; protein id:
  misc_feature (31)..(247): Homolog of NCBI NO: 15235815 NR Description: putative DNA binding protein; protein id:
  misc_feature (1)..(279): Homolog of NCBI NO: 34905212 NR Description: P0672D01.8 [Oryza sativa (japonica
  misc_feature (44)..(279): Homolog of NCBI NO: 18396925 NR Description: expressed protein; protein id: At3g04570.1, by cDNA: 15781. [Arabidopsis thaliana] hypothetical protein [Arabidopsis thaliana]
  misc_feature (48)..(254): Homolog of NCBI NO: 15225475 NR Description: putative AT-hook DNA-binding protein; protein id:
  misc_feature (34)..(284): Homolog of NCBI NO: 34902080 NR Description: unknown protein [Oryza sativa (japonica >gi|34902088|ref|NP_912390.1| hypothetical protein [Oryza sativa
  misc_feature (32)..(285): Homolog of NCBI NO: 18414224 NR Description: Expressed protein; protein id: At4g14465.1, by cDNA: 36844. [Arabidopsis thaliana]
MAGLDLGTTSRYVHNVDGGGGGQFTTDNHHEDDGGAGGNHHHHHHNHNHHQGLDLIASNDNSGLGGGGGGGSGDLVMRRPRGRPAGSKNKPKPPVIVTRESANTLRAHILEVGSGCDVFECISTYARRRQRGICVLSGTGTVTNVSIRQPTAAGAVVTLRGTFEILSLSGSFLPPPAPPGATSLTIFLAGAQGQVVGGNVVGELMAAGPVMVMAASFTNVAYERLPLDEHEEHLQSGGGGGGGNMYSEATGGGGGLPFFNLPMSMPQIGVESWQGNHAGAGRAPF

SEQ ID NO: 89707 - protein, 209 aa, Arabidopsis thaliana
  peptide (1)..(209): Ceres Seq. ID no. 12720132
  misc_feature (1)..(209): Homolog of NCBI NO: 15226945 NR Description: putative AT-hook DNA-binding protein; protein id:
  misc_feature (1)..(209): Homolog of NCBI NO: 15236657 NR Description: hypothetical protein; protein id: At4g17800.1, by cDNA: gi_17933298, supported by cDNA: gi_20453386 [Arabidopsis
  misc_feature (1)..(209): Homolog of NCBI NO: 38346718 NR Description: OSJNBa0086O06.16 [Oryza sativa (japonica
  misc_feature (1)..(181): Homolog of NCBI NO: 15234404 NR Description: putative DNA-binding protein; protein id:
  misc_feature (1)..(171): Homolog of NCBI NO: 15235815 NR Description: putative DNA binding protein; protein id:
  misc_feature (1)..(203): Homolog of NCBI NO: 34905212 NR Description: P0672D01.8 [Oryza sativa (japonica
  misc_feature (1)..(203): Homolog of NCBI NO: 18396925 NR Description: expressed protein; protein id: At3g04570.1, by cDNA: 15781. [Arabidopsis thaliana] hypothetical protein [Arabidopsis thaliana]
  misc_feature (1)..(178): Homolog of NCBI NO: 15225475 NR Description: putative AT-hook DNA-binding protein; protein id:
  misc_feature (1)..(208): Homolog of NCBI NO: 34902080 NR Description: unknown protein [Oryza sativa (japonica >gi|34902088|ref|NP_912390.1| hypothetical protein [Oryza sativa
  misc_feature (1)..(209): Homolog of NCBI NO: 18414224 NR Description: Expressed protein; protein id: At4g14465.1, by cDNA: 36844. [Arabidopsis thaliana]
MRRPRGRPAGSKNKPKPPVIVTRESANTLRAHILEVGSGCDVFECISTYARRRQRGICVLSGTGTVTNVSIRQPTAAGAVVTLRGTFEILSLSGSFLPPPAPPGATSLTIFLAGAQGQVVGGNVVGELMAAGPVMVMAASFTNVAYERLPLDEHEEHLQSGGGGGGGNMYSEATGGGGGLPFFNLPMSMPQIGVESWQGNHAGAGRAPF

SEQ ID NO: 89708 - DNA, 585 bp, Arabidopsis thaliana
  misc_feature (1)..(585): Ceres Seq. ID no. 12720172
atggaacgtgacgactgccggagatttcaggactcgccggcgcagacgacggagagaagagtgaaatataaaccaaagaagaaaagagccaaagatgatgatgatgagaaagttgtttcgaagcatccaaattttcgaggtgtcagaatgagacaatggggaaaatgggtgtccgaaatcagagagccaaaaaagaaatcaagaatctggctcggtactttctccacggcggagatggcggcgcgtgctcacgacgtggcagctttagccatcaaaggcggttctgcacatctcaacttcccggagctcgcttatcacctccctagaccagctagtgccgaccctaaagacatccaagctgccgccgccgcagctgcagccgctgtggccattgacatggatgtagagacgtcttcgccgtcgccatctcccacagttacggaaacgtcatctccggctatgatagcactctccgacgacgcgttctccgatcttcctgatctcttgctcaacgtgaaccataacatcgatggcttctgggactcttttccctatgaagaacccttcctctctcaaagttactag

SEQ ID NO: 89709 - protein, 194 aa, Arabidopsis thaliana
  peptide (1)..(194): Ceres Seq. ID no. 12720173
  misc_feature (42)..(106): Pfam Name: AP2 domain Pfam Description: AP2 domain
  misc_feature (1)..(194): Homolog of NCBI NO: 15227471 NR Description: putative AP2 domain transcription factor; protein At2g35700.1 [Arabidopsis thaliana] >gi|25350648|pir||H84771
  misc_feature (10)..(194): Homolog of NCBI NO: 15235858 NR Description: AP2 domain TINY-related protein; protein id: [Arabidopsis thaliana] >gi|25350649|pir||F85186 apetala2 domain
  misc_feature (41)..(194): Homolog of NCBI NO: 38605844 NR Description: OSJNBb0034G17.2 [Oryza sativa (japonica
  misc_feature (41)..(182): Homolog of NCBI NO: 14140155 NR Description: putative AP2 domain transcription factor [Oryza
  misc_feature (26)..(174): Homolog of NCBI NO: 14140163 NR Description: putative AP2 domain containing protein [Oryza
  misc_feature (5)..(174): Homolog of NCBI NO: 38605848 NR Description: OSJNBb0034G17.6 [Oryza sativa (japonica
  misc_feature (22)..(163): Homolog of NCBI NO: 21908034 NR Description: DRE binding factor 2 [Zea mays]
  misc_feature (22)..(163): Homolog of NCBI NO: 25990951 NR Description: DREB-like protein [Zea mays]
  misc_feature (27)..(145): Homolog of NCBI NO: 38605845 NR Description: OSJNBb0034G17.3 [Oryza sativa (japonica
  misc_feature (27)..(160): Homolog of NCBI NO: 37536842 NR Description: putative DNA binding protein [Oryza sativa
MERDDCRRFQDSPAQTTERRVKYKPKKKRAKDDDDEKVVSKHPNFRGVRMRQWGKWVSEIREPKKKSRIWLGTFSTAEMAARAHDVAALAIKGGSAHLNFPELAYHLPRPASADPKDIQAAAAAAAAAVAIDMDVETSSPSPSPTVTETSSPAMIALSDDAFSDLPDLLLNVNHNIDGFWDSFPYEEPFLSQSY

SEQ ID NO: 89710 - protein, 145 aa, Arabidopsis thaliana
  peptide (1)..(145): Ceres Seq. ID no. 12720174
  misc_feature (1)..(57): Pfam Name: AP2 domain Pfam Description: AP2 domain
  misc_feature (1)..(145): Homolog of NCBI NO: 15227471 NR Description: putative AP2 domain transcription factor; protein At2g35700.1 [Arabidopsis thaliana] >gi|25350648|pir||H84771
  misc_feature (1)..(145): Homolog of NCBI NO: 15235858 NR Description: AP2 domain TINY-related protein; protein id: [Arabidopsis thaliana] >gi|25350649|pir||F85186 apetala2 domain
  misc_feature (1)..(145): Homolog of NCBI NO: 38605844 NR Description: OSJNBb0034G17.2 [Oryza sativa (japonica
  misc_feature (1)..(133): Homolog of NCBI NO: 14140155 NR Description: putative AP2 domain transcription factor [Oryza
  misc_feature (1)..(125): Homolog of NCBI NO: 14140163 NR Description: putative AP2 domain containing protein [Oryza
  misc_feature (1)..(125): Homolog of NCBI NO: 38605848 NR Description: OSJNBb0034G17.6 [Oryza sativa (japonica
  misc_feature (1)..(114): Homolog of NCBI NO: 21908034 NR Description: DRE binding factor 2 [Zea mays]
  misc_feature (1)..(114): Homolog of NCBI NO: 25990951 NR Description: DREB-like protein [Zea mays]
  misc_feature (1)..(96): Homolog of NCBI NO: 38605845 NR Description: OSJNBb0034G17.3 [Oryza sativa (japonica
  misc_feature (1)..(111): Homolog of NCBI NO: 37536842 NR Description: putative DNA binding protein [Oryza sativa
MRQWGKWVSEIREPKKKSRIWLGTFSTAEMAARAHDVAALAIKGGSAHLNFPELAYHLPRPASADPKDIQAAAAAAAAAVAIDMDVETSSPSPSPTVTETSSPAMIALSDDAFSDLPDLLLNVNHNIDGFWDSFPYEEPFLSQSY

SEQ ID NO: 89711 - protein, 116 aa, Arabidopsis thaliana
  peptide (1)..(116): Ceres Seq. ID no. 12720175
  misc_feature (1)..(116): Homolog of NCBI NO: 15227471 NR Description: putative AP2 domain transcription factor; protein At2g35700.1 [Arabidopsis thaliana] >gi|25350648|pir||H84771
  misc_feature (1)..(116): Homolog of NCBI NO: 15235858 NR Description: AP2 domain TINY-related protein; protein id: [Arabidopsis thaliana] >gi|25350649|pir||F85186 apetala2 domain
  misc_feature (1)..(116): Homolog of NCBI NO: 38605844 NR Description: OSJNBb0034G17.2 [Oryza sativa (japonica
  misc_feature (1)..(104): Homolog of NCBI NO: 14140155 NR Description: putative AP2 domain transcription factor [Oryza
  misc_feature (1)..(96): Homolog of NCBI NO: 14140163 NR Description: putative AP2 domain containing protein [Oryza
  misc_feature (1)..(96): Homolog of NCBI NO: 38605848 NR Description: OSJNBb0034G17.6 [Oryza sativa (japonica
  misc_feature (1)..(85): Homolog of NCBI NO: 21908034 NR Description: DRE binding factor 2 [Zea mays]
  misc_feature (1)..(85): Homolog of NCBI NO: 25990951 NR Description: DREB-like protein [Zea mays]
  misc_feature (1)..(67): Homolog of NCBI NO: 38605845 NR Description: OSJNBb0034G17.3 [Oryza sativa (japonica
  misc_feature (1)..(82): Homolog of NCBI NO: 37536842 NR Description: putative DNA binding protein [Oryza sativa
MAARAHDVAALAIKGGSAHLNFPELAYHLPRPASADPKDIQAAAAAAAAAVAIDMDVETSSPSPSPTVTETSSPAMIALSDDAFSDLPDLLLNVNHNIDGFWDSFPYEEPFLSQSY

SEQ ID NO: 89712 - DNA, 1344 bp, Arabidopsis thaliana
  misc_feature (1)..(1344): Ceres Seq. ID no. 12720190
  misc_feature: MA Experiment ID: 20000314 Result: Up-regulated in Transcription
  misc_feature: MA Experiment 20000314 PARAMETER Experiment Name: At_14day_Shoots-Roots_Sub_P Parameter: Age (day) Value: 14
  misc_feature: MA Experiment 20000314 PARAMETER Experiment Name: At_14day_Shoots-Roots_Sub_P Parameter: Organism Value: A. thaliana
  misc_feature: MA Experiment 20000314 PARAMETER Experiment Name: At_14day_Shoots-Roots_Sub_P Parameter: Plant Line Value: WS
  misc_feature: MA Experiment 20000314 PARAMETER Experiment Name: At_14day_Shoots-Roots_Sub_P Parameter: Tissue Value: Roots vs. Whole Plant
  misc_feature: MA Experiment ID: 20000315 Result: Up-regulated in Transcription
  misc_feature: MA Experiment 20000315 PARAMETER Experiment Name: At_14day_Shoots-Roots_Sub_P Parameter: Age (day) Value: 14
  misc_feature: MA Experiment 20000315 PARAMETER Experiment Name: At_14day_Shoots-Roots_Sub_P Parameter: Organism Value: A. thaliana
  misc_feature: MA Experiment 20000315 PARAMETER Experiment Name: At_14day_Shoots-Roots_Sub_P Parameter: Plant Line Value: WS
  misc_feature: MA Experiment 20000315 PARAMETER Experiment Name: At_14day_Shoots-Roots_Sub_P Parameter: Tissue Value: Shoots vs. Whole Plant
atggtgattgcattattagacgtagtgagtagtgatgatgctaaagagcaaaagatgaaggacaagattatctctttgccaggccaacctcctaacctcaacttctctcaattttctggctacgtcactgttgatcccgcggccggacgggctctcttttattggctaaccgaagctcctaggcctagcggaacgaagcccttagtcctatggctcaatggtggtccaggatgctcctctattgcttatggtgcttctgaagaagttggtccatttcgggttaatccagacggaaagactttgcgtctaaatctatatgcttggaacaaagtggcaaatgtgttatttttggattcaccggcgggagttggtttctcttacacaaacacttcgtcagacgaactaaccgtgggagacaagagaacaggggaggatgcttatagattcttggtgagatggttggagaggttccctgagtataaggaacgggctttttacatcgccggcgagagctacgctggacattatattccggagctagcccaactgatcgtcaaccgtaacaaaggtgccaaaaatccaactatcaatctaaaagggattctgatggggaatcctcttgtcgatgactacaatgacaacaaaggaatgcgtgactactggtggaatcacgggcttatatcggacgaaagctacaatgacctgaccaaatggtgtctcaacgactccatcctatttccaaaactaaactgcaacgctgctctgaaccaagccttgtctgagtttggtgacattgacccttacaacatcaatagccctgcatgcaccacgcatgcatcatcaaatgagtggatgcaagcatggcggtatagagggaacgatgagtgtgttgtgggatacacacgcaagtatatgaacgatcccaatgtgcacaaatccttccatgcccgtctcaacggcagtactccttggacaccttgcagtcgtgtgataagaaagaattggaaagactcacctaagtccatgcttcctatcatcaagaatcttcttcaagctcatctccgcatttggatcttcagtggggactcggacgcggtgttgcctctaagcgggacgaggcattcgattaatgcaatgaaattgaagagtagcaaaaggtggtatccatggtaccattcacacggcctagtaggaggttggagtcaggtttatgaggatggcttgctaacgtacacgacggttagagcagcagggcatgaggtgccattgtctcagcctcgtctcgctcttttcctcttcacccacttcctagccaaccactctcttccctcctctccctcttaa

SEQ ID NO: 89713 - protein, 447 aa, Arabidopsis thaliana
  peptide (1)..(447): Ceres Seq. ID no. 12720191
  misc_feature (27)..(439): Pfam Name: Serine carboxypeptidase Pfam Description: Serine carboxypeptidase
  misc_feature (1)..(447): Homolog of NCBI NO: 15227492 NR Description: putative serine carboxypeptidase II; protein id: [Arabidopsis thaliana] >gi|25289794|pir||G84772 probable serine
  misc_feature (1)..(443): Homolog of NCBI NO: 15231911 NR Description: putative serine carboxypeptidase II; protein id: [Arabidopsis thaliana] >gi|6648211|gb|AAF21209.1|AC013483_33
  misc_feature (1)..(444): Homolog of NCBI NO: 34908012 NR Description: putative carboxypeptidase D [Oryza sativa
  misc_feature (14)..(443): Homolog of NCBI NO: 15227493 NR Description: putative serine carboxypeptidase II; protein id:
  misc_feature (12)..(443): Homolog of NCBI NO: 34895992 NR Description: putative carboxypeptidase D [Oryza sativa
  misc_feature (21)..(443): Homolog of NCBI NO: 20455471 NR Description: Serine carboxypeptidase II precursor
  misc_feature (1)..(445): Homolog of NCBI NO: 13877871 NR Description: putative serine carboxypeptidase II [Arabidopsis
  misc_feature (1)..(445): Homolog of NCBI NO: 15234795 NR Description: SERINE CARBOXYPEPTIDASE II-like protein; protein At4g30610.1, supported by cDNA: gi_13877870 [Arabidopsis
  misc_feature (21)..(443): Homolog of NCBI NO: 7428204 NR Description: carboxypeptidase D (EC 3.4.16.6) precursor -
  misc_feature (21)..(443): Homolog of NCBI NO: 7428205 NR Description: carboxypeptidase D (EC 3.4.16.6) - wheat
MVIALLDVVSSDDAKEQKMKDKIISLPGQPPNLNFSQFSGYVTVDPAAGRALFYWLTEAPRPSGTKPLVLWLNGGPGCSSIAYGASEEVGPFRVNPDGKTLRLNLYAWNKVANVLFLDSPAGVGFSYTNTSSDELTVGDKRTGEDAYRFLVRWLERFPEYKERAFYIAGESYAGHYIPELAQLIVNRNKGAKNPTINLKGILMGNPLVDDYNDNKGMRDYWWNHGLISDESYNDLTKWCLNDSILFPKLNCNAALNQALSEFGDIDPYNINSPACTTHASSNEWMQAWRYRGNDECVVGYTRKYMNDPNVHKSFHARLNGSTPWTPCSRVIRKNWKDSPKSMLPIIKNLLQAHLRIWIFSGDSDAVLPLSGTRHSINAMKLKSSKRWYPWYHSHGLVGGWSQVYEDGLLTYTTVRAAGHEVPLSQPRLALFLFTHFLANHSLPSSPS

SEQ ID NO: 89714 - protein, 429 aa, Arabidopsis thaliana
  peptide (1)..(429): Ceres Seq. ID no. 12720192
  misc_feature (9)..(421): Pfam Name: Serine carboxypeptidase Pfam Description: Serine carboxypeptidase
  misc_feature (1)..(429): Homolog of NCBI NO: 15227492 NR Description: putative serine carboxypeptidase II; protein id: [Arabidopsis thaliana] >gi|25289794|pir||G84772 probable serine
  misc_feature (1)..(425): Homolog of NCBI NO: 15231911 NR Description: putative serine carboxypeptidase II; protein id: [Arabidopsis thaliana] >gi|6648211|gb|AAF21209.1|AC013483_33
  misc_feature (1)..(426): Homolog of NCBI NO: 34908012 NR Description: putative carboxypeptidase D [Oryza sativa
  misc_feature (1)..(425): Homolog of NCBI NO: 15227493 NR Description: putative serine carboxypeptidase II; protein id:
  misc_feature (1)..(425): Homolog of NCBI NO: 34895992 NR Description: putative carboxypeptidase D [Oryza sativa
  misc_feature (3)..(425): Homolog of NCBI NO: 20455471 NR Description: Serine carboxypeptidase II precursor
  misc_feature (1)..(427): Homolog of NCBI NO: 13877871 NR Description: putative serine carboxypeptidase II [Arabidopsis
  misc_feature (1)..(427): Homolog of NCBI NO: 15234795 NR Description: SERINE CARBOXYPEPTIDASE II-like protein; protein At4g30610.1, supported by cDNA: gi_13877870 [Arabidopsis
  misc_feature (3)..(425): Homolog of NCBI NO: 7428204 NR Description: carboxypeptidase D (EC 3.4.16.6) precursor -
  misc_feature (3)..(425): Homolog of NCBI NO: 7428205 NR Description: carboxypeptidase D (EC 3.4.16.6) - wheat
MKDKIISLPGQPPNLNFSQFSGYVTVDPAAGRALFYWLTEAPRPSGTKPLVLWLNGGPGCSSIAYGASEEVGPFRVNPDGKTLRLNLYAWNKVANVLFLDSPAGVGFSYTNTSSDELTVGDKRTGEDAYRFLVRWLERFPEYKERAFYIAGESYAGHYIPELAQLIVNRNKGAKNPTINLKGILMGNPLVDDYNDNKGMRDYWWNHGLISDESYNDLTKWCLNDSILFPKLNCNAALNQALSEFGDIDPYNINSPACTTHASSNEWMQAWRYRGNDECVVGYTRKYMNDPNVHKSFHARLNGSTPWTPCSRVIRKNWKDSPKSMLPIIKNLLQAHLRIWIFSGDSDAVLPLSGTRHSINAMKLKSSKRWYPWYHSHGLVGGWSQVYEDGLLTYTTVRAAGHEVPLSQPRLALFLFTHFLANHSLPSSPS

SEQ ID NO: 89715 - protein, 245 aa, Arabidopsis thaliana
  peptide (1)..(245): Ceres Seq. ID no. 12720193
  misc_feature (1)..(237): Pfam Name: Serine carboxypeptidase Pfam Description: Serine carboxypeptidase
  misc_feature (1)..(245): Homolog of NCBI NO: 15227492 NR Description: putative serine carboxypeptidase II; protein id: [Arabidopsis thaliana] >gi|25289794|pir||G84772 probable serine
  misc_feature (1)..(241): Homolog of NCBI NO: 15231911 NR Description: putative serine carboxypeptidase II; protein id: [Arabidopsis thaliana] >gi|6648211|gb|AAF21209.1|AC013483_33
  misc_feature (1)..(242): Homolog of NCBI NO: 34908012 NR Description: putative carboxypeptidase D [Oryza sativa
  misc_feature (1)..(241): Homolog of NCBI NO: 15227493 NR Description: putative serine carboxypeptidase II; protein id:
  misc_feature (1)..(241): Homolog of NCBI NO: 34895992 NR Description: putative carboxypeptidase D [Oryza sativa
  misc_feature (1)..(241): Homolog of NCBI NO: 20455471 NR Description: Serine carboxypeptidase II precursor
  misc_feature (1)..(243): Homolog of NCBI NO: 13877871 NR Description: putative serine carboxypeptidase II [Arabidopsis
  misc_feature (1)..(243): Homolog of NCBI NO: 15234795 NR Description: SERINE CARBOXYPEPTIDASE II-like protein; protein At4g30610.1, supported by cDNA: gi_13877870 [Arabidopsis
  misc_feature (1)..(241): Homolog of NCBI NO: 7428204 NR Description: carboxypeptidase D (EC 3.4.16.6) precursor -
  misc_feature (1)..(241): Homolog of NCBI NO: 7428205 NR Description: carboxypeptidase D (EC 3.4.16.6) - wheat
MGNPLVDDYNDNKGMRDYWWNHGLISDESYNDLTKWCLNDSILFPKLNCNAALNQALSEFGDIDPYNINSPACTTHASSNEWMQAWRYRGNDECVVGYTRKYMNDPNVHKSFHARLNGSTPWTPCSRVIRKNWKDSPKSMLPIIKNLLQAHLRIWIFSGDSDAVLPLSGTRHSINAMKLKSSKRWYPWYHSHGLVGGWSQVYEDGLLTYTTVRAAGHEVPLSQPRLALFLFTHFLANHSLPSSPS

SEQ ID NO: 89716 - DNA, 636 bp, Arabidopsis thaliana
  misc_feature (1)..(636): Ceres Seq. ID no. 12720202
  misc_feature: MA Experiment ID: 20000315 Result: Up-regulated in Transcription
  misc_feature: MA Experiment 20000315 PARAMETER Experiment Name: At_14day_Shoots-Roots_Sub_P Parameter: Age (day) Value: 14
  misc_feature: MA Experiment 20000315 PARAMETER Experiment Name: At_14day_Shoots-Roots_Sub_P Parameter: Organism Value: A. thaliana
  misc_feature: MA Experiment 20000315 PARAMETER Experiment Name: At_14day_Shoots-Roots_Sub_P Parameter: Plant Line Value: WS
  misc_feature: MA Experiment 20000315 PARAMETER Experiment Name: At_14day_Shoots-Roots_Sub_P Parameter: Tissue Value: Shoots vs. Whole Plant
atgacgaccaaagagtgcggaaaccacggtggtggcggtggaggaggcggaaccgcctgtagaatctgtggagcaatcatcggcttcatcatcatcgtcttgatgacaatcttcctcgtttcgataatcctccaaccgaaaaaaccagaattcatcctccaagacaccaccgtctacgcctttaacctctcgcagcctaacctcctcacctcaaagtttcagataacaatcgcttcacgcaaccgaaactccaacatcggaatctactacgaccatcttcacgcctacgcttcttaccggaaccagcaaatcactctagctagcgaccttcctccgacgtaccaaagacacaaagaaaatagcgtttggtctcctttattatatggaaaccaagtccctatcgctcctttcaacgccgtggctctcggggacgagcagaatagtggggttttcacgttgactatatgcgttgatggacgcgtgaggtggaaggtcgggactcttactatagggaattatcatctccatgttcgttgtcaggcgttcataaaccaggctgataaagcagccggagttcatgtcggcgaaaacaccgttaagtacacgttgatcaataagtgcagtgtcaatttttag

SEQ ID NO: 89717 - protein, 211 aa, Arabidopsis thaliana
  peptide (1)..(211): Ceres Seq. ID no. 12720203
  misc_feature (1)..(211): Homolog of NCBI NO: 15227540 NR Description: hairpin-induced protein, putative (HIN1); protein
  misc_feature (1)..(211): Homolog of NCBI NO: 15233951 NR Description: hairpin-induced protein, putative (HIN1); protein At4g09590.1 [Arabidopsis thaliana] >gi|25354574|pir||A85098
  misc_feature (1)..(210): Homolog of NCBI NO: 15227538 NR Description: hairpin-induced protein, putative (HIN1); protein
  misc_feature (3)..(210): Homolog of NCBI NO: 15231227 NR Description: hairpin-induced protein, putative (HIN1); protein At3g52470.1, supported by cDNA: 92178., supported by cDNA: supported by cDNA: gi_21281063 [Arabidopsis thaliana]
  misc_feature (4)..(210): Homolog of NCBI NO: 18399308 NR Description: VAMP protein SEC22; protein id: At3g11660.1, by cDNA: 8166., supported by cDNA: gi_9502171 [Arabidopsis
  misc_feature (4)..(210): Homolog of NCBI NO: 28392929 NR Description: putative VAMP protein SEC22 [Arabidopsis thaliana]
  misc_feature (1)..(210): Homolog of NCBI NO: 15240001 NR Description: hairpin-induced protein, putative (HIN1); protein
  misc_feature (1)..(210): Homolog of NCBI NO: 15229906 NR Description: hairpin-induced protein, putative (HIN1); protein At3g44220.1 [Arabidopsis thaliana] >gi|11282595|pir||T49138
  misc_feature (1)..(210): Homolog of NCBI NO: 22326984 NR Description: similar to hairpin-induced protein, putative
  misc_feature (21)..(195): Homolog of NCBI NO: 38344036 NR Description: OJ991214_12.17 [Oryza sativa (japonica
MTTKECGNHGGGGGGGGTACRICGAIIGFIIIVLMTIFLVSIILQPKKPEFILQDTTVYAFNLSQPNLLTSKFQITIASRNRNSNIGIYYDHLHAYASYRNQQITLASDLPPTYQRHKENSVWSPLLYGNQVPIAPFNAVALGDEQNSGVFTLTICVDGRVRWKVGTLTIGNYHLHVRCQAFINQADKAAGVHVGENTVKYTLINKCSVNF

SEQ ID NO: 89718 - protein, 177 aa, Arabidopsis thaliana
  peptide (1)..(177): Ceres Seq. ID no. 12720204
  misc_feature (1)..(177): Homolog of NCBI NO: 15227540 NR Description: hairpin-induced protein, putative (HIN1); protein
  misc_feature (1)..(177): Homolog of NCBI NO: 15233951 NR Description: hairpin-induced protein, putative (HIN1); protein At4g09590.1 [Arabidopsis thaliana] >gi|25354574|pir||A85098
  misc_feature (1)..(176): Homolog of NCBI NO: 15227538 NR Description: hairpin-induced protein, putative (HIN1); protein
  misc_feature (1)..(176): Homolog of NCBI NO: 15231227 NR Description: hairpin-induced protein, putative (HIN1); protein At3g52470.1, supported by cDNA: 92178., supported by cDNA: supported by cDNA: gi_21281063 [Arabidopsis thaliana]
  misc_feature (1)..(176): Homolog of NCBI NO: 18399308 NR Description: VAMP protein SEC22; protein id: At3g11660.1, by cDNA: 8166., supported by cDNA: gi_9502171 [Arabidopsis
  misc_feature (1)..(176): Homolog of NCBI NO: 28392929 NR Description: putative VAMP protein SEC22 [Arabidopsis thaliana]
  misc_feature (1)..(176): Homolog of NCBI NO: 15240001 NR Description: hairpin-induced protein, putative (HIN1); protein
  misc_feature (1)..(176): Homolog of NCBI NO: 15229906 NR Description: hairpin-induced protein, putative (HIN1); protein At3g44220.1 [Arabidopsis thaliana] >gi|11282595|pir||T49138
  misc_feature (1)..(176): Homolog of NCBI NO: 22326984 NR Description: similar to hairpin-induced protein, putative
  misc_feature (1)..(161): Homolog of NCBI NO: 38344036 NR Description: OJ991214_12.17 [Oryza sativa (japonica
MTIFLVSIILQPKKPEFILQDTTVYAFNLSQPNLLTSKFQITIASRNRNSNIGIYYDHLHAYASYRNQQITLASDLPPTYQRHKENSVWSPLLYGNQVPIAPFNAVALGDEQNSGVFTLTICVDGRVRWKVGTLTIGNYHLHVRCQAFINQADKAAGVHVGENTVKYTLINKCSVNF

SEQ ID NO: 89719 - DNA, 1035 bp, Arabidopsis thaliana
  misc_feature (1)..(1035): Ceres Seq. ID no. 12720209
  misc_feature: MA Experiment ID: 20000265 Result: Down-regulated in Transcription
  misc_feature: MA Experiment 20000265 PARAMETER Experiment Name: At_Open_Flower_P Parameter: Age (day) Value: 21
  misc_feature: MA Experiment 20000265 PARAMETER Experiment Name: At_Open_Flower_P Parameter: Plant Line Value: WS
  misc_feature: MA Experiment 20000265 PARAMETER Experiment Name: At_Open_Flower_P Parameter: Tissue Value: Closed Flower vs. Whole Plant
  misc_feature: MA Experiment ID: 20000439 Result: Down-regulated in Transcription
  misc_feature: MA Experiment 20000439 PARAMETER Experiment Name: At_Roots__P Parameter: Age (day) Value: 14 vs. 21
  misc_feature: MA Experiment 20000439 PARAMETER Experiment Name: At_Roots__P Parameter: Organism Value: A. thaliana
  misc_feature: MA Experiment 20000439 PARAMETER Experiment Name: At_Roots__P Parameter: Tissue Value: Roots vs. Whole Plant
  misc_feature: MA Experiment ID: 20000794 Result: Down-regulated in Transcription
  misc_feature: MA Experiment 20000794 PARAMETER Experiment Name: At_Petals_P Parameter: Age (day) Value: 23-25 days
  misc_feature: MA Experiment 20000794 PARAMETER Experiment Name: At_Petals_P Parameter: Plant Line Value: WS
  misc_feature: MA Experiment 20000794 PARAMETER Experiment Name: At_Petals_P Parameter: Tissue Value: Petals vs. Whole plant
atgaattgcctcatgttcttcaaaatgctattagcattctctttcattagtctattttatgttggtaatgcacaacaatcatatggcaattcaacggtttcggcacttttcgcttttggagactcaatacttgacacaggcaacaataatcttcttttaagtgtttctaaagtcaatttttatccatacggtagagactttataggtggaagagctactgggagatttggaaatgggagagttttttctgatataattgctgagggtttgggattgaagaatctcttaccagcatatcgtgatccatacctctggaacaatgatctaacgactggtgtttgtttcgcatctggtggatctggacttgatccaatcactgcaagaacaacaggaagtatatgggtgtcagaccaggtcacagacttccaaaactacatcaccagactaaatggtgtagtaggaaatcaagaacaagcaaatgcagttatatcaaatgctgtttacctaatctccgcaggaaataatgatattgctatcacttattttactacgggggctagaagattacaatacactcttccagcctacaatgatcaattggtctcttggactcgtgatctcataaagagtttatatgatatgggtgcaagaaaatttgccgttatgggaacattaccgctaggttgtttaccaggagcaagagccttaacgagagcatgtgaattatttgtaaatcaaggagctgctatgttcaaccaacaattatctgccgacattgacaatcttggtgcaacatttccgggtgccaaattcgtgtacgtagatatgtacaatcctcttttgggtctcatcattaaccctcaagcttcagggttcattgatgtagctgatgcgtgttgttgtacgccaacgcacttaataccgtgcttggatgcgtctcgttacgtgttttgggatgtagcccatccgacccagaagtcatacgaaaccatcgctccacagattattgaaaatatcaaagcaaagctcgcatga

SEQ ID NO: 89720 - protein, 344 aa, Arabidopsis thaliana
  peptide (1)..(344): Ceres Seq. ID no. 12720210
  misc_feature (36)..(335): Pfam Name: GDSL-like Lipase/Acylhydrolase Pfam Description: GDSL-like Lipase/Acylhydrolase
  misc_feature (1)..(344): Homolog of NCBI NO: 15219505 NR Description: putative lipase/acylhydrolase; protein id: [Arabidopsis thaliana] >gi|25336263|pir||A96763 protein
  misc_feature (1)..(344): Homolog of NCBI NO: 15220775 NR Description: hypothetical protein; protein id: At1g23500.1
  misc_feature (1)..(344): Homolog of NCBI NO: 15242657 NR Description: lipase/acylhydrolase-like protein; protein id:
  misc_feature (4)..(333): Homolog of NCBI NO: 25511649 NR Description: T20H2.9 protein - Arabidopsis thaliana
  misc_feature (5)..(344): Homolog of NCBI NO: 15222902 NR Description: family II extracellular lipase 4 (EXL4); protein At1g75910.1, supported by cDNA: gi_15054387 [Arabidopsis
  misc_feature (30)..(344): Homolog of NCBI NO: 25404994 NR Description: protein T4O12.13 [imported] - Arabidopsis >gi|8778808|gb|AAF79815.1|AC007396_8 T4O12.13 [Arabidopsis
  misc_feature (5)..(344): Homolog of NCBI NO: 15054388 NR Description: family II lipase EXL4 [Arabidopsis thaliana]
  misc_feature (4)..(291): Homolog of NCBI NO: 15223790 NR Description: anter-specific proline-rich protein APG
  misc_feature (5)..(344): Homolog of NCBI NO: 15222904 NR Description: family II extracellular lipase 6 (EXL6); protein At1g75930.1, supported by cDNA: gi_15054389 [Arabidopsis >gi|15054390|gb|AAK30021.1| family II lipase EXL6 [Arabidopsis
  misc_feature (5)..(329): Homolog of NCBI NO: 25404995 NR Description: protein T4O12.15 [imported] - Arabidopsis >gi|8778810|gb|AAF26759.2|AC007396_8 T4O12.15 [Arabidopsis
MNCLMFFKMLLAFSFISLFYVGNAQQSYGNSTVSALFAFGDSILDTGNNNLLLSVSKVNFYPYGRDFIGGRATGRFGNGRVFSDIIAEGLGLKNLLPAYRDPYLWNNDLTTGVCFASGGSGLDPITARTTGSIWVSDQVTDFQNYITRLNGVVGNQEQANAVISNAVYLISAGNNDIAITYFTTGARRLQYTLPAYNDQLVSWTRDLIKSLYDMGARKFAVMGTLPLGCLPGARALTRACELFVNQGAAMFNQQLSADIDNLGATFPGAKFVYVDMYNPLLGLIINPQASGFIDVADACCCTPTHLIPCLDASRYVFWDVAHPTQKSYETIAPQIIENIKAKLA

SEQ ID NO: 89721 - protein, 340 aa, Arabidopsis thaliana
  peptide (1)..(340): Ceres Seq. ID no. 12720211
  misc_feature (32)..(331): Pfam Name: GDSL-like Lipase/Acylhydrolase Pfam Description: GDSL-like Lipase/Acylhydrolase
  misc_feature (1)..(340): Homolog of NCBI NO: 15219505 NR Description: putative lipase/acylhydrolase; protein id: [Arabidopsis thaliana] >gi|25336263|pir||A96763 protein
  misc_feature (1)..(340): Homolog of NCBI NO: 15220775 NR Description: hypothetical protein; protein id: At1g23500.1
  misc_feature (1)..(340): Homolog of NCBI NO: 15242657 NR Description: lipase/acylhydrolase-like protein; protein id:
  misc_feature (1)..(329): Homolog of NCBI NO: 25511649 NR Description: T20H2.9 protein - Arabidopsis thaliana
  misc_feature (1)..(340): Homolog of NCBI NO: 15222902 NR Description: family II extracellular lipase 4 (EXL4); protein At1g75910.1, supported by cDNA: gi_15054387 [Arabidopsis
  misc_feature (26)..(340): Homolog of NCBI NO: 25404994 NR Description: protein T4O12.13 [imported] - Arabidopsis >gi|8778808|gb|AAF79815.1|AC007396_8 T4O12.13 [Arabidopsis
  misc_feature (1)..(340): Homolog of NCBI NO: 15054388 NR Description: family II lipase EXL4 [Arabidopsis thaliana]
  misc_feature (1)..(287): Homolog of NCBI NO: 15223790 NR Description: anter-specific proline-rich protein APG
  misc_feature (1)..(340): Homolog of NCBI NO: 15222904 NR Description: family II extracellular lipase 6 (EXL6); protein At1g75930.1, supported by cDNA: gi_15054389 [Arabidopsis >gi|15054390|gb|AAK30021.1| family II lipase EXL6 [Arabidopsis
  misc_feature (1)..(325): Homolog of NCBI NO: 25404995 NR Description: protein T4O12.15 [imported] - Arabidopsis >gi|8778810|gb|AAF26759.2|AC007396_8 T4O12.15 [Arabidopsis
MFFKMLLAFSFISLFYVGNAQQSYGNSTVSALFAFGDSILDTGNNNLLLSVSKVNFYPYGRDFIGGRATGRFGNGRVFSDIIAEGLGLKNLLPAYRDPYLWNNDLTTGVCFASGGSGLDPITARTTGSIWVSDQVTDFQNYITRLNGVVGNQEQANAVISNAVYLISAGNNDIAITYFTTGARRLQYTLPAYNDQLVSWTRDLIKSLYDMGARKFAVMGTLPLGCLPGARALTRACELFVNQGAAMFNQQLSADIDNLGATFPGAKFVYVDMYNPLLGLIINPQASGFIDVADACCCTPTHLIPCLDASRYVFWDVAHPTQKSYETIAPQIIENIKAKLA

SEQ ID NO: 89722 - protein, 336 aa, Arabidopsis thaliana
  peptide (1)..(336): Ceres Seq. ID no. 12720212
  misc_feature (28)..(327): Pfam Name: GDSL-like Lipase/Acylhydrolase Pfam Description: GDSL-like Lipase/Acylhydrolase
  misc_feature (1)..(336): Homolog of NCBI NO: 15219505 NR Description: putative lipase/acylhydrolase; protein id: [Arabidopsis thaliana] >gi|25336263|pir||A96763 protein
  misc_feature (1)..(336): Homolog of NCBI NO: 15220775 NR Description: hypothetical protein; protein id: At1g23500.1
  misc_feature (1)..(336): Homolog of NCBI NO: 15242657 NR Description: lipase/acylhydrolase-like protein; protein id:
  misc_feature (1)..(325): Homolog of NCBI NO: 25511649 NR Description: T20H2.9 protein - Arabidopsis thaliana
  misc_feature (1)..(336): Homolog of NCBI NO: 15222902 NR Description: family II extracellular lipase 4 (EXL4); protein At1g75910.1, supported by cDNA: gi_15054387 [Arabidopsis
  misc_feature (22)..(336): Homolog of NCBI NO: 25404994 NR Description: protein T4O12.13 [imported] - Arabidopsis >gi|8778808|gb|AAF79815.1|AC007396_8 T4O12.13 [Arabidopsis
  misc_feature (1)..(336): Homolog of NCBI NO: 15054388 NR Description: family II lipase EXL4 [Arabidopsis thaliana]
  misc_feature (1)..(283): Homolog of NCBI NO: 15223790 NR Description: anter-specific proline-rich protein APG
  misc_feature (1)..(336): Homolog of NCBI NO: 15222904 NR Description: family II extracellular lipase 6 (EXL6); protein At1g75930.1, supported by cDNA: gi_15054389 [Arabidopsis >gi|15054390|gb|AAK30021.1| family II lipase EXL6 [Arabidopsis
  misc_feature (1)..(321): Homolog of NCBI NO: 25404995 NR Description: protein T4O12.15 [imported] - Arabidopsis >gi|8778810|gb|AAF26759.2|AC007396_8 T4O12.15 [Arabidopsis
MLLAFSFISLFYVGNAQQSYGNSTVSALFAFGDSILDTGNNNLLLSVSKVNFYPYGRDFIGGRATGRFGNGRVFSDIIAEGLGLKNLLPAYRDPYLWNNDLTTGVCFASGGSGLDPITARTTGSIWVSDQVTDFQNYITRLNGVVGNQEQANAVISNAVYLISAGNNDIAITYFTTGARRLQYTLPAYNDQLVSWTRDLIKSLYDMGARKFAVMGTLPLGCLPGARALTRACELFVNQGAAMFNQQLSADIDNLGATFPGAKFVYVDMYNPLLGLIINPQASGFIDVADACCCTPTHLIPCLDASRYVFWDVAHPTQKSYETIAPQIIENIKAKLA
